United States Patent Application Publication US 2008/0114160 A1 - sequence listing, part 75

SEQ ID NO: 27885 - DNA, 15153 bp, Oryza sativa
ccaaagataaccatgttctaatcgatgtgagaaatggcccacgtcggtcggccattgtagttgggagcggacaaacatgctgattcccgccgcggccaaatctattcttatctagcatgtcttgagagcaaacagctttcaaaggaggaaacaatctaaatgatgattgctggggacatgtcatgaaatgcccaaaatcatactagcgacgaacctctggcagttgcctatgcaaggaaagcgaacattctaatcagcagaaatgttacagcggtacaaggcctagactgcaaacattttacacggattggagctacaactttttagacatcaatctaagctatatccagagttacaacgatcggcatggccgcttggccaccactcaggcatcaggcaccgtcaaggcatttgatggaggcagcaggttgagtggagctcatttccgagtaacagcttaccaatttatcattcacctgaaaaaaaagagtaacaagttaatcatgtgtcagtacacgctggtccgtccgataacacaacagcatttatctcattgctttttaagaaaaaaaaatctgctagaaaatggatcaaaggaactaaaatccctcaagttctctacttctcgtcaaataaaactatctgtatctcagcatcgcatgtaaagatttgattcaggtcacccttttaaacatgacagcagtttctcattacagtttaaagcatacagtttcaaaaaaccactgttgttttacaacccaaaaaaaaaatcatttttcttgcactgcattccacacaacatgaaatggtcactggtgtttactttcatatagttcacaaagaatgccatactgagggtaggtaggtatttttctcaccttcagtctcaacttttccaagcacgttcttgtgcagattggatgccctaaatgttaccgagattaattctgttaattgaaattaatcaatgaagaatctaagatcaacatattgagaacaaaaagtaatgttaaatagtacctgttgtatcctactgggatcaatagcaccaggagtctgtagctgagtataattcaattcctatataaaatgtttgagatgtaaaatgttcaaatcttacacaacttacaacttcaaatgtagatttaagagacaggaaagttaaaatctcaacagtaaagttcattcaaattttatcgctattatacagtgtttcaagatcatatattcaacaaagaagtttttgtctcttgaagcggatacaacctgacgtgtcaaaagtgctgatagacaaagtaatcaaatcaaagttgagaatgaaaaaataaaaggtttgaatacatagaagaagcacatgtactgaaacacagtgctaggtagaaacattcattagaatagttttcttggtttgacaagactcaagaaacagaaaagggatctctttaatgagctggcaacaggaaagaaggaaaaagatagaagcagaatatagatcatgcgaagctggaatcaaatagtaatgtgcatattagaattatagctcagggaacagcatgtgcacctgctgtttcatctgcatttgttgctgtccttgttgtgcctgaggaatttgttggacaggttgcattgctggatgtgtctgagcctgaggtggtgactgaagttgctgcatggcaagtttttgttggtgctgttgaagcaaaagtagtttctgctgttgctgctgctgttgctgttgctcatacagcacatactcttcaggcttatcccactgtaaaacaataactctaagagtgagacccacaaatgttgcgatctttaaaatgattggtgatgagtttcaattcttcaccttactctctcgagttatgctattgtagtagtatttaaaaccttcaggagacgtatgttcagtccaattgcaggttaaaggaactgcaggtgaagtagcctgctggggaattgtattaatgtttgatggaataatggcatttggggcaccagggttactagattgcactggctgaccctgtagtggaaacagaaacggttaaaaaaaatgtcagccgtaaaccacattatacaactaaacacaaaccgcgtacacattggtgtatgcatagaaaatacatgttgctcagcgacctgtgtgggttgttgatggtttagattcgattgctgctgctgctgcattagttgcagctgttgttgaagctgataaattgcctgctgtgaagattgataactggattgcaaagcagcttgctgttggagtagcaattgtggtgcttgcgatggcatctgctgcactggctgctgaagcatttgtggtgcaacatttgagggaagatgctgttgcccgggaatagcttgcatggaattggacacggctgaaggcacctgcacagcgctgacggaagcattttgttgcatcaacggctgtgacacaggaagctgaccagataacctattctggccaaaagaaccaggacccatagattgtggaacttgaagctgaccaatctgttgagcaggaccctgcaagggttgtcccagctgattattctgcaattgaacagggaaattctgaggcaaccctggtagcttttgcaaaggtgggatctgctggcctcccagatgatggccttgtgccatgggaggagggttcatgccctacaaagtaaaaggtatcatgatgtttaaccgatattttccatctaaagctattgatgaacagaaaaagtcgaatatcccagtttaccatatgtgacgaacttggcacagctgtttggcttgacaaagagccatttccgctgaacatctgaggtcgaaaagtggcctatgatattgcagtatcaaaggtaagcaaatggaagcaaacagaattgaactgtcataaaaagattgatttgaaccacataccgtatctgttgttgatgtaacagtactccctttcggagccataggattgtcagatccaaagttattaaactgatgaggtgctgaccttgggcttgatggatgccaagagtcaggaggcatatgccgaccccttggttcatcaaggttggcggtcggcctggatagaaaaagtagactcagttcaagttctaactattctcaagcaagaaatcagtttaatatagtactacaaagacagtcatcaaaaggaaaaatatgaaacaagggtataatgcccgcactgtttaattagaaaacatactgaagggatggataaattggactaattttggaatggggtgtcaaaatacctgttttattgttcggtttgttggatggactactgatcaaagtttatatggacgttttcatttactagcctttgtaggactataaattgttacttgcaaaatgcaagcctcaaaaatcagtgaacaggctgaagggacgggggcaaactatttgcaactattttcacttgcaatttaacattattctccaatctttaaaaagtagctgttcaatgaaggggtaaccaaacctgataacaagagctgcatcagatcgtggactgaaaccaggacctccaaatgcaggaccacccctaacaaaagacaattcagacatcagtatttactgggaaacgggagcaattgtatttatctaggtataaaatataaaacatgtgctgaacctagattagcatggaggtatcagcaaagaaaacatagggtgaaagtgtagccaccttgattctccaggtctaggtctcttaggatcagcgaaccgaattattaatggttgctcgcacccctaacacaacataatggatatattataaattttcagaaagtcaataagaactcagctaacagaaacttaccctcattacataattcccactcagagcactcatggctgccagcgccggttctcgtgatgagaatttgacaaagccacaaccttgattttgcatatgttacaacaatggtttgtaagggaaaaaaaataaactgcaaatcaatcaagttaatatgacagacctcggctctgcctcatgccatctttcataatgtagacatcttccacatgaccatacggcgcaaaaatctacaaaataaaccagacacaaatttgatttaatatgtacttgatatatgcttcttaacttaaaatgatgagttcataaataaagcatcaaaaagcaatgcaaaatttcacattggtcttggatagatgagttctaaatctacataaccttcttttgaacaacagacccttacctcttcaatctccttcgcagtagcttgcttattgagtgatgcgacaaacagcttgtgctcaatagcccctaacaaatagatgaaaagtgatgaaaccacccaataagtacaataaagaaaatataagtgaagaaagtaaatttctattaacaagtcaaacatatttcactccactaatatttttgtttagcctaaaaagggaacagtacgattatcaaccatagaagttatggggtggagctatgctatacaattgactcaaatcccagcattgttctaaagtaccaatagcccactgataacaaaaatactattagttaccatggcgttccctttcaccatcagcatatctgacttgaatagggcccattgcctgacagaaaagatacacacagtcaataattcaagagtcttacagacaaaagactgactataaatgagtacacaacaaagagattagttaccccaggtaaagtgtactggttgtgaagagctctgatggctcgctcagcctcttcagaagtagcatatttaacaaaacaacaacctgcaaatatgagcatatcgatttgatcacaagccgttgcaattttctgtatgtttcacaatgatcatgtatatgagagaaacatagcagagttagccaaagcaggatagaaaggtggcgcattattttgaaacaggtcgtgaaattcgactccacattccaatctttgacattgaagatgaacaatactactcccaccatcaagaagcgaaatccattcaacgagacaagcataaaagccttattaaaaagtaataagattaaataatataactatttggtaatatggcatgtcaaaatatttagactacactgtgcaactgccagcaacattcatgcaagaagaatttacggctaatgtatgaaacattaagttctttcgcgatgctccaactgactgcatattccattaaaatttcagtaacagcttgcatcatacaacttatgttaccatcatactagaacaaacataaagtgttttgctcgtaataaaagaaacagggtgtgcctggttcacaacttcacatacagcactatactacatccatcactccagaagatggcatacagacagcagttcacagtaatggatcatgtggtgcacagcaattgcagaaaattgtggtaacagtaggaagaaagctcatgtacccattaaatagacaggataacaaaaaatcttcaaagggttcacaaaagggagaccacatttgcaatctgataatatgagccagacctagattcaacaatgtcgatgcactcagattctgattagcacacgtggcataatgtaccaactacctaatagttccattcaatatcaatacaagccagtcacagcttgaccaagaataagtgctacatgttgaacatcatagtaccatcctctctcaacaataataatgagcataactcctgtactcataactgatgggaggcacacattaaagatggcaaccaagtcgtgcgcaataaacaaaatataatcacaacagcacatctcagggtacgatgccttgcgcagcctcctgactccaatggctggagtgtggtcataacccagatagcatattataaagtataaacgggtctagaatcagagttcaacttcaactgatggtaaaaacaaatgctcatccaatcatttccacaaaaaataaaataccagcaccacagttcaagtgcaagggcttttcccagcactaccatcaattccatgccacataatctgattttgggtattctgaactcaaatctttagtacgccataataacagaaatgcatggatcatgaatctgagtaaaaaaatcggagtgaaagttaccacaaatgaaatacataaaatcacaaaggtgaggactactataaacacatggtgcagtacgcattgcttaatgtatcatcatcaccatcatataaaggtaagttctacaaaagatcgactcaattttttggtgccacagtcccaggctaaagaaccagaatggctgaatcatcaaaagcaaagccataattatctggtactggaagtgataccagcagtgccattcattctcaaatacaggtcaactcaaacagagcaagctgatcacatacaacagcaaaagctgttggagattgcactttaatagatatatttcatacaaatggcaagtaccatcgtgatgaccatcacacccagtaatgacactctgtctgcaaacatacaattcccactaaatgcatacagaataaaaagttgtcatgcccaagcatccataaattgcatagtcagcatatcacaatcaaacaaccagaactcacaggatatcattattatttcagaataaccaggaaggccgcgccactcatggtaataatgtatagctgaactgaacaaatagcattactgtccatccaaccacaactctagattagtactgctcacaacaagcacccatgatttctgaacactaaacaacaaaaagtatagcaccagtttagattagtcaggacaacactacagtgcaccatccaaccagaaacccactcacaaatcaaagggttcatcactcataccaacgggattccatacagagaaattcacgatgctagaataacaaaatctggatccatggaacagaaaatgatgaaatagtttggtctgaattcatcaaaatgttccctgttcttttgcagcacattcaaaagaaatggatgcaaaagttttcaacagattgatgtgactgaacaaagttgctggtactgaatctgctactttgtctagcagcagatcagaatatccagttagattacagtaatcagacaacagttaattgcttccattctcttcctctactgaaccaacaggagagaaacagaatggaagcgcggtaaaatgaagtcaacaactgccaaatctaactgagagaagatgcaacctcgttgctcctagtaactctcaggacctgaaaagaaagagatacagaacttgtaataatattaaggaaaaaagttttgccgtaccttgctgttcaccagtcttcctatccttgatcaaagcaacttcaacaacatctccatgctcctcaaataaaggacgtacctggagaaaggagaaatgtcttttacaaactggatagctcaagaagaaaatagaaggcaacaaaagagtgccaaaaatcaagtagtgaacaacaaattaaatgggtaaccatatgaattacttataatggatatgagatcagataaacccgaaactaagcaataggcaaaaggtagcttcagctagtttctaagtgagctttttctctcaacgtagatagtttcttagatgatttttgaccaacatgaatgcctatatttatattatcttctaagccaacttgtagaacttgtaagcattaagcctacggattgtttcagatacagcgatagctacgataaaacaacctcaaataacagattatagtcaggcagaagaatacaaattgaaagcagaacataaagagttaactaaggacgaaagagcagatacaacatcaagtggtgtaagtgtaacactcacatcatcctcagtcgctgtccttggaactgacccaataaaaagtttaacatagttgtttctgttatcatgatctgcaccgaaaaattagatgtaaatcatattttgcagatgaaagggtgtaaaacataagctctaaataattctccagtgaagcccacttagataaaacagtacatcgagatgctctagagcattgtattcattactactatcacaatccctacattggccctggttggctttgaactggaaaaaagaactaaatagtatataaaacaagaaacgtttagctgaacatgctataactgaatgctgaacctagaataaacagactctcaagtttcagaacgagacgatttcctagcccctcctgcaaccattaggccatgttatgaagtaaaacattctctacaagactaaaaccaatcaaaggtcgtcctccatgcaaaaaaagttaggtggtggctttgccatctagtacatacgtcagagccatataatggaactgtacactcgtgtgcagtgcgaatttcagcaagatatcccacatgcgaatattaattgcttaggttttccaacatccacagtaaaagttgatttactaagataattttcatacataagctaaggtacaaatcgtgaccaaaacacctcgtcacgtgtaagcagatcccaatcctaagatagctcgggaaaacctaaagtatcccaggcgcgataatctgggcacaaacctgagtggtcaccacggccactgccgtagcggtgtctcggcccgctacccggctccccgtactcgccgccgccgccgcttctgtagcctccgccgccggagtggtccgacgggccacggtacgggtggaacctcccgcctccacctccgcctccgccaccgtcgccgccgcccccacccccaccacgggagaagcggtggggtgggctgccgctaccgccgccgccaccgccggacgaccagcgagaagggccgcggccgaatcggccgtccccgccgccgcgagaaccgggcgcggggccggaggaggggtcggtggagcggtcgccgccgcggtgcatgtgggtggagggggaggtgggctagggttttgcgagagcacgagagaggagaggagaaggagaggagaggagactcgggagggagaggcgactcaggcgagacctcgactcgagacacaacacaacacaagagcccgtggggattttttttttattttgatctttggtttctcgtttacttgagttgtgtgcgtggatgagattggatcggatggtctcgattcgatgcgcctattggtcagaagtagtagaactcagaagtcgttgagctcgtccaatttaagctcaaattaaaaaatatattattctcttaaaaaaaagtccaaataccctctaaactacatatagaagtttgtaaggcatcttaaactttaaaactagatatctaactccctaaactttacaaaacagttcatattatctcttaaggggattttgtataatggtttttatctaatttgtactctctccgtttcaggttataagacgttttgatttttgtcaaagtctaattgttttaagtttgaccaagtttgtagaaaaaagtagtaacattttcaacccaagataaatttattatgaaaatatattcaattattgatttaatgaaactaatttagtattataaatattactatatttgtctatgatcttagtcaaacttgaaacagtttgactttgaccgaagtcaaaacgtcttataacttgaaacggagagagtatataacttggatgagtttgatcacgtgacatatacattggacatatatattaaaatctccatttaaatctttctttttaatcacttgttagctctcacttgtttgcaaacaagtaccaacataataatagtatagtataactatataagtacaaattgatgatatgcaaatatgttatattagttattcaaaattgtttgtttaagcttccaaaatatgcaaaaccaccttagggggtaatatgaacggttttacaaagaccaagggattagatgtccagttttaaagttcggggtgctagatagactttcatctaaagtatagggggtgtttggacttttttttagttaacaagacttaagtacccgtacatacacgtatctctataaatacacatatactctctttgttcacacatctatactttttatatagttggtacacactaactcctaaagctcaacatgtaactgtgtcacatcatcatccactatggcatatcatcatcatactctagagtattttaaatctcatgcaagatgatgaggacacaactagctcggatataaccatgactatcttatgtattaatcaaccaaaggtacatgtgttctacattagatttacttattatatatttgaacaaacgttgctacacaataagttttgtatgttttcgtttgtagagatacttgcttgggcgaaagaaaagataccgagcataacgaatgcatggatgatcaaagaagttcattagggaccaaatcaagaccttctcctagtccacttccatctcaccatgtcacttttggtccatagaagataagagataaagttctacatgttttggattcagattcgggccttctgacagcatcaacttcaaacggacctagccgctgatctagaaggaatttcggggcccatgagtacttgttggaaagcttatggactctaatggttttggtcccacgtcaaaattcctaccgagatgccgggaatctctaaaacaagccacgtatcttatccagtccgaatctgatttgggttttgggccttgtaattgtgtcgtgggcttagcccaagggggtgtgcgccctagggcaaccctaggacgtccctaatcatacttaatcagtaaccgtcatcatttagagtcgggttttgcttagattaatctgtcaagaacagtttcgccgttagatcggtttgtaaattcgtgtgcttaatcattcatatgcaaattggttgcaatctatcttgttcttgcttgtgttcttcgattcgcatgtagggattagccttcttggtgaggtcaaccggatttcggcacggttgataaccagaggagacgtggtgctgcgattgcggggctcaatagcgtgttcattcagaagccggatcgagttgtgtcgcgactccgcccaattcgactgtttatcaatacctattgaaaaatcgagacctaacatccctcatcacaagcatgacatattatttacaatattgttgtatttttagaattcaacatgcaagtaatgttaaaatcatcgtttccacgttattttcacattatttacacatatacatctatcattataattttataatgtataccatgtatccatccacataccaattaactagtatttctcaattattaaatgcttatttaccatactataattttttaatgtaaaataaaggtcttattagttatatctgcttatttaccccctaaactattgcgacgatacaaaatactcccatgaactataaaaccggacaattttcatcctcaacttttcatattggacgaattacccccctgactcgctctagagcgattttgatcctacatggtagtctagtcaacatgaaaaaaaattaaaagtgacagggcccaccatgtcatacatgggcaatagagcattggggaagatatgacatgcgggtcccaccgttttttagtttttttatgctgattgaattgccacgtgtgtaccacgtaggaacaaatcgctctagagcgagtcggggggtaatttttcatatataaaaagttgagagtgaagaatgtctggttttatagttcatgaggataattcgtaccgtcagaataatttatggggtaattcagacttttttattgtgttttagcggcacaaggatttaattagcatttaatgatcctatttgtaagcatagtaatcggtctaaaattggagtaaatcatatactcataatatcttttgaggttgggctttatgcttggatgatattggcacactaaagttatgatttagcatagtgtggcttgaaatgcatttgcagtgacaataggtgtgtgttttcaactacaagatcccatgttcaatgtccaacgtactcacaatttttcttatttttttaaaaaaatgtttgaagggatgtccctccctcaagatcccatgtttgaagaaaaaaaaaatctttttttctatgtgtggcccaataaaaatgagcttggctagatagataatttctaacgtaagagtgcatctcataagtcataattcaatcacctactcaaaaaatttaaacagaaaaaaacaacaaccattacagtgttgcctttgcaacatgtggtaatttaaagagagtataacatctgcggagacaaccccattgaacaagggttatttaatattttgttgagtaagaaagaagatgacgctattagatgctcctagtgtgatttctgtgatgagatgatttgaactgtgttatgtttctacatagcgaattggtgtaccgactactacctccatcgtgttaaaaaaaaaaagactaccacctccatcctagttgaagtgcagttgtgagttttcgtgtccaacgtttgaccgttcgtcttatttgaaaaatttatgaaaaaatttaaaaaaagtcacagataaagcattattcatatattatcatctaataataataaaaattaatcataattttttttaaataagatggatagtcaaacgttgaataaacgatacaaaactatattctttcttggacggaggtaagtactactccaatttttatgaagatatgtatacacctccaagaccttgttcggttcgaaaaggattcccttcctcatggggattgagcaatcatgacctaagttagcttatttagaccgtaagcagcagaagaatatatcttatgcatataaatttttcgtacacatcaactagcaaatgtaaaaaagtttctagaaaaaatttgacacataatacatcctgggctggttagtgttgtgataaaactagcgtcattttttccacgcttgtgtgtgtgcttggtcgggtattcatttaacactatatataatagtgatccaaatagtgcccgaccggataaccgtttgatcaagcacactgcccgtttttcttgagtactactagctctcttcactagtctacgtgtcatctatttagaggattttttttaaaaaaaacaaaatgggtacggttttggctgttattagctgatgattaggaggatgagtgcattcccccctaagatacacctacacggagtggagaaacacactgctatgatgataacgtttgatttcttacaatgagtcaaggggcaagactcccgtaagagtgcttcacaaccagcactgtccaggattatcagtgtgcccaatcaacctggtgaaatgtgcttagcgagcaacatatattcattcatctgaaacataactctacatagaaacaggctaaacaaaacagactgaaaataaacagatgcagataagaaataatcaaaggtaatgagaaacagatgcagataagaaataatcaaaggtaatgagatgcatcagcaacggcaaaagatccacagcatactcatcttggtcatcgggttcaaaagattttgcacgttgctttcccgcacaataagcacatatatcgtaaactatttcatccctcttctgtccaaagagcggcaaaactaaaacgatattaactccgacacattacacccctgaatcagggaaagcttttaaagtggggaaagggggggagatctacagtttttcttcttcttatgtatggtacacacaagaacattacgatcttcgatcatccacctgggggtcagggtccaaaagatgaaatggcaattatcaactacagaaatcatcaaaagggcgaccggtcctatcttaactgctgactgctacactatgcctcctaaatctcacagttctacatcgtctcaacttggcgattgcttcttgtgccttcccttgaagaaggtccacataaactgatgctagcactgccctggggttgttgggcaacaaggcaacgccacggcttaccatatagttagcctgctcaagctctccctgcactgcagctgtcatgcctaggtcaatataaagaacaccctgagcttcctcaggcttgaggctttctgaatactgagattctcctgaggacaattttgtgactaccggagcaactgaatcttcaccatcgctgtctttctcaacaagggctttctcgcagttctcaatgctgtaaggcaactcaatatcatcgccatctctcaaataaacagttaattgctcagcagcctcctttggtctattcagtgcacaaagtgcttcagctgcgtatacatggctgaggaaaacatacatcctggaacattctggcagctgctgtagcaacttggcaatagacaaagctttcaagtgattctgaagacacaactcaataaatgcaaggtcccccaagatggcttgtttaattttgaggttctcttttctacatatgtcatcatacaaagcaagagagctctgcaaggtgacattcaagtttgaaattcccttctgttctccatttgcattagttagtgctggaccaggcggtttggaatctgtattagtggtgttcttctgacctgagcctttctggccttgcagtgatgtttgattcgattcctctgtgcctgatgcaatcaccagattttccttcgtagagggatccaataaaatttgggcattgagtagacactgtctagcaaatctaagggatatcagatttccatatttgtccaaacttacctcctccccagattctgaagaatgacttggcttcactgggtttataactaagtgccgccattttcctgaccccataacatcaacttcaatctcatcattgcacgaagtagcaccacttgaagtcaggatacccttttccagagctagcaggctacactcagcaaaacggagccaaaagagggacctgttgcacaagagcggcatggcttcacgaaaacagcgagctgctaacaaaggtttcccgcacatcaaatgttggatgccgcagttgtatgaaataagacaagatttgtcttgcgatattgcggtcagcttgcatggtttctctgaacgaagtgataagctatatttcaatgctttgctgaagcaccatactgaggtttgaatagat

SEQ ID NO: 27886 - DNA, 5038 bp, Oryza sativa
ttgcgatattgcggtcagcttgcatggtttctctgaacgaagtgataagctatatttcaatgctttgctgaagcaccatactgaggtttgaatagatctctgttggtggagtatgcaaccaagattattgtagaacatggccagcattgcttgttcactccgattattgggtgtgctcagcagcttcacagccttgcgatagtttcctctggcatattccaactgagatttcaggagaagctctgttgatgaatccctaccacgtgccatgttcatcagaactttcagttctcgctttgcaaccttaaggttcctagtaagaagcagaagccggaccttgtatatttgcagtctaactttcaaatcagcagcagtggcagcaagatcagctgaagcccttgagaaatcatttaaaattggtctgccccagttctgattaccaccatccaaggtagagtaaaaagattcaaactcaagtgtatcatcagaaaaatttcctgctgaaaggttttcagatccaccagcacaagtatttgaatcagaatctggaggtgtgctaatctttgcagaaggctttggttgagctgactgctgctgagctgtattagcattttcattctggtttgttgcgctaactactccaaatgacctttccaagtactgaattatatcctgtacaaacatatgtgatgcatgcagttgaataagatgctttatacaagagctaatgctgcaactttgaataaaaaggacaaacaaaaatggtacggttcgccatacaagttaagatcacaactatatctgacaatcttaggcacttgagttcagtaattctcacgtggaaaggcataatcatcatttggaatggataaaagtgaataatggaagccctaaaatcgttcagaacaggtaaatgtgaattttttgcattgaatcacttcttttttgttacaatgagtgttcacgcatggtacttctaaaattaacatatgaaaacatgagaatttggtcatcttggattgttgtgttaatactgcaatttaggacaaaacagaaaacaatatatggtagttctattttgtaatattaaataaatatagggaaaaattgcacgaaatgcattccagtcaaaatttgacaaaaaagggaactagttatggaagggtattttgacaccatggagcatatttttgggaaaaaatgtagataacaatgaatgtaaaacatcataagtggtaaatattggcatatgcaccaatgccaaggaggaagacattttttttaatttttatgcatcaaacagacgagacacagcatgtattgcattttcaggagaatctattgacaaaatacccataagcccacaaagctaatgtagtatttgtagcatcaactcacgatatactgagatgttaaaacttaccgcggcattcgatgcatcttgcaaagctaatgtaatatccaacaacagaaagcatacatgaagagcagttgtctgcagtattgaagaaatattagaaaatgtaacaacctggtttccaagttaagcatcttataactaataatacctcatcaattggttcaatatttcggtagagtggatccaaaatagatagtgcagattcataatcgtgaagatggtaaaggataacagcctgcaaattcaaaaatgccataaacaaatcaatcacctcttcagttaaagctcacaccaattacaatgcttaccatggttgattggctaaagcagtactacaattaatgcaagccatagaccagaaacatcaaacaatcaaataattacttttgcaaaagaaaagaacatacagtgttgaatgttattatggttgtgtcaaactcatccccataggttgtcgcattatttgcagcagaaatcagaggtataatgccactccctcttgatccagaagaaacactgtttcctgtcccattggcagaatcagtttgttgtctagatgcacaggcaagctcttcacttcttctctggatgcatgtaaggtggaacattagaattttcgtaaataattattaaatcaggagaataaaacaatgacataataagagaaaatgagaaatcaaaacaggcaccataaattaaggcttaaaaccacacaaaagtagatggctccaatgctataagtagatgtaagtggttaggggacgaccataacacgttacagtgatatgtgtgcagttgtgtaaatgactgaataactggcatgctgcataatattagatatttatatgcgcaacttgaatgacgaataaaaatggagtctgagaacctaatgtgagttccaaacatatagtgatgatatcacatctgaaaaaaatatagttataagttcatccactacaaaaaagaatatatggttttctttggtcagcattaacagcatttacataaaagttagaaacctttgacaaaaccagcatttgtaatattgtttcttacttcccatcaatgaagaatcgtaaattgtggaatacaaagactaccgttaggtccagatatattcaaaaaagaagaaatgatggctcatgactaaatataagttttgagcccctcactgatagatgtcgatcaaaatgcacgcaagtcaagatattatgactactctcaacatgtagcatgttatatgccttctgttttgtgcattaatgcatcacataactcctgactaatgagggatgcttttaccatatacaacatatacacatacaacaaacacaaataaaatgtagatgttaaagtttactatacacaaaacaaaataaattttcgtgcatgtagcatgtgacaaatatcttcatcaacccagaagaaggaaaagaacaaatttgaaattggaactgaaacatagatgagttgtgcaaaatgataagacccacggcgaatggatgaaggaaaacagggcagaacaagaagactgtccttttgagaactaagtatagttagtaacatataattgacactaactaaatgattggactaaagtgacaaacatcaaaattatatcatttcttgtataaccaaatttacaattggaatgaatttatataagaaaaaaaaagtaaacatagttttaggtttgaattattgttgccaagaaaattttaggtacatttggaaaacagaaatttctacccaaaaaaaatcagaaactcctgtacaaacagtaacttagctgtagagttctctactgacaaaagaatggatatttctagtacatagcctcaatggaaatatgaacatcaaaagtcaaacaaactaatgcaaattcactaaccttaacattgcctagaatttcaagcaatttctttgggtcaggacaaccatccaagaaagattctgcaatagccatattgtgaaggacctgaaagattataaaaatgcaatatcagatgccaaaataatacatgatcagagtatcatctctttatcaagatatagtggaaaagctaccagttcaagataaccaccgtagaaaagcatctaagagcataatatgcagtatacacagatatcgggtaattgttttttttcctatttgtatgcatattgttctttcagacttataaccttattaaacagatcatgccctatacatgaaatggacaagataagtaattagaatcatgcacgaggagaagcacatactgggtgacacataccagtgtggacatccatgtctacgcatgcatcaaacacaacatgaaactgatgaaatacaaattaacaagcatgcaaacacaaacccaataattcaagatgcacccacctgcatatcacacacagaccataacgcacatacaggtgaaatatgcagacatctacgcaaacacggaggcaagatgcacccaactgcctagattaacatacgcaaactcgcaactcaccccacgagctcaacccataatgctgcggaagcagctccactaacgaacacctagcaagcaagatataacctagagaagcagatggattcggtaaaagattttgtcgtttagcgaggaaggacctaacccaactaatcaccccgaagcagagatggcgaatcggctaccttggggtcgccctccttcttgagcaggagctgcgcgagcacctcggcgcagtcggcgtagcggcggctctggaacagcacggcggcgtctctggccatagcggccgtgacggagagcatcccttcctcctcggtggaggacggagactggggcggcggcggcgggggcgcctccttgggctccattgtgcgggtggatctagcaggatgggggctaatcgggggcgcagggcgccagggtagggccggaatcgcgcggcgaggcggtgaatcggagctccggagggcaggatttggggggccgggagggagagctagggtttggaaccgacggcgcggcgagagcgagactcgacgggggatgtggagcgagttgccaactgaggaaggccgatggatagacgtcggaggtcgcctcctcttttcctttttcttttttttttaattttgatgattgtttttctacccgacttatgcagtagtactaggcatcttaaccaccgtcggatctactcaaaatgttaaaccctaatataaaaaataaactaataagactccagcaaattggaaaaattctatgcgggggattgaaagtttacacgagagaattgatggtgagattaagatggaaatttaatttttaatcccagtatcttgtttggtagatgtggtgaaaattgatacggagtttagttggagattaggtcattaatcaaaacggatggctgagatttgtttaggtaaagtaaagaaggaattccctcccaattaccacccctacccaggtcaattccccatccccatcccaccaaaattcccatgtatcacaaccaaacaaagcagttaatagcctcatccctttaaactcccaatccctcctaaaaactccctccaaccaaacgagccgatagttataatccggttgcaaaataaatactacataataaata

SEQ ID NO: 27887 - DNA, 665 bp, Oryza sativa
tggtgcattatgaactcggttttaaattcttgagcaaagtaatttttatcggagtaattcaataaacagagagcacaagcaatttcctagctgacccctttattgtcgtctgttcatgacaattagcaggaattaatgccatggatgaaataaacagaggatggcaaatacaccgtgatgccattaacagggaaatgcaacaagaatgccatatagcaacataaaaccgattaaaaccatcttgttgttattccttccatccttaccggattctcaccggttcataaattggtggaggcgtgatgagtataattttagtggagggccattgctcctgcgaaagatcgaaaccaaaacagagttaaagcaaccataaagcagcagcatcaattagttcaagttggggaaaaccaatcgatttcaatccaagcagaaccttgaagtaggcgcagatggcgcggaggttgctctggtactcgtcgagcggcacgtgctggtgcacctgcatctgggcgctgtggagcgatgtgcgaaggaaggcgtgcgacgatcgcgtacgtgatttttctgccagtgatcccgcgtgcgtgttctgtcgttggatgcgatgcgatggatgattttcagtcgttagatttgaggaatgaagtatgaaagacgtagga

SEQ ID NO: 27888 - DNA, 526 bp, Oryza sativa
tgagatctatacaagatgatgaaaacctctaagagatggtagatacacgatataatgtagattaataacgagatctaactctatcggcaacttcctaacaaaagaaacagccgatgacaagttatatagcgtaactaacagagattataaagtatatatgataactcaacgaattacatagacaagattagagtgtcataaagatggaagcactattcccgagaacgcaaaccgccatgacaagtttacctctagttgaagatcgaatcgatgcagctcaacccgaaagcaagaactcgtcgaaataaaataaaagggtggcgatgcgccgaaagtgttattgaacatgtgttaattgattacatgggttcaggtcatatttatacccgagatacaaaatatgtccttgccggacacgactcttatctctaacaaactctaagataccataagtctttgcggcagacttttacccaaacatatctctaaggaaattaaataagatatcctaattaatagatacaat

SEQ ID NO: 27889 - DNA, 931 bp, Oryza sativa
aacaggcccttaatatctacagccgatcgagtagatttagtcccttcttacttattaatgactgccgattgatgcatatatgacatcggctcaaagataaatgatatgtcatcagcatctagccgatcggctatcgtttatggatttaaccgcggtttctttgtctttgattcttgatgattgcaggatcaaatcaactggcacgctagcatacccaaaggcgagttttggacctgcactgcagttaagtagatctctcaggcctcgtgttttcacatcaacagttgccccatatggaggtcactatggagcattcaggcacacgcaaagatctggcagagtggattcttttggccatcaatgtatgatgacacaaaggaatttgttcggatatgtacaagttgccagaagcatggagggatccctgctcgcgatgcaatgccactgacaaacaatcttcaagtcgagctatttgatgtatggggaatcgacttcatgggacctttcccaaagtcctatgcctgcgagtatagcctagtggccgttgactatgtgtccaagtgggtagaggcaatgccatgcagggccgtaaacgccaagcacgcccgccggatgttccatgagattatcttccctcgttttggaactccgcggatggcgataaatgacggagggtctcatttcatcgataagaccttccgaaaatttttgcaagaacttggggcttaaaacaacattgccactccatatcattcccagacaagcggattggcttaaacgaccaacaaacaaatcaagaacattctacaaaagactgttaatgagatggggaaagcatggaagaacaagctacctgatgcactttgagcatataggactggttattaaacgcccatatggctgttaccattccaacttgtttacaggaaaa

SEQ ID NO: 27890 - DNA, 10545 bp, Oryza sativa
catggagggatccctgctcgcgatgcaatgccactgacaaacaatcttcaagtcgagctatttgatgtatggggaatcgacttcatgggacctttcccaaagtcctatgcctgcgagtatagcctagtggccgttgactatgtgtccaagtgggtagaggcaatgccatgcagggccgtagacgccaagcacgcccgccggatgttccatgagattatcttccctcgttttggaactccgcggatggcgataagtgacggagggtctcatttcatcgataagaccttccgaaaatttttgcaagaacttggggctcagcacaacattgccactccatatcatccccagacaagtggataggcagaaacgaccaacaaacaaatcaagaacattctacagaagactgtcaatgagatggggaaggcatggaagaacaagctacctgatgcactttgagcatataggactgcttataagacgcccataggcatgtcaccataccaacttgtctacaggaaaacatgccaccttccggtagagttggaacacagggcgcactgagctatccggacttgggaacatggatctaaagagagccggacaacacaggaagatgcagctctctgagctggaggaatggagggacaaggcctaccacaatgccaagatatataagaacagaaccaaaagatggcatgataaacaaatcaagcacaaggagttcaaagcaggggacaaggtgatgctgttcaactcacgggtgaagcttttcgaaatggaaaacttcaaagtaaatggagggtccatataccgtcgtcgacgcttcatcacatggagccgtcacgctgcgcgacaatgaaggtaacatctttaaggtaaatggccatcgtttaaaagttttccttgatccattagaagttgatcgtgacatagacgtggtaaatctagttgcttttagcttctacccggagtcctcaggtcctccttgatccgttaatttttaatgccatgagtccttaggcctccctctagttatcttaggtctagctatcatgatgaaaacaaaaacaaaaataaaatataatataataaagttggctccttgatcttccaaccaagtgagtcctttttgcttcactcttgtctttgtttttcttttttgtccaataaagagtcccatgtacaaagacaagtgtgggggtgatcttgcacatcaacaccataaatagagcaagatcaccctagaagtgatgagccatgacaaacaacacaagggagattgatgcagtcatacccaatgaatcgtcctctgttttatacagagtgcaggtttgcacaatttttcctttcgacatccattctatcttgagtttaattagattatcaattttaaaatatcgaagataattaaactcaagctagggatggtacaattatagtttatggtctccctgaaaataacatacatgcctattattctttgctcattacttgttgcttgtggtgacatatccaatagggaccccatgctatctaggtaattgatgaatgagatatagtatgatgatagaaatcttgctcttcatgttgcacacttggaaattttataaaaagaaaaaatataacgatgctaaactcctcattgatattttcattcccactagagccataggttgatcagtcatgattagcttgctacatacgctacttgttattacattgagctttgtcgaatattgtgagcctagtgaaatgcttttcatacttttatggtcaagatcacatatattccacatacatgcgcacatgcttgacttctacactggaagttagcattcctcatttgtcattcatttcatccatagtccacaaaataaatactccatgtcatttatgcctcttcctccaaagttctttcaaagaaaagagagagagagagagagaggcatttctatgcaaaaagaaagaaaaaaagtgctcatacaagtatggagcatgatgatgataaaaaaaaaaagaaaaaaaaagaaatagccatgcactctcccaaatttcaaaagagaataaatggacgacgaggtatacaaaaggagttattattattttcctttttctatccacaaatttaccatacacatacacatgcacttcttgaccagaaagtatgtcttgtatttctgtggatcaattatttgactttgcaatatatgtgatgcaagtaatgctctactcttttccatgccctgagcttcacatagccttattagatggtaggaaaagaaaaggcacaatcatatgcctttgtgaggaatcatacactttgagtgattaagagaatcaatggaggagcaaagcaaagttataattttgtgttacaaaaaaaaactccaagttgttcttcatgaaatgttagggtgacttgagtcaagattgttccatttctcaattgctcaagatcgcatggtagacactacaaagatccataagtacaggtatggctttgaataatttgtttgcatgattattagtaaggaagtcataaccctattgtatagtctatagccttcattcgggacgagcaaagattaagtgtgggggtgctgttgatggtccttaaatcataatatttgaccgtcaatacttgcatataatgaaataaaatatgttatccaacttagtggtaaggtttactactaattatttccactagtgttggtgagatatgtgtatgcaggtattttgagaagaaaatacatccgtgaagcgacaaactgcatctccgcgcattcaggacacatttacacagattggaggccccataagtcaattaaacaactccaaatgggcccaaccatgatgccaatgggctgagagcctcaaaattagtgtccacgaggaaaaacgggtccaacagagccctccgggtttggccgaaccaccagttcggccgaaccacttctgaggccgttgatcacgagattcgacgtggacggccctgattacttcttgatggcggttccggggtagtttggtcatttcacataggctgtaacagtcatacctacctataaaaggaggagctcactctactttccatcacacaactttgagctgagttacaagaggctctattgtatcttttgtacattacaataaggtagagagtgaggggatgctctggaggagtgcccggaagtttggcgctcatccgacttctacctcgacgagtgtagctctctaggaggaattctggaggagtactggacctctagtactaggactctttagtatttatactaagtgctctagtactaggactccggatagggaaggaagttcctgcgcaagtattagagtagtaattaataacttatgcgtggtgtctaggttaaagattacctttgtttgttgtgtatcccacggttttgtcagaggtagacgacaagtggtgatagccctgaatcccgtcctattaattctccacgttcggatacatcatagagctatagtcggaaccacgctggtagaccagcaggggtcggtgcccgaagcaacagataggaaaatacctttgcttagcttagataattaaaacacatagaaagtcctctctagcctgcctacctatagttgttgtccttggatcatcttagccttaggtagattacacatgttccctgagttcgatattcttttggggtcacccgaaggtgaagtgctacagcagtattccgtgcgcttgccgatttacctgtggtcgtaagaaataccaataggcaccggccctcccttggtctgccaggctatgtccagtcttgagctctatgatatacccgaacatggagggatacataaaggacagacatgactattaccacctaccggccatctcaatttttgggtagcaaacaacaaagaaaggtaatttctaacctagacaccacacttaagttattaattactccctccattccaaattgatctacatatagttttttttgaggttattcctaaatgatctacatatttgtgttcatttattaagtctattcgttatttgtgtattggagtaaatggacattgatgcatgcatccatgcacacaagtatttataacccacatgcaatatattgatttgctattggctaggaaatagtggggatggtgcatgcatagagtttgttgctagagtaaatatagtatgagagagttattagcttttcttggtcttggtgtactatgaaatatgtagatcaatttggaatggagggagtactactctagccttgtgcagaaacttcattctttatccagagtcctagtactagagcactcagttgcacactaagtgatgaacccgcacagatgagaatatacctcacttaaaataaactaattaaagaacataaggaaagtcgaatacttactttataaaaggaagcatccgccaaggtacaagcgagagaagaaggccgacaatcctgactttttctggtactccattggaagaatcccgacagtccaacactccttcgtataattcttggaggaactccaattttttggggcacaccttctggagcttcccttcactccctactcaagccaacatactaaagtaaagtctaaaatctaaaggtgagttgtactctactttgttctgcattttccaagtgtgaaggcctcctccttttatagcttgcaacgacagttagaatggcagttcttgatgagggatgttaggtcccgatcttctgataggtattgataaacagtcgatttgggcggagtcgcgacacaactcgatccggcttctgaacgaacacgctactaagccccgcaatcgcagcaccacgtctcctctggttatcaaccgtaccgaaacccggttgacctcgccgagaaggctaatccctgcatgcgaatcgaagaacacaagtaagaacaagatagattgcaaccaaattgcatatgaatgattaagcacacgaatttggggttccacaaaccgatctagcggcgaaactgttcttgacagaataatctaagcaaaacccaactctaaacgatgacggctactgaataaaaatgattagggacattctacggttgccctagggcgcacacccccatgggctaagcccacgacacagttataagtcccaaaacacaaatcagattcggactggatgatatacgtgacttgttttgcagattcccggcagctcggaaggaattttggcgtgggaccaaaaccatatgaaagtagactcaataagctttctaacaagtacttatgggccccaaaatttcttctagatcagcggctaggtccgtttgaagttgatgctgtcagggggcccagatccgaatccaaaacgtatagaactttatctattgtcttctatggaccaaaagtgatgtggtgagatgaaagaagacttggagaaggtcttggtttggtccccaatcaacttcttcaatcatccatgcattccttatgctcggactcttttctttcgcccaagcaagtacctctgcaaacgaaaacacacaaaactcattgtgtagcaacgtttgttcaaatatataacaagtaaatctaatgtagaatatatgtacctttggttgattaatacataaagtagtcatggttatatccgagctagttgtgtcctcatcagttctggtggtcggttcatccacaaccgtcattagggtgtaatcctagatttccacttggaaggccaggatgattggctacaaggtcggttgggcagaaccacgggttcggctgacatgtgggccccacctcctagttgctcctttggctaggagactaactagtgggcccttatggcagttaggattgtttagctcaactttaagtcggttttgacagtaaggtgggccggccctccaattcttatgctcgtgcgtgattgaccgaaggttcattttcgttgcatggcgggtgtattttctccttaaatgacctgcatatatatacttactgaagctagtggaaatggttagtaataaactcctaccactaagttttggtattatatttgacgtttcttatgcaggacttgacgattaaagtttgtacttaacgaccgtcaacaacacccccacagttatccattactcatccccgagtaaagctcatgggtcgactagagtaatgactttctgctcaatgatatgacacgcaaaatatttcaagatatacatgtgtctgtgaaccttgaagtgtctaccaccttggggttttctttgatgtttataaacttttactgtactcctcaattgattctctcgaatcactcaaagtgtttcattccacaccaaggcattgatgttggaaagtactaatcataattggtgggcatcaattttggaaacacaagcacgttatacttcgaaatggaaattacctgcatgcatgttctatggaaagtatatgcatgcaatatcttatcgtgttagacccgctaataggttatagtatcctatagtgcattgcacagatcttaaagcatttggattgtggatggccatggagcctgggcaccatggtgcaccaaagaaatgtactaactatatatatatatatatatatatatatatatatatatatatatatatatatatatatatatatatatatataaataactaacatgacgatgcgaagaagtatgtgaacatgtcgcccattataggtgtagtttaggagcacaatgcttatgataaaatggacaataataaacagtacaaataattacatacatggagggaagcaaaacatactatatggcactaaattctcagcttattactagcattcaattggttccttcttttgtttatcttatccaccaatgtaaataatccttttgctcatttggttttgtttaaactgaacttttcataacaagtgcgatgtatattattcactgctatgaaaataacagtaaccttgtttagttcataaaaaaattcagtacaaacatataaaacatcctactgatctccgcactggcatcaccatcgggtgctcttacacttcagaagatagtggcatgctttctcttccctccatcccaaggattacaaggtaaagataaacgggtaactgaaaaaccagagacagggaaccatttgtggcaagcttgggacaaggcaatctagcctacattcgaatcaagtataaatatcttacaatgtacatgtcaaagatttgaagttatcaaagagaagtaacaaagttgttatgatataatttacataacaggaataaagccaacatgtccacaagtaaaatacttaagatctaaactagaaacaaacacttcaggcatataagaataatactatagataagcaaaatttatgcgaactagcttgtcctgaatcactgaaaaaatgaaaattgtaggattgaaacatggcgatcaaccctaccggaggaaagaggggagggagggaggggttgaaatcgaaatcgaactttgaaatatcaaaactcaccttaacctcaaaagcaaaaaagacatgcatagtctgatatggtactattcaccgtttgaccattgctattcactagtttggaaatttcaattcagacacaaaatcactttaaacacaataaatacatcatatcaattattcatcacaccatattaattatcaccacgatttccaaaaaatatcataaatggtccttctccatcatgtttagagttctgctgattcactcatttacattaataatcgctaaaagattgctatgcatttattgcttttgcactttgttttatatgtcatcgatatgcattattgctttcaaaccttgtttatattggtttgctatgcatttattgcttttgaaccttgcttattgatatgcatttattgctttcgaaccatatttatatggtattgctttgcatttattgcttttgaacctaaaattacattgtttatatgatattgttaaacctttattgctttcgaacctaaaaaaatatgttgtttttagatggatgagcatagaaggcactcatcaagcccaaaataattaccagcaagttatatgccagatacttatattctagaacttcaccctttacatgttgtatgacgcatattggttatttttcatgtcgtgacatagtttcaacctgagacaaagagtgatagtctctttttcatgtacaaacttctttcacagttcatgaaaaataatcattgagattctctcttccaagctcacaacaaactaatatatctctgccaaacatctgatgatgcaaatgttctccttttttctaatttccttctccttctttgctctccctcctcaccttgtcttgctgctccttgtctgtcccagatatttctaagttcacatgtttgtgatgctgcactaccaatagttaattatacaaaactcggaaacaccccatcaccattccaaactttaagcctctaaaacactagcagacctcaatcatatgctctcctaacttaatttacattgtgggcatcgagcccaggagaccttccaagattatgaacaatatcagcagagagagctctgtttcgatgattttattctctatttctccaactggaaaatctaattgaattacaggtgaattatatagctccatagcagccaagacttggaacatgccatcccacattcccagcgactcaactcatgataccctcagaacatgccatcccacgatccgattgaatcggcctaagctaacaaactttgttgtgcacaccgcacatcacaagggaaaatgaaaaaaaaacagaggatttgattatcagtttgccatttctgaattaataactggcatacaacctactccattggttcttccttgggagcttcagcaatgttttcaccaaagagacggaaactacccttgggtacgccgttgagaggtgcagcccccatcaccagcaccctcccctcctctttgttggggatggaggatgtatgagggttgcggctgctaggaacagaaacattactgacatctattggagtgataagggataaaaatgatccaacaaaggcactgggaaccctcttgtcaccccatcgctcgtctgagttgtgactcttcatgtgccaaccaagtgcttgtccactgctgaacatcgttccacacttgcggcactcatatggccctctcctgctctgcctggcactgctgaccaatgagcgggttgcctccttggcaacggagacatctatggtgtgctgcactcccttgcccatagtcatctcattattcttgtgtgcagtcagatgaccaccaatctgcaaaggacagtcgaacatctatgaaccaacaactttataagcaattttctttaaaatttagttgcatttaaagacatatgggtgccctaagaaatttacctcagaaatgttgggtggggggacagtgatggtggcctgcttgtggaggccaacgatgaggtccccagtagccagctgcatgttgccatacgcctcgctgtgagcccgcttcgacggctccggtaactgttccaggcatcgggtggggttcctactgctgtggttgccagtggaggtccagctgggcatcagcacagccatagtgagatcacccacttccccatgatccttcttggcaattttcttagttgagatctctcttgctgtcccctttgctgccatggttgccaaacatggctggaagggccgctccccgtatccatgcagctgccgttctcgcaccacaattcctgaggctgagatccgctcttcggacaacattgccatagaagcagaggatgctggaggtggctgcatgtgatcgccagcttcatcttcacatcggccaccatcaatcacttccccatgagcttgtgcagccgccaacctccagatccacccgcctatcggcactgaaagggcagaggagaagcccaattccgatggatgttgcctgctgcttccatccacatgcccatggccatcttccacaccccaacgaggaagtgaaggcggcaacatcgagccacggcgccaaagtgcagtgcccccatggcggcggtcacctatgatcatgtggcgcttgcctccctcagcttggatgcgtggtggttggcgggggatgtggaagcgatagctcccaacagggcgctccgactccgatgaggagatccgggaaggggccatgggcgccgccgatgaggaggggattgattctggtaagagatagggtttctctggctaaaggatttacctgtggatactgcttgtgcgctggtactaaataagcggggggagggagggaggggggatggacacttgggcaggcagagtggtaaatcttgacattaaataagttatcatcaattgaccttatgaggaaggtattttactgcttcctattttgtataactgcacacatttggtcttggtccatggagaatgttgggtctcaacccttgttggcccaacatatgttgtgctgtattcga

SEQ ID NO: 27891 - DNA, 7660 bp, Oryza sativa
ttaaacatatcgagaaatcaaatcgcaaacaaagaatgcaccatttcgtcataaaagaaatatatgatgcctagataaattagcttgtacttaaaaaatgaaaattgacatttcttctaacattttggtccaatcaaggataaatcaagaagagaaaggagctccctgtaccaaaagtactacctaaccaaaagtagcataatgagaatatatgatgcctagataaatcagtatgtaattaaaaattgaaaattcatattcttctaacattttcgtccaatcgaagataaatcaagaagagaaaggagctccctgtactaaggcccagtttatttcagcttaagattattgcaatctaaattattaaatcagattactctaagctagattataataagctgacatagaataagctgcgagctatttgtttctttggattattggaggcatctaagggtagtgggtctttagccacccaataatctgaaaaaagctcctccaaagaagattattatattatagtaatctggcttatatattataataatctatcataataatctacttgtttgtttcagcttactcctaataattcagattataataatcctaagctaaatcaaacagcgcctaaaagtagtacctaaccagaattagcataatgggatggttttaatgtttcacaaaatgagacctggtaatatgcacatgagtagtatatttttcccaaaaggcagaaccagacctggtcgtcgataatcaaaaaaaaatattccttcattggattgactggcacatacaaatagaaaggttaggccctgagatttagtagcattgaattgttgatcctagaaagcaatggggaaaaataggtacaaaagggtcaggttgacatggagttgatgccatggtgcccaattatgcatgttcaagttttgaacaggagatctagttttgccaaatcaattttaaacctaataacaaaatacagccatgtcatatcggataacctccatacagtaattttcattacacaaaaattaaacttgtcccttattttttttaaacaggaattggaaattgatcccatccagacaattgaacggagggagtagtaattagtatcaaaccagcatcccgagcctagtaacattgttcactgtcttatcgcatagaaataaatggcatggttccgatagtccattgttcacaatttcatggcacaaaaagaagctaattcaaactaacatatatgccactgtaaacgagttccatcgtctgcacactcatagttcaattttataataaacatgaccaaaaatggtatagccaggtgaatacattctccaacttgaagcacataatataaatttctcacatataatcagttgaatgcggctacaacttcatcttaagatcagacgtaatattggtgctccatcttagggttacctacaagcgtaatatttgtgctccatcttagggttttttttgtaacaatagaagaaaagacaacagttcatacatgattttgctgttttttttttacttaatacatgattttgctgtttacgattatgatttgcaaagcccagcaagcatgcataatgcatttgctatgaatcaaaacaaaccaaaactgaactaatacaatgtactatgtcacaatgagatgagttttgtccaggttcaatctcagaatatatgtgaaaaaaaatgagaaattttttttttgacttaaccttgtttgtaggggagggggctcggaggatggagagcatgatgtaggccggcgtctttaggatcagatgactctgtgcactgtagggtatgtctgtgttatagacggtgacgtgtacagagaagataggcctattcactgtgcattcccacacaatcgctgggacacgatcacctccacaccgtcggtttcgcctccatgcccctactgtaaagaggaaatatgaacagttgatctcatcttgcttatggcacataacaagtaataaataaaaatatttccagattcaagcatattgctggttcaaaactatattgggggatatgcatcatttatactccaaataaagccagcacaaaatcttaatacaggaaatatatgatcaaacccaagagtaaaaatgcaccatttctaattcggatgaatgacaatcaagtccattgcatctacatataatgaggcatgttctgtacactcggtcatcaattttattcagaaaatgacgatctatctcacaagtatatggactcgattattacataaatgctacacataattttcactgtaaattgattgattagacaagtacttaatcatgcatgggtggtacagtggcaaatagggaaacaaatcaataataatataattttgacccatattcctataaactattcaattctgatatatataaggccttacttgattcggcggcaattccagccaagcaatttgatgtcaaattgagcagtgaactgaaatctgtgtattggttgtagctggaaacattttaacttgtaatgatcgtttctcaaaactatctcttctcacaaacatagatgaagtgaaaaattgagcactacataaatctttataagaatttgtatgcaagaaaagactcccatattgaaacacagttgtaaatatgagtaggttccaagaagttgagtagctatacaagaaatcatggtaatagaaaaaaaccgaggaattgtaggaatccttactttcctcccatatcacagaaataagcactcaccttcagtagcatacaaaaggaaccaagggaatgatcaaacaccactatttttcattgggatttaccaaacccatgcactaaatggccaatgccatgaacctgttgccataattggaggtaaaaatatgagtagtaactgcactatatgcagtttagtaggaaacatggtagcatatacacattctcaagtgtaacagcaacatatactcctgtataaaaattcagcatactttaggttccacgtgtagtattcatttgaaaagggaacttcatggcattaatacaacataatcttttgatctaagcacaattcagaagcaagaaaactgaatgactgttatggagagtgtcaagttcgtcttgtccggttaaatatcttaactatagagtcttcagaaagagtgacaacaggaaggtgattccccatcttagtaagcagcaagaatctttaggcagaacagtcaaccatgaagctacattttttatagaacttctactctcaacagaaatacaaaaccattatgtttgatcagattgtttgcgcaatctgcaaagtaggctactggtagcataaatggcagcccttaacagttattaagcccatccatacatcaagtttaggtataaggtcacttgaaatagatccataccataatgcagatgtttgccagtcaggaaattgctgcatctttgtccagatgtctatgactggatggttcaattctttagcaactgtcaggcatgcctgtgcataagtgccagcagcctcattggttctttcaggtagttttgaagggtcatcttctccatacatgtccctgcaaggaaagacagggacagtcagtaaggttcgcaaatcctctttacaaaaaaaaaagggaacattgtttaatttgtaacttgaaaaaagaatcttcagatcaagctaagggccaccaagtggtgggtgactggatatatacccgataaaccaaatatgaaataatcccataatgtagaatacacatagttttacatgagaaatacagacaacatgatggtcaaattgcataccctgtactgtactggtgcattatgaactcggttttaaattcttgagcaaagtaatttttatcggagtaattcaataaacagagagcacaagcaatttcctagctgacccctttattgtcgtctgttcatgacaattagcaggaattaatgccatggatgaaataaacagaggatggcaaatacaccgtgatgccattaacagggaaatgcaacaagaatgccatatagcaacataaaaccgattaaaaccatcttgttgttattccttccatccttaccggattctcaccggttcataaattggtggaggcgtgatgagtataattttagtggagggccattgctcctgcgaaagatcgaaaccaaaacagagttaaagcaaccataaagcagcagcatcaattagttcaagttggggaaaaccaatcgatttcaatccaagcagaaccttgaagtaggcgcagatggcgcggaggttgctctggtactcgtcgagcggcacgtgctggtgcacctgcatctgggcgctgtggagcgatgtgcgaaggaaggcgtgcgacgatcgcgtacgtgatttttctgccagtgatcccgcgtgcgtgttctgtcgttggatgcgatgcgatggatgattttcagtcgttagatttgaggaatgaagtatgaaagacgtaggactgtgttggtgaattatatggtagaaaattgggaagcacttagattgtctttccaaccatatatattaaattagactatttatatataaaaaataaaaaataggagatgtttccttcgtccgtcaaaacaaaataaatagtgaaaaaaataaaagaaagttcgactcccgtcaaaacaaaataaatagcgaaaaaaataaaaaaaagtccgactccctctcagaaacgaaagaaaaagtccgactttatatccgatccccccttaaaaacggaaaataaaacacaccacacctctcggtctcggtttgagtcgagatctcaggcacactcctctcggtttcaatctataccgtgatatcccatacatcttggtgaaaaaaattgatgtgccggattgaagatctgtttgcaaaaacggaacctaccggtcgagagcattccatttttatatgattttaatttttgggtttgtacttttctatttgagtccctgtaatttttatatttacatttgagtccctataatcttgcaataagatacttgaggtcgtttttttgaaaaaataataaaagggagagaacgagggcataaaggtgcataaaaaaaaagaaaaactgcaaaaaaggaaaaaaagggaaaaaaagaaaacaacaacaataaaattttgtttccactaagtggcgaaaaaagcagtagatccaattcctataaaaggcaaaaaaaagtggtgaaaaataaaggctagatccgattcctttaaaaagggaaaaataaagtctgattcctataaagacgaaaaaaatctgaaaaaacatctaaaaaagtttgtccgattccctaagaaagtggctaaaaaaatggttcgtgaaaaaataaaaagctggttcgtacaaaataaaaaatgcacgcgagaaaaaaatggaaagggcgaaacaaattccgatttctaatcagtgtatatctcttctctatctctaatctaatctaactatttaaaaagagaaaatgcacgagaaaaataaaaacggttcaaaaaaatgcgtgagaaaaaagcgcaaaaaaatgctaaaatggttttccattttccataaaaaaaacatgcgagaaatattatttccatcgtcggtaatttttttaaaaaaaacatgcaagaaaaaaactgtaagaaaaaatgcgccatttctaaaaaatgatttgaaaaaaccgcgcaagaaaaaaacaccgtctattaaaaaacaaatcgctctgaaaaaactgtcagaaaaaaacactaaattgatggatgcttgagtcggataggatacatcgatttttttaccatctattacacggcttttatttcgtcatatattcccctgtattggaaaaaaagcaaaaaaagaacattaaaaaaagtgcaaaaaacgtgtgagaaaagaaaagcaaaaaagggagaaaaatatggttttcgttgtcagtaaaaaaaatcaaaaaaaacatgctacgaagaaactgttagaaagaaatgcgccatttctaaaaaatggtttgagaaaatcgcacaagaaaattatacaccgtttaaaaaaaacaagctgctcattaaaatacaaacattatcattgacatgattatgcatgaaaaacgtatattattattagaatttattcaccagttcagttttggtccctccagttgtcccatatacttactaaaccaaggctgaaatcagttttaagccatttaaaattgctggggaattatgatcaattatttaatcacttagtagattatttttagataaatgagaccaacaaaatgtttatctagaaagtattaattatatgatattgtatttgaccaacgttaatatggttttatgtcaaaataattattatttccttaaatattaaattatttctagaattcgaacatatttcactaaagattttatttcgatactataaagtgtgtgtttctttcccattgcagatgcctttttacctttttttccttttgtagcactaaaaaaactgaaaacatactatagtagagtgcaacaaagcaacgaaacgtttaacctctcttactaaatcccgttgcaatgcacgggcatatttgctagtatattaaacatgaaggaagttgactggctaggttgcacatcccttggaagttggagcaaatgtttggagacagtgtactccaaaatcagcatgacgtaaacggtcgtcatcttcacgtaaccactttgatcttctagctcgtctcgatagatgcccatcaagtgttgtacatgtgtaaacctagtgttgttctcgtcaatattgaaatatgttttagctagaagcgagttcacctcttgttgtagtttctttgtacggctacgtgtgatcggtccttgaaatggtgtaacggattagctctcatcagtgattaagtcagatgattgtcttgagtgttcatgtgacgggtggtgggacacatcactacctagggcttatattcatcatctttgtctgctccctgccggcaaaatctatttgtgcttcttctaccactgctatcgtctacccgactggtttccaccgtttcttctctacccacacctagtccccaccatgatccccgagtcagaagttcctcaccgattgcttggtgtcctccccatctcatcttccgactgaatgcaaggagaagagcatggctgaaacaaataaataagatatcttgcatttaattgaggacgtttaggtggaggaaatatttcgaatgcacagaagatcctaaggttcatatattaatggatgactttgaatagataagcaatagttaggtacatattagtatttagtttctttataaaaattactgacgtacaagtttgtcagtcctacattacttttctctatcacaaacttgcatggcttacattgtagcaaaaaaagtagtggcatgtagaaacaaggaggttgaagcccggggaatttaatagccagtatataaaagagcaacacatgataccagtgtcccaagctggtacattatactagattagaacagcttgtttgtgactgggaaaaccgatagtgtcatttggtccatcaccagtacgatcaacaaacaccgatctacgtaggcgtcctactgctccacctgtgatttaaggattg

SEQ ID NO: 27892 - DNA, 5763 bp, Oryza sativa
tccctccggcgtacgccgtcccgccgcctcctagacgccaagcgccgccgcgccagcccacggccgcacgcaccgccctcggctgccatccccgccgcccttggctgtcaatccagtcgccgcctgactcactcgctgcggcgtcgtcgcccacagccgccgccttggccgccggccacctcctccttcccccaccaccatcgccgcctcctgctgcgtcggcagcgatgctgcacgccaccccaccgccgcgccaagtgaagagggaggacagggacgtgcgacggcggccggcgaaggtgggatcaggccggcgaaggtgggatcgatccggatgggggcgggagaaccggatagcgtgaggagggcgtttctctctcctgttttggcggatgtctatttttggaggatgttttggagcgtcagctggagcctctttttttgcttccataagccatttctcatatggagggttggataaagagctgctggggatgctctaagtacctgtgtaggtaaggactgatcacccgttacttgtgtaggtgacagtagtagttcagcagtgtccaaccatctgtgatgaaaaataaataaataaataagtaaataataataataataataataataataataataataataataataataataagcatcaaacactcatcatcaccgtccagcctcaagcaaagggtgaccagattaggcggcccatttggtcatgatcgccatctctagtaacaaagagcttaggtggccaccagaaccggatcatgccggctcaaactcgtcttctttaaatttttagaggcactaggagcaactccaataaaatggccaaataggtagccaagttaaattttagcaattctaagaaaaaatcgtgctccaagagactctccaactggatgcccaagccatccggctggctaaacctgagttcccgctagccaaatctagccagtcaagccggctggccatccgctcatccagtgggacccatgttctctctcactctctctccccctctctctctcctagtctcctggcacaagcacgagctcggccaagcagcagcggcatccaaaacttgggcgatgcagctagcgttgcattgcaatgcattgcagctcggtgttctttgctttgcttgccgcagccattttttggccgcttctatagcagcttccttgctttgcttgccctcccatgacatgtcctctccctgacttgtgttgggtaaatcgatcgatgggcgccgcggcggcggaagaggtggtggtggtgagggccccgccgccgtcatcggggaataggaggtccaccaccgcccgatgttgttggtgcaatgctcccgccatcgtcgccggagctcgaggaggattgtctgattatcaagattgagtcgtgcagccgggtcttcgcgttcgtggatggcgccgtcggggagtccggcgaggagagggacgcgaagacggaggcgctcgttgaggtgctcgctgcggtgaggatgagcgggaagaagcaggggctggagagagaggggatggggcggcggcagcagaggggagaggggagagaaggggaggaagaagaggaagaagaaaaagttgcagagagtgacatgtgggtcccattgtcatagactcagaatagagagtatgaatagagaggctgttggagtagacaacaagtttgacttgccaaattagatggagagttggccaaatagacatttggagagtcagatttgaagagactgttggagatgctcggccctatttgattcagcttaggattattataatctgaattattagaagtaagctgaaacaaactgatagcttattatgatagattattataatctataagctagattactataatctggtaaaccactctacaggtgtttttttaaattattgggtgactaacagctaacaaacaaataataatccagagaaacaaacagctaacagcttattctatatcggcttattataatccaacttttagtaatctagttttataatttagattataataatcttaagctgaaacaaacaggaccttaggcttcaatcctaggtcccgcacaaaaaatggtcagcctacttaacaccgtgaaagaaataaaaaatcactatcatcaacaatttttgtgaaaacttgcatcataccaggttttcttgattttttttcctctgttgtgctagtgctaaataaatttaacgacggaaagtgattaataattatttatagaaccatgattgtgaattaaattgttttatagaaccacgacagaaagtgcttctctaggagtgcttgctctcaaaatgtctcctgcttctcctgtgatacctgatctgtctcctagtagtattataaggcactgtggagattatggtaccatatacccacagggttacattacgtgactggtaattcatagtaaaagataaggattcgggtattgtattatcttgtatgtcaaggaaatatcccataatcctagtcggttacgattgtaaagtatctataggggacttagaccgtaagggataaggtttttatcttataatcccgagtcgggggtgtaacaacctgaaaatttaactaatagtttaacatgtcaaatgctgtgtttctaataacattataggagtttctataactttcataaaaaaaatcttgagatgattcttatgtttaaaatggttttgccagactttcatttgggatgatatgaatctttagctactattatagggaaaacatttcttttccagaaaacaaatgaccctataatcttggtggcgaaatctataagttgctacgttaatgaagtcttatctttttttcagagagtgcattagcgctaataaaatctaccaacacattttaggagtagcttgactaatttaagttttcacttgcacgaggggaacaatgatataagagatcaagctgactcgataccagattgtcggtgatatgggcccgagggtaccccttaaggagggcgaaggccacccccagcccacgtggtgccccccgagggtgtcggtccctggggtggagcagcggctgcctcccacgtcaggggtcaggccgtcctgaggccctctatgctttgtttcgcgtgtgcgccctgggcgggcgctcccagcacccaaccaccacatttaatgaacaccgcatttaatgcggcgggcatgcgcactgacagaccatttgcagccggaatgacggatgtgacggcgtgcaggcctaggacagggcgccgtgcgcatgcgcctcctactagcagagggcatggcctatgcctgccccatcccgtcaccattaatgagcggctttctgcctctcatttggactcagaccagctttttccatgctggtctgtttgagagatccctaccccttggtggggccggacggccagtagtcgtcgacagttaaaaaggaatgacatgggtattcgcccgtgtcggccggcgtgatgggatggagcccatgccgtggtaaggcgcgcgtggcttcccatgtcgggaggacaaacacacattaattacctgtaaagaatgttgtcctttcccttgaagttaggtcttgggcctttgtggtaaccccttaagatataaaaggagaccaatgcctgcaagaaagggggatcgaaacctagagaaagaaagcacttgtattctcccaccagaatcaaccacgcacatgagtccctggtccgaacatgtataaaccgcatacatctccatcactcccgaggggcccgacgccctccgcatgtctttcccatcaactctcaaaccttcacccgtgtccctggtccgaaccagaaagggggtcccacaatccccagcttgaagagtttaccctccgacacaaataatccacaaagctccaccatttttctcccttttagcttttaagccaagtcgaaacctctttgtatttaactttattgaatgaccaatcggtaattttgtaacctcatagtctattcattaatttttcgcttattaaataatctacccgatcacacatagcttttggctagtagattgagtaactagtcactgtgtgcttgagtatatgttttgagtgaagtccaatttattggcttgaatgattttctttgttttgctgattggtacatgttaaatgaacatagagacgctgtaacaaatctaagcaacataaaattccttgaaggtcctcatgtcaattagacaacctaagatgacaactatgaaggtttcatcattttatcaccctttttactacctcaagtatatcggtcaagtataatcatacttaattaattagaaatctaatcggcaaaatgaagcaacttctaaatgtgcttaaagttgaacatgagggtataggttttataatttattaaaatactagattatttatcacaagttaatatatattttttagaatttttacacttagttttgacctccttaaaagtcaatttagttctcagcataccccttttcacctttttgccagaaataaaaatatttctaattttagagtgaaactttgaaaaatggaaactaggaaactcaggatatctccacatcagagcacataattttagcatttttctaactagttcaaactatttaaccaagaaggagagaaagaaattcctgaaaaattaaccaaaacagatgttcactctgcttcctacccatcctcctaacccttgcctagtgtaccacgtcctgccccacatgtcaatgtcctaggctaactccaccctgggtgcacgcaaaatgtcacgtggcacccacgacaggcatgcatgccgacacgtatctcgtgtggtggcaccgttcttcgcttcctctttgactccagctctccaagctgctccctctctactcacacttcaccccagagccaagaaatcaaagtgggagagtttccccttgctctcctcgccttcatcttcttgctggccgtcgggatgactccataactgccgcccaatgggtcatcgtcatcgccatttttctttcgttcccgactcaccgcagcacgccatagcctctgctctgatttcgccccgtttcttgcagccgatccccaggaacaccgacctcgccacgggagctctggagcgtggccacaccgtcgtcaaagcgcagccgtgggatcatgtcgccattcccgtcgccttaagctgaatccggctgagttgctgcgccactgattttgcctcatcgtcttctacaaaatgccccaagaatctcacggatctatgcagcgaggagggagatcgaccaccgccttctccgactccgacctagcccccccgtcgtcgattcctgttcaagcggtgagccatttgtcgattgtttgcagtagtaccaaccttaggtggtgttctatgtcataatcacgccggagagacgatgtaaaccacgtcgccgatgagatcacggccaacacacacacaaaaaaaaaactcatgcgaacagaggaacacggtcttgtttggtgctgctgaattgacagcttttccagactattccattgcttaaaataagctattacaaggaaagcaaccatagcctccaattaggccaaaacaagcagacatgcacaactaaccatatagagctactactaatcagcacacaaggattattcttaacaatctcctcctaagacttgctgtgctcattactgatgttgatcaggccgatctttgaa

SEQ ID NO: 27893 - DNA, 9413 bp, Oryza sativa
cggtgagcatttgtcattgtttccagtagtaccaccctaaggtggtgttgtatgtcatattcacgccgaagagacaatgtaaaccacgtcgccaataagatcgcggccaacacacacacaaaaaaaaaactcatgcgaacagaggaacacggtcttgtttggtgctgctgaattgacagcttttccagactattccattgcttaaaataagctattacaaggaaagcaaccatagcctccaattaggccaaaacaagcagacatgcacaactaaccatatagagctactactaatcagcacacaaggattattcttaacaatctcctcctaagacttgctgtgctcattactgatgttgatcaggccgatctttgaacgtagctcatggaacttggtcttgcccagcagcttcgtcagaatgttgcccagctgttcttcgctcctgatgaactccacattgatcaggccattttccgcagcctcccgggctagatgatacttcacttgaatgtgcttactctgtccatggagtactggatttttggtcaaggaaatggcagacttgttgtccacccttagcattggcgctctcggtgtcgatccttgcacttctgccagcacacgagcaagccacaatgcctgacaagcagcatttgcggctactatgtattccacctcacagcttgactgcaccaccaccttctgcttcatggattgccaagtgattgggctgctgccgaggaaaaaaatcaccccagtcatgctcttcctagcatcgacatcaccagcataaccgctgtcactgaaccccctcaggtacgcctccttttccaccttcctgctgaaccaaactcccaaattcttggttcccgccacgtagtgtaggatgtgcttcacagcagcgagatggtcctctcgtggatcttccaagaaccggctagcatacccaacagcaaaagcaagatcaagacaggtgttaaccaggtacctcaggctcctgacgatgcttctatatgccgtcgcgtcgaccgacggctccgagctgaacttgctccgctttaaccgtgtctccatgggcacttgacattgattgcacccttccatgccacacttttccaggttcttggtagcataagctccttggctgagcaaaattccacttgcgctctgcttcacctcaatgctcaggtagtagtgaagttgaccgagatcgctcatcttgaatgcagcagccatctccttcttgaattgcctgatgtcgtcgtagttggagccagtgatcatgaggtcgtcgacgtagaccccgaccaccagctgtgcgttgccgttccgcctgacatagatggcgtgctccgatggactcctcttgaaaccgagtgactgcagtgtgttgtccagcttcgcgttccaggcgcgcggtgcttgatgcagcccgtacaacgccttccgtagcttgagcaccttgtgctccttgtcggcgatgacgaacccggccggctgctccacatagaactctttctgcaggtccccattgaggaacgcatacttgacgtccatatggtccagctcccaccccttgtgcgccgcgagggcgatgagcaggtgcaccgagtccaaccgcgccaccggagcaaacagctcgtcgtagtcgatgccttgccgttgcgcatagcccttcaccacgagacgcgccttgtgcttgcacactgctacatgctcatccctcttcaccatgaacacccatttcaacccaatcgcacatcgaccaggtggaagatccgccagcgaccaagtcttgttgtcttcaatcgcttccatcttcgccatcaatcgctctgcctcatcgaacaaggcaagctcatcagagctcactgcatacagctcctccgccaccaatgcacatggtgcgaagccacatggcgaggctggcccgatgatgtcgttgatgctgcagaaccggagtggggcatcatcatcgtggtcagcgtccaggtagtcattgtcgatgcctgctggtgagccggtttccagctccgtgtcgcgatccccactgagatgcggtgattgctcacctgacgtcggctcctcgccaccagccctgccaggatgcggcaactactcccccggctctgcagtggcaccataaaccactgaggctgtcggctccatagtggagtactccaccgtgaagatgttgtcgccaccacctagctctccatcatcgctgctagtgccccagtcccactgggcttgctcatcgaacaccacgtcacgcatcacatgaacacgctttgtgacgggatcgtaggcgcagtacgccttagacccacactcgtagccgacgaagatcatcttgcggccacgatcctcgagcttcgtcaggtgcggcgttgtgttccggatgtagatgatgcagccgaacatctgcaggtggtgtactgccggcttcttcctgtgccacgtctcgaacgggatcatgccgtccacgctcttcgtcgaacacctgttcagcacatacacagctgtgcttaccgcctctccctagaaccatccgggcagtcccttcaacttgagcatgctccttgtcgtcaccaccaccatgtcgtttcggcgctcgacgacgccattctgctgcgagctgtagggcgcagttgttggcaactttttgtgacaagttgacaagcacgatcgcagcacctaaacgccttgcggcgatctcagagtcgccaaccacctcaatctagccaaagctaaaccaagatgggttttgataactaaaccggctagcggagccgattctaggtagaacgatggatagctactcgtctcgtgggaaggttttcaggacaaacctacaaagaggtgtcgcaatctcgcagcggcgtcggacgagttacggcgcaaatcgacaaagatggacaaactaaactagaactagaagcaaaagtaaaagaccgattcgattgattgatagttgattgatttttacaatgaaccggccatgtcccttaaatataggttggtcttgccctctataggccctcctccacgtccaactcgggatagaatccaaaggaaacccgaaatatgccttcccgagcaaggaaacctcgtgacccgacgaaacagtcctggacttggactctgccggtcagaccgaccacacaccacttgtctgaccggagttcaagccgtggtctgacaggcctatacacggcggtcagaccgtcctccagaggaaaacaccagtagacttccaaactttggcaactttccctattttattcctaggtgccaaatttgagtgtaaacacatgcccccctacctttttgatgaacaaggtgaatctaaaagcatagaacatcttttggtcttagggtgataatccaattaccgggccataggacttcctaagcatcttgccaaacgctcaggaagtatttcttcaagtatttcccattgattgctcgctaaaaacgctctccttgaagtgtctccaaaaaatacatgttcccccgaacaatgccgcatacccaataaggaccctcccaactaggagaccatttaccgaactctctggatcgaggaaccaaaggcaaaattgtttttcaaaccaagtctccaacttgaaataactttgctttcacccttttgttgtatgccttggccaccctcttcttctctttctctatctcttccaaagccttcaagcgcttgtcgatgacttcatcaagattgtctcccagcaaggtcttgtagtcttcacttgataaatcatcttgcttgatataccgaagagagccaagattcacctcaaccggcaaaatggcttcttgaccataaatactctcaaaaggagtgactttagtggcaccaagtttagatatcctatgcgcccacaatgcctcagaaagcacttcatgccacttctttgggtgttcctcgatcttctttttgactaatttcaacgtcttattattggactcggcttgtccattagcctgagcgtagtaaggagaagaactcaacaatttaataccataagattcggtaaaactcttcacttccttagatataaaagaagctccttgatctgtagtcaatgtttgcggaataactaatctatagataatatgcttcaaaataaagtcaattacctccgtatgagtcaaattcttgagcggcatggctttggcccacttggtgaagtaatccgttgcaactagtacgaacctatgcccctttgatgacggaggataaatttgaccaatgaaatccaaagcccaacctcggaatggccttggtttgatgataggattcaacacggcggcgggcgccaattgaacattgccgaatcgttgacatgcttcgcatcccctataatatttgaagcaatcttcaatcatcctcggccaatagaaccccgctctcctaagcaaccgattgatgagttccacaaattccttcatgtacctctcccaaagccactttagatgtatgctttcagctacacagtactccacgaactcgatcgaggtgaattcacctccgcgatcagtacagagtcccttgagctttcgtccggattcgccttctgcacacgcctgggtgtccttgacggcagccgctgcacaatcctttgaaggaatcgcggctacccacatgtatcggctaaggtcgtccaccaacagcaggaaatacttgttcccccatggtgtcgccggcgtgattggaccgcacaagtcgccgtgcaccagctccaacagctgtcgtgcacggtactcggcctgcacaggaaacaaggtacgtcgttgtttcccggcttggcacgcctcgcacagctgctcgagctgcccgatctccagcgatccctgcaccaactcctcccaggctagcttccgtagcgctgccatgttgacgtctccgaagcgctcatgccagcaccatgccacctcgtcaccatgcccatgcagcgccaggcacgacggctatgccaacttgatgtggagcatgtacagccagtttgccgtgcgctttaccttcgccagcaaccgttggtagggctcccgaatccacatcacgctgtcatcgatgtcgaccttgcaccgggcctcatcgagctacccgacgctcacatgttcgtcgtcaatcgtgggatatagtagatgtcagagaacgatcggagctctccattcttgcacacaaacacgatggtcccgcggccctcgatccatgccatcgagtcgtcgccgaagcgcaccggcccaagcaccgccgtgtccagcttcgcgaacgccgctcgggatcctgttggtatttcttaacattacagataaaatccgcaagcgcacggaagataccgatgtagcacttcacctaggagtattctcaggtatcgatttccacaggaaacaggtattacttccttatcaggttcacccaaggacactaagctaaggtgggcaaaggatagagaagatttcctagtgagaaacagtgtctacagaaagcttaattttaatcctaatgcaatactccaggcactggcaacattgttcccaaatgtcgctctactacgtacccaggtagggaggacttaagtgccacctctacacccacctcaaacatactgtgggatacgcagcaattactagctattgattacctaaacaccacgtctaagcaattaatatatactcttctagtgtttataactcactaaagcaatcactatattttagttgattatagcaaacaataatcccgtatgatgattaggtactaaccaagaggtaattctcacaagtaaatctaaattactcagaaagataattatattgaaagcagagtaattaacagaataaaagaaacaggagaggattaccgacaactccggaattcctccgacttcttctactctactctcttcctaattctagtatacaaaatagtacaatagagcctcttataattcagctcaagcttgaaaatatgtgttgagagtgaaggagtgaagctcttaaataggcaggtaatgacggttgtggaacggaaaatgtccgaagtgccctccaaccgtcatcaagaatgtatctgggacgtccacgccaaaccacgagatcaatggtggagagatgggttcggccgaaccctggcatggcccaacaggcccagaatttggcctgtggatgcttcttgctctaattatctgtttcttgcaattttgggctgattctctagtattttgatgtagtctaaagcccatctcttgtatggatgggttctttcttcactttagtctgatttccctcccaactttggtggtttatgacctgcatcaaataaacaccaacacttgtggaatatgttagaaataaatcctatcactatgttggatgtcttattatctgagttttatgcaggtattagccgtatgaatttagcacttaacagccgccaacagatcccgacatgtggttgttggcaacagtgtccaggacccatgtctctgcatcgcgctccttctcctcatccaagtgggcaagcaccttttcttccccgagcaggatctaggtgccggatgccaccgtcgtcgcctcaggtccgccggatcccgtcgccgccaccgagttcctattctgccctccgcatcactaggtcggcctacaggagcggaatcaccgacgagttgcgctggggaactccaaggggcgatgttaccactggtgcgggcagcgccgacgcgctcatgtcttgcagggataccgccaccgcaggagaaggggatagagttggcgacgatttcaggagaagcagcgcggcctcccctttcttctggacgacatgggccacttctttcttgggcttcgagtggcactcgcgagcccaaaggcccaacttggcaaaccgcctacactcgttgcatgtgcacttgctagagttggatggcccacttgatgatgagccttttccattgccatgaccacgcccacaactgtgttttcctcctccaccttgccctgtgccgccgttgaagccgttgccggagtggttctctgcttccagcttctcgcatcgtgcgtcccattgctcctcagtgaggtacagcaacgctggtggctcctcgtctgcatcttccactgccggagccgcccggtaaggccttcaacggtgagcatcgacacatccagcaaagttgtgatcacgaccacgatatgcttgagatgttttggcacgctgcggatgatcttgttgacgatcatgctctcctccagcttttcacccaaagtagctagagtcgcggccatgccgttgaagtgtagcacgaaagtcttcaatggcctcgccatcgttgaatgttgccagatcgaacttgtgtcggaggttctgcgccgccgtcttcttcacgcggtcatccccaacccgcatggtcgctatcgaggagtgaccctctctagcgggagatcgtgagacccccctttcgtgagttcggccgggggaagaggctcgcttcgggagataatgtatccaccctgaaccctgcaaaaacgcacacgggcaccgggattatacaggttcgggccgctatcaagcgtaacaccctacttctgtgtgtgggatttatggatgagtgttacaaaggttccaaaactccggagagctcgcctgccttctcttccaagagcttaggtctattccgtctcgtcccctttcttggtgggcaaggtccttcttttatatctcaaagggataccacatgcaccacctcaacctactcttctatcaagcgaggacccaccctatcttgaccggacctcgatccatgccttcgtccggaagctaagcctcagctcgttcttgagcgggacccagcgccgtcccccacctgacacgggggacagtcctgtcattccctcataaatgggtgaagacttgtggcgaccgtccttctcgtggagggagctccgaatcatgcctctgacgggacgggtcatacctatctccactccggggcccgagggtcgtcaagggtcggggcggagggcgcggcgccggggtccctcggggggtttagacacgctgacggcggcgcgagcctttcctcgaaggtccccggggggagtggggctcgtgccgacgcgatgcgcgacaactcatcagcgactgcgttgttgcatcggggcacatgccggagctcgagtccgtcgaagtgacgttccatgcgtcgcacttcacggacgtatgcgtccatttgcgggtcggtgcactggtactccttggagacttgattcacgaccagctgggagtcgcctaggacgagtaggcggcggatgcccattccgaccaccgccctcaatcccgctaggagtcctttgtattccgccatattgttcgtggctcggaaatcgagccgaacgacgtacttgaggacgtccccacttggtgaagtcagcgtgactccggcccctgcaccttcaaggttgagggagccgtcgaaatgcataacccagtgcccagcacgaatgtcggcgtttgggtcctctccatctccggagagggagggaacgttggacggaacagggtcctccactggggtccactccgcgatgaagtcagccaggacctggcttttgatcgcgtgccatggttcgaaatgcaggtcgtactcagcaagctcgatggcccacttcacgacccgaccagtaccctctcggttgtgcaagatttggccgagagggtaggacgtcactacggaaacccgatgtgcttggaagtagtggcgcaatttccttgaggccattaagactgcgtaaagcatcttctgggcctatgggtatcggggtttcacatcccggagtgcctcgctgacaaagtagacgggccgttgcacctttcggtggggccggtccttgttgtcaggggcaagagacccggggtgcccttgctcaggggccccaggggggtctcgggtcatgtcaggactataggcctcgggaccacccgccagagcctcccttcctcccacgggggcctcggggtcctcccgggggttgggggcttcaggtaccgagccttcgggggatgaagggccatcgccagtcgaggggctcccggtctgctctcgtcgcgctcgactactagggtggcactcaccgcgtggggggtcgcagccaagtaaagcagcaatggttcctccgtccctggggctaccaagatgggaggggaggtcaggtaagctttcagctgattgagagcttgctccgcctcctctgtccacacaaacggcccggggcgcttgaggagtttgaataggggcagcgccctctctcccagcctcgatatgaatcgacttagcgcggccatgcatccagtgacgcactgcacatcaataagcttgctgggggggcgcat

SEQ ID NO: 27894 - DNA, 3457 bp, Oryza sativa
tatataaattgttgtttaattggaattattagaatttattttaaaagcctagaagagaagatctaattttaattaataaattccaatataaaatggggccagataaaatttcattaaatactttgcttaactctataattcctagatttttctgggatttatttgagccaaggaggtatttttaataaatggaattgcatttcatgagtaatttaaattggaaaaggttttaaaagtctcttttggctttgggcctaaagtcggcccaaaaccttctctctctcctggcccagtccggcccgaagatgagccggccgctcgcgcgcgcgcgttcgcccgctgataggtggggcccacctgtcagggccgtcgtcttcctcgcgccgtcgcccgcccgaaccctagcgccgcgtcgccgtcgtctccttccaaatccagccgcccctttccatttccggtgaaatcaatagaggggaaatgatcttcgggatctcctctaccttttctcttttggaatcgtcggctaaatcgtttggaaattcgcggattcgatctcgaatcggattcgtctctctctccttcgaaccctaatctttccttctcgtcgccggtcgccgtgggccttcgccgccgccttccaacccctataaaaggacccccccaagcccgccgctacctgccgccaccctcgccttcgcctctcgtcaccggtagagccctagcaccgtgtagcctagcgccgccgtcgtcgctgttcgtccagccgtgcgtcgccgtcgctctggtcgtcgttgccgctcgggaaagtcaccgtcgtgatcgccaagtcatcgccgacctcgtccgcccctccgtcgtcaccgtaggccaccggaacaccgtcgccgttgtcaagctgaaggtcaccgccgtttcttcctcgacgccgtcgccgtccgttgatcttccgccgttgttttggtcaccggtgagttcgccgcgtcgccctctacgtgttggtgtcctccgttcgcatcgtcgcgccgtcgttcgccggcgagcttgcgcgcccgagccgccgcctgtggtgacgtcaccgctgacgtcgtcgtcgtcgtctcccgtggtccggccgtggaccggtcgatctcggccgttcgttttggatggaaagatttcagccgttcgtttctgtgagccgccgccgtgcacccggttcaccgcgaaccctagccgctgacgcaataattcccttttccttttcaaaaataattcattattgcgtcataattcaattaaaatctaaataaatgatttaatccgatttaatctttgaaaattcataactaattcatctagctcggatttagttggttcaagtctctaaatttttctaaaattgagatctacatgttaaaaatatccacatgtacagttcatgcttgtttatgtgctgttttggtgttttgctcctttctgtttagattccgacgtttccggagagtccgttttcgcaggagaagaatttgaagagttccaaggccagcaaggcaagtcacacagatcccaaacaaccctttgagcatgttgatcccgtttaaagctattgtttctattcaactattgcatttattttcgaatgtcattgggtggaattaacctattgtttgttatagcccttttgttcttgattactttattccttgataccttgggttattataacttgactagttgggctatatatattggttcagctagatattagatatgattgcttagccatgcttagaaacattagcacactattgggataacttatgactcactattatttaatgatggcttaatgatagttcacgatggtcaatcgtgattggttaattaattacttgccaactaaaacttgataatggtgggttgtgagcacatggttttgagagtcgtgctcatgacaattaaggaccggttcacgagtttcggttgtgaaacattaaccgtgccaaccacaagccagcgtgggcaacggctttaccttttgtatagcatggttcattgcagagcaccagactgagaagtggcggagataagcccacgggggtcgctggggagtccatgccttgtttataagggggtgattatgatccaggaaaggtgcgctgtggtggattgtgttgtgcgaggggtactgtcacagctcctttccgaggtaccgtggtggtattgaggcacatggtgacatgttgtggggctgtgtcttgtgggtacagtggtacacctctggccagagtaaactatttgaatagccgtgcccgcagttatgggcgggtctaacaatgtctttcgtgagtagtttcacacttctcaccataataaaagatgctataactggtaataatttgtttagctcctggtttggaatggtatattcctggtttggagatagatctgtacagccgggcatggttgttcaggatggttgggcctgagcagcatgggtgtgctgtttagtgttgattaaaattgatgattaattactctactgttttataattctcaaatgtttgctaaatgctgcttttgcaaatgagccctatattatgccattctttggtgtccttgtgcacttgcatatttgctgcgtggcttgctgagtatgtcatatactcaccttgcaatcattcatcagaggaagagttctacagtgatgctgatggtgtggaggattaggtgtagccctggtcaagctgcctgtggagtggagtcgtctgcgccgtttatctttttttttccgctgcttagatctttattgattgagaggaactatctacctctgtaatgacattttatgcgcttattaattagagtaacaattgtactctattatcaatttgttattgtgtgcctcagctgattcctggacgagggttcacacacatgtaagcgtttggaattttggatagaaattccgggcgtgacaagttggtatcagagcctccttgaccctaggttatgccaaatggttacccatagaagccctctaaaaatattggaaaagtagaactgctctcctccctttctcttttaattaaaccaaactaatagcacatgcacttcataatctcttttagtggttctcattcaaaatttattctagtgttgttagtactgtacatctattactgtactaatggctcatttaacagcaaatgttttacaacattgttttattttgctgcaatgaaataaatttagcatgttgattttataactttcttttattttcttttggaacctgttgttcaaaagtacaaaatttgtgaccttgtttcaacttatcttgcaagcttggtttactttatttacttactttttactttgattttctaactttattcaaattaatctaaaaacttgtgctattaattggataaatgtcttaactccctcctttcacttgtctttagatgctgcgcta

SEQ ID NO: 27895 - DNA, 813 bp, Oryza sativa
aaagaaaatctttgtgtgtacaacatcataccaagaaagtacacaaataaaggtgctctctcacaacatcatatcaataatttaccatgagcagatctatattggctctctcaactttaattctatacaatacaacatgataccaagaaagtacacaaattcaaaacccgggcattattcttagcacaattgaagctcgttaccaaaagctaatcaacaggatgaaactcaccgttgcttgattcactcccttcacggcagtagtgcttccaggcgcccctccatgcctctgactgctggccgcagcggaggcagcggctcacgtagtacgaccggagcttctggcagccaagaacacgatcctgaaccaattccccattgacggacaggttgcggccgccatcggatgtgtccaagatggcaacttggtcgtctccgcaggtccatgagagggttggctcggagacggagtccaaagccagggaggaagagcacagaaggaggaggagagcagggaaaagaggaaaagatgccatcgatactgataaacaatcttcttgaccctttcgaattcacagagatatcatcttcggaatccacaaatcgaatgaaattaacgcgagcacaagattgctaactcgtgatctccttttccttacggaaatgaaaagaaaatcctagtcaagaacaagggggagaagaaagcaagggtgagcttagaattttgtggggaacgaactgcctgctagaacaccaccaaaccccgagaagcagaaaagggaatcgagggggaagatgaagacttggatttaa

SEQ ID NO: 27896 - DNA, 689 bp, Oryza sativa
tgtcattttagttcatggtaacatatgatcacatccatagtaatagaagtatgcaccaagtgtaacatcactggaattaattgcaaagaattggtatcaaagaagaagccattgaacatacccatctgatagttattctctcttcagcagcccgcttcagttctaccggtcggcgagcagagagaatttccacaagcagtatgccaaaggagaagacgtcgctcttaggagtcaactggtatgttctcagatactcaggatcaaggtagccagcggttccttttacttttgttgagatgtgtgtcttttctgtgtcactggggccacttcttgcaaatccaaagtcagacaccttggcccggtagctctctgtcagcaggatgtttgatgacttcacatcccgatgaattattgtcttctctgttcacatcggagaaattatcagatagcaatacagtattattaaaatcaaacttcatcaaaataaaaagtgtgaatttcataaaaccgcagcaatagcaaatgatttcatcaatatgaaattttctcccttatgtgtgtatggcatgtgggcccgatttgcataaagcatgtgtacgtcatgtgtatgataggtggggccaaaattgtagagatataaagttacagctttttgataaaatcgtatgctattgttgcagttctctgaa

SEQ ID NO: 27897 - DNA, 1540 bp, Oryza sativa
tttgcaacagaggcccgaagaccggtccttatatggccgaggtgctactatcaaaaccatgcaccccgagcccagcctaaaacccttttgaggattttgaatagagagggaggtgtgaatccaattccacaataatccaaccatttcacagtgtccaggtgatgagaatattcccaaagtctagagttgtaaaaccacctaatgttgcctaattaaccagcgaagcatctacctaaattcatactagtggtaccaggcatagggtacccactagttgggggttttgtttgttctagggtgaacaaggtaataataacaatagcaataataaggtcatataaagataaataggcatggctaaataaaacagtgataacgcgggaatttaaataaagcgataatgcattaatttaaatcaaaataattttataaactgggattcaatatgttcaaggatgatgtgacttgccttgctcgctttcccaaatgtcggcttcaacctccactaagagcggatcttccgaagctgcagcgtctacacgaccaacggaaaagaaaaaggcttttactctaataaactccatataacaagcaggaacaaagcataaaaatgggttcttgacttcttaaggaaaaattagagacttgaacggtccaattccgagttcaaatggccaagttatggccatttgaagtttatatgctctttaaatagatatttgcgaatttctttatttaaattttaatttaaaaagggttcagccgaggggagagggcgcgcagaccgggtccacgggagtggggcccacgcggcaacctcacggtccacggtggaccaggtgcacccgggctcacaccggccggcgccgtgggtcccacgcgtcagccgcacccgagggcatgggcggctgacggccggaccccacgcggcagccactcggcgggaggcggcgcgcccacgccccgatggtcgccgccggcgaccaccggtgcggcgaagcggcggccgagagaggggagggaagggggaaaggaggcgacggtccacggctcaccccggggcgatggcggcgacggaggaggcggccggagcggagggaggcggtggcgcggcttgggtcgacggggacagcggcgctccggcggtcggcgaccgaaacggagaagtggacgaggtcggcgaggatgcggcgaaaccgaaggaggcggcgccgaggtgggaggcggtcccgggcgacgacggtcggcggaccggagctcagcggcgacggccgagagagagagcgacgtcgcgagctcgaatccggcaaggagaaaggcgggcgagaggcggaaacggacggaggaagcgcggggagggtttaaatagggccggggcgagagagggcggccggaaaagaaaggaaaccggcgcggcgttctcgggctccatcaatggcgccggcgggattaggagaggggtttccaaacgaatccaagggagagagggagggaaattttgggggaaagggagagggaatcacggggagcaattcccccc

SEQ ID NO: 27898 - DNA, 698 bp, Oryza sativa
gttcttgctggtctagtggaagtatcattggtacatgtgtcccgtcaatagagccaacacaattctatacaaatacaaatatacccttgattaagtctttttatgtacaatgattggtttaactcaaagtaaaaaaaaaatcaaaacatgaatctgttcatacctcaaaaaaggggtgaaattttggtcttctcaagatatgatgggggtgtaggaaaggtggccgtatatatacacatgtaagttgtgtaactgcatcaagcacaaccccaaaatacttgcttattgtttgcccgctgtgttgaaactgatcttgcaaggtctcattacttgcattttttgctagtgcatacaagaatatagcaacttgttcttctactgagacatctcttgcatcagcaagtagttgtttctcacgcaacttatcgactaaagctcgaaaaacattaacttccatgcgaaaattccttttgcttaggctctgatgacctgttaagatttcattaacacgacaagcccctgaaagttttgatgtgtgcatcggtttcctactagatgatggttgtgacgaatctccttcgatggtagggagaacaaaaagcatgaactcatcttcattctgtgaccgtcgtcgataacttggatccatgacaatcacaggggaaatccacaacaaataataaatctgatggtttggt

SEQ ID NO: 27899 - DNA, 950 bp, Oryza sativa
ttttagattcaccttgttcatcaaaaaggtaggggggcatgtgtttacactcaaatttggcacctaggaataaaatagggaaagttgccaaagtttggaagtctactggtgttttcctctggaggacggtctgaccgccgtgtataggcctgtcagaccaccgcttgaactccggtcagacaagtggtgtgtggtcggtctgaccggcagagtccaagtccaggactgtttcgtcgggtcacgaggtttccttgctcgggaaggcatatttcgggtttcctttggattctatcccgagttggacgtggaggagggcctatagagggcaagaccaacctatatttaagggacatggccggttcattgtaaaaatcaatcaactatcaatcaatcgaatcgttcttttacttttgcttctagttctagtttagtttgtccatctttgtcgatttgcgccgtaactcgtccgacgccgctgcgagattgcgacacctctttgtaggtttgtcctgaaaaccttcccacgagacgagtagctatccatcgttctacctagaatcggctccgctagccggtttagttatcaaaacccatcttggtttagctttggctagattgaggtggttggcgactctgagatcgccgcaaggcgtttaggtgctgcgatcgtgcttgtcaacttgtcacaaaaagttgccaacaactgcgccctacagctcgcagcagaatggcgtcgtcgagcgccgaaacgacatggtggtggtgacgacaaggagcatgctcaagttgaagggactgcccggatggttctagggagaggcggtaagcacagctgtgtatgtgctgaacaggtgttcgaccaagagcgtggacggcatgatccccttcgagacgtggcacaagaaagaagccggcagtacaccacctgcagatgttcggctgcatcatct

SEQ ID NO: 27900 - DNA, 597 bp, Oryza sativa
atcgagcccaacgacgtacttgaggacctccccacttggtgaagtcagagtgactccggcccctgcacctttaaggttgagggagccgccaaaatgcataacccagtgcccagcacgaatgtcggcgtttgggtcctctccatctccggagagggagggaacgttggacggaacagggtcctccactggggtccactcccccatgaagtgagacaggacctggcttttgatcgcctgccatggttcgaaatgcaagtcgtactcaacaagctcgatggaccactttacgaccccgccagtaccctctcggttgtgcaagatttggccgctagggtaggacgtcactacggaaacccgatgtgcttggaagtagaggcgcaatttccttgtggccattaagactgcgtaaagcatcttctgggcctatgggtattggggattcacattccggagtgcctcggttacaaagtagacgggccgttgcacctttcagaggggacggtccttgttgtcaggggcaagagaccccgtgtgcccttgctcatatgccccacggggggctcgggtcatgtcaagactatatgcctctggaccacc

SEQ ID NO: 27901 - DNA, 508 bp, Oryza sativa
actatgctgtgcaacatgctttgaccaaccaataaggagtgcttgttaacactttagacaaatatgattaagtttgtggttggtggtaccataactgtgcattaaaacacggggccagacttcataccaaatggagtgtttccacagtacaagaatatggtgatagggaaccaacagcataacgtctatgcaccatcggtgcagacgatggcagcagtttcaggtctagtaacaagtgcaccgtggttgggacaaaggcaagtggataattcttatgttttgaccagagagcaaccacaacatgttggacacaacatcaattgtgtgactcaagagcagattgccgcaatgtttgcgccaactcaaccgactgtttagacattacattgtgtaccaatgaggacccacgttatccatgcgattaaggagtggacggtgcaacacatatctacacgacagaaaacacctatttgtcagaaaatgcatctgttggagaccagtttgtgcc

SEQ ID NO: 27902 - DNA, 1176 bp, Oryza sativa
ccttacaatgcgaaagtctatggccaagtctttccccacaaaaatgggggggacacgagctcatgacctctggtcttcaagcttgccaatgatgaggcagagcaatggaacattgtgaaacacattgtttttgtgaaagtagcatgacttctaaggacaataccacacagtacagactcccctaatgctaagcaagcgatagcaaagaagatgactacgagacgtgatggaaatggacacgcatccttgcgataatccagtacccaatcgagagcacgcacgtaccgggtcgaccaatgatctgaagcttggggcagttgggattgggatgggcgctgggctaaggctccggaacctggaatccgaccgcgcgaaccgaattccctccgaggatgccagcttctggcacacagagagaaaccaaaccacccatcagcgaaccccaaaaacagatttcagaaccaccctccccgaaatgctcaattcgaagccgcagccacgcagattgccaaaacccgcggttaccttgtgcggaagctcgtcgagcgacatggcggcgcgatccggcggttggctcaccctcacctcgtcgtcgtcgcaccaaaaaggaaattccggcctcggctcgggttgggtttggggaggggaggggagggagagaggtgggtggtggactggtggttgggtggtgagaggcgacgccgacgcgaggcgacgctgttgaggaggaggagcaccacctccacctcctccccccgattcggttatttatcggcgaagcaggaggccaccgggagttgacaccaacggggggctgacaggtggggccagggggtgggtgggtcccggtcgcagtgaggctacgactgacgcgtgcgctgatgccgctttgggttggggtgtggggtgtgcgtggcgtgtgaaaccgagcgctttcgtggttactgctgccggcaagcagcaagctaaaccggtttgtttggttggttggttggtgggtctgttccctttccttttcccgttcccgttttcatcccatcatataccagaatatttctgtcacttggttagttattatttcaattttgaaattttataacttaatattatcttaaacaccagttgtttcagtagatatcttgtttgatttcatataagaaaaaaaagggtaatgtt

SEQ ID NO: 27903 - DNA, 5690 bp, Oryza sativa
ctataggtatttatagcaggagagagccgtacctcgagattcttatattttacactatttttcttaaaattatcctagaaaaacttgtagctctaatatctttttaaggactacaaaatcattaaaaccggtaaacatattttatagtactttgcggaatcctttggtttgcatttcagcagcgtggaatcgatagtcactcggcgtgccccttttgcgtttaggccatttccaacccaatgactaggatagtgtctatagcattaaataagctaccacctaggatgaaaaatgatgtggcaagtgaataaatgagaaaagagaaggaaacaatggtttctacacaatatccaaggcatcatgtgagataaatagcattaaatctaagtatggaatagtggtatttgcattggaagagtagtgtctagtactagtttcttgatgatgtggagtttatggaaactatgtctagtgtcatgggttgggaatggccttaggatcttgagacggtgaaacacatcctcctcgactatgtgtttgctcggcaggtctggttgcgtgtgctatcgcctccctggctgggctgctatctcttccccatggcagctggttccagaattggtggctgtccttcagggcctgcttagttgagcatctccatgctggctttgacttcctagtgctcttgatcgcttggcagttgtggaaggaacgaaacactagggttttcgactctgcgctctcttcaatctcagtggttctgaaaatccatccactcagagggtcatacgtggtctttaactagcattgccgcttttggagacttgttgggagtgtagcgtggctcgggcccttcctgctacttggagtttgtgtttagctgccgtagttttataagcttcagctttttattttactttttctctcttctcctggcataagccggtctagctaattgtgttgtgtaactataactcttttcttctaatatattgacgtgcgatttttttgcgcgttcgcggaaaaaaaatgttccaagatgagagacaacatttttacatagctgcgtagtaagtatatttcgttggcttatgttagatttgcatcggatctgaagctttagaattctcttgtctcgaccaatattccgtgtataaagatacccttgacgagtacagtgacttgcctttgtattttggggcactcaaagttgctttcattctgaactagcgttggattaggtagccaccaaacgtacaagtatacatctcagtcgttatctgaaaaattcatcagtgaagctgggagtattcgtcaaatgtcaaatgacatgaaccgctaaaagaagctacatttccactgatttgaacttgccccattgatagcgacaaccaagaaagaattcatgtctcaggatgcttatttctaaagacttgactgacaaattctatgtgtgttcttttttttgcaaaaaatatgtattgcattcatgatccattgatgcacatttctccatgaaatttaacaagattaccacccattatctccaaaaagaaaaaaaatcaccagtagcagtcaacagctgaaaatatcagaacaccattatatatatttatattgcaaagaggcaggcgtaatattgaaaagcaatagtatatggcagagtcttggtcgtcggctacgaaaggtcgccgcggacaaaatcttgtgcgattgcagtatagtgggggagtggttggcatggcaacaacatgcatgcgaatgcgcaggtatgagtgtatgaccgccccaagtcttggccactccagggacatgaaaaatgagcagttacaattcgcttggactcgctgaaaagtaacgagcttttgttaagctttgctcgaattcaggcgcatcagaacaaaagcgtttcagaccagagacacacgactgttcaaagttaaatttttttcttcagcgaatcgactgttcaaagttgagagtccaagccgtccttcaagcacagttccagttgatttctggaaacaagaaaggtagccattgttgtattccagtcttcaacaagggtagcccaggaaagtagtcgaaatgtgagataggggggtgtttagacctaggtatgtaaagttttagcgtgttacatcagttatttatataaggtgttgtatagtatgttcgggtactaattaaaaaaactaattacagaatccgtcagtaagccacgagatgaatttattaagcctaattaatccgtcattagcaatgtttattgtagcaccacattgtcaaatcgtggagcaattaggcttaaaagattcgttccgcaaattagtcgtaatctgtgtaattagttgttttaaacctatatttaatactttatacatgtgttcaaacgttcgattttataaagtaaaatttttatgtgggaagtaaacatggcatatagatgacgctgactgctgcattgtttccgttgcttacgatactctcaaccaccaggaagcgatggtgtgtttcttactactatacccacatgatgggtacgccgcgtgttaccagtcaggggcagatcgaggaggacgacggtgtcaacgcgaagaagggtgaggaggtttgggttgggcggcgcggtgagaaacggggtggaggtcgtgcaggcacggcttcggctttctgactttgggcggttggcagcagaaaagaagaaaacgccgcatttggtgtggtgttggtggtcagccgcgcgcgcgagacgcgtccgttgaagcgtccctccaaagaagaacgcagccgttgccgccagcaaagtcagccgatcgcgcgagcccaacacacatgtacgatcgcgctcgcgcacgggagaccggagactgcggaaaatgcgttgcgatcggagatgggaccgaatcgggcggatcgaatcgcggaggcgcgcgcgcacgcggcgcggcggctcgatctggccgggcgggggtaggtggttggtggttccgctccgatagacctgcgtacgtctcgcgtgcacgcgacaagtccccatgatcgtcaagcgcagcagattttgcggtcacgagtactagcatgcggcgtttctcttccaccggcaggcgcaaccaaacccaacccccaccggccggcacaacccaaccccagccacgtttttcacccgctagattattactacccccatctttttcacaactatatactatactatatactccctccgtatacattattttaatgtatgacgccgttgattttttaaccaacgtttgaccattcgtcttattcaatttttttatataaatataaaaatacttatgtcatacttaaagaacatttgatgataaattaagtcacaataaaataaatgataattacataaattttttaaataagacgaaaggtcaaacgtttatcaaaaagtcaacgacgtcatacattaaaatacggagggagtattacttacgcaacatagaagtgattgacaagagatgtactttacagtgcattagcaaggagtatgtgattttgaccctaagttaccatgttcaaatcccatcacacttacaatttttcttaaaaaatatttggagtaacgtctctttctctaaatctcatttttttaagtaactgacaaaaatatttagagtaagaatcatactaataaggtacatgcacgcacgctacgtggtggagaatcagattcggtgcagacttgtcagttgttatatgatcaacactagcctcgtcgacggtcgttatacatctgtcccaaatctaccaattcagcagtgaagcgctcaagaccggaagaggactggtcgtcgactggacgttggacgaggtaccatcgtcaggttagatggcggttggcttcgcctctcctcacctgttcttttccccaagtatttccggttcatcttggagctcatggaaaatactccctccgtattttattttaacgtatgacgccattgattttttgacaaacgacctttcgtcttatttaaaaaatttatgttattatcatttattttattgtgacttgatttatcatcaaatgttctttaagtatgacataagtatttttatatttgcataaaaaatttaaataagacaaatggtcaaatgttagttaaaaagtcaacggtatcatacattaaaatgcggagagagtaacatagaatcagtcaatggatggtagtagtagataggtccaaggactaacatgagctctcggaactgacaatgaccaataataacagatccattgtattgtcgttacgtgccacctgccaatggattagacatgggaaaaaaggcatcattagtattaggaatactagaattactgcatatcgatttccctaaccacgtagtgcttacaacacttcagtgagttggtgtgtgatcagcttagattgaatcatcctacttatttgtgagcaacttgctggtgcactagctatcttgtgttagtaactagtagtacgtagtacactaaacattcactggttcaaccaatacagagaaatgcctttgtttgactatattcatattcagagggtcgtaactgtttactggctggcatagcacgagctctaaccaataaccactctgaccgttcacaacggtcaagaacacaagtaatctgtgtcaactaaagtttaaagggaggagaccaaaacagagacatttttttttcttttagaaaaaccgagttggtccagaagggtgaggtggtaagctttttagtcagaacttacaccttacatttttacaactattatttttaactcagttttgtagaacaaatcttcaattcaaactgccgagctgatatgataaaatcgaaaatgaccctgcccaatgtggagcaaatcaaagagggaaacagcttgtttgtagtcagtgtataactacaaaagaaagtataataaattgcttgtgtaattttcatatgattaaatttttaaaaagcatataatcattagtcgttttgaccagcaagtgaatatcagcatccatgaacctacatgttcaaccaaatcaacaattcaacgcacaagtgaaccattaacaagacaaaaacataccttgagcctttgagcacctcacgtaagcattgttgcacttgtagacagaatgataagacagtgttgtagctgcaatcccacattctaaaggctactaaactcctcagcttcaaacatagattttaggaaagatgtgtagcgaattgatgaacttaaatagggctgccttttggtgaagaaagctttgggtgaggatgctacactagtatctagctccggccttaaggatgctatacgagtttctgatgctttaaaaaatggaaatagcaataagggactgttttcatcatcccatttaagattgtcccaccatgttttctcccccatgacactctttaatttgacaattgcatgcccaaaaggcagccttctcagcttcggacaagcaaacacatcaaagtattccaaagaaggaaggtctaggctaaagttacagaagttttccaagcttggcaacgaattcaattgcaaaattctcagtcgtcgaaatccctggattggcatttcatcttgtacttcagtattgattttattctttatatggacaagctgtttcattttattgcagaaagacacatccaattcggt

SEQ ID NO: 27904 - DNA, 10614 bp, Oryza sativa
atctccataacactgtggcttgtttgtgacagagaactcctttaattctgaacagtccgttatattaagaacaaggacactatctggtatagtgagcgcaagagatgtctcgccactcaatttatatagaccaagcaatctcatgtgacttccatgaatatcaaggagcttcttcaaggtactcactttcttgattgttattcccagagcttttagttctctagttaagcaagataactcttctattctaaactcatcataatccatgtgacttcttgaatgaaacccctcttcacagccagcatacctgctaccatataagtccaacacttgtagctttgataaatttggaataacaccatagggtatcttctccaagaaatccatgtagctcaaatttaggtacttcaactttgttaattggccaatcgccacaggcaatgatttaatgagtgtttggttcagtttgagacattggagttcaactaatgcgccgatttcttctggaagttctttgatgggaatccaagacaagtccaagtatgtaacagacgataagcatttaaaaagagaaggtgggatcacattcaaccaaaagttttgctgcagtgacagatattggagattgtaacagctgatagcatgaggaagttcactgatataattgcacatgagcgatatctttctggctgacctccatttctcaatatccctgctatcaattttatgaattccaacccctgcctgaacaatccaattcatgctttggtcaacacagccagaagatattgacagtgccatatctcggataatgtcatgtattctcacctccctatcttccaagtagccagcctccaataagcaagcatttttcaagtactcaatgatggagtggcccttgtcatatgcttcctctatagtatcatactctatcaaacccatccccatccaacagtctatcagtgcaactttccaaattgagtagccttcaggccacagagaacagcataagaaacaatatttgatctgtttatcctgcagataatcataacttaattttagcctagtgtatatgtgactagtatttcccatatttgggatctcatgaatgcgggacttcttcagatatgacagtgcaagtgcccattcatgacgagtcctctttgtggacattgcacgaccaagagttgcaagagcaaggggcaaacccccacattcttctgcaacttcctttgctaggctttcaatcctaacatctgaactaataacttcttctgttgctttttctttgaataatcgccaagctttttcttggtccaagcattccatgaagatcgtcttgtgagctcccatatgcccacaaacactctcagaacgtgttgccagaactactttctgcttatttaggccattaggatatggaatgccagcttcagctaaatcaaaataaccccataaatcatctatcagaagtaagaatttctttctccttaaaaaacttaacaaaaatgaagcccgtatattaatgctacaacctggtttcaggaacagcccgatcctttcagcaatatctgcttgaagctgacctattccactggctgtagatgccacgacataaacaacaaggtcgaatccataattttctttggttacacctaagaagtgattgttgatttttctgagcaaggtggtcttaccaactcctcccattccccatatccctaaaattccaacattgtcatctttgaggtactgcagaacttctttcaaattacactctgtttcttcagttgaaggtatggtgggcacttcttgcacgaaatatggtggtacctcaaatgatacctctttgaatgcacctttttcatgcaacatttcagcttccttcagtttcttcgcagcctgcatgccaatttcgtactttgaccaataactgaataattgctttctcttcctctgcacattttttatctcattcacctcagtttccatcgctgctaccttttgtagccattctgtaacttcaggattacatgtttcttgcttcccctcagagatactaagccggatttggatttcatttttcctaacttctaggtttttgatagtgttgtccagctttccaatattttcttccatctctattagatatctgaggcgtgcgaccaaaggattccataagtgggatgccaaagtactagatatggaatcaatcagcattggaacatacatgtgtaacaggaaaacgaggtgacaaatagggcaatgttttgaaccagctgttgcttcaattaacgagacaaaggatgtcgaaattgggagctgaactgcatatgagaaagtgcaatttataataagtgtgcgaatatgcatgtctttatgcctgtactttctaccatgtacacataatttgaacaggcatgtaaagcccaatacatgttgtactctttttttaatccctgtagtaaagcactaaaattatgtatcttatttctgatatatgtagttcaacctagacgacaaatcgaagttaaagatttatatgatgaatattttattgaagctataaaactattttaggatgaaatcctacaaaaacaggaagaagatcattatagtcatcatgtcatcagcatccttaataagttgatgtcatctatttccataacttactagtaattccagttaaacctaaataggagaagccaagcactgctatgcgccaacaacaccagattgaatgacctccttcggtcattccggcaaaaaaaaacctaaataggaacagatagagctaaaagatcatattgatattgactagggaacctaaaacttcatcagcaattgatagggcacatgaaaggcgtctcaacgcacattatacacctatcttgaatgcatgggtgatgagatgtcaagtggacgttgtgaagcaaaatcaagagaagaacagatggcacgacaatttgtcagatcaattatgcatcgtcctaataaaaatattcagaatcaaattggtcacccaaagaggaaacgaaagggatatcagtacttacagtcacggatagaaggtctcgacacgacgagaggatgctgaattaggccactagaggagatctcagcacaatgtggccatcagcttagctcgagctgcaagagaagtttcaggaaacagggaaagagaggcagaccgtagacactgtacaggaaggaaaccacaaaatggttgcgtgatttagttgtgattcggagggggggaacttcactgggaattgcagacacggcgacatttccagcaggatcttcagtcgaaattcccagcgttgacttggcggaaaactgccccctgctagtctgctacctgcttgcgctgacctagtttgcgtcgacgagctgcaacgaccaccccgatttcgccaacggcgacttcgcgaggcttcagaacggccatcagatctcatcaggcaaaggctaggtggcaaaatgggccgggccttcccgtgccggcccagtcaagcccgtttggacatgggccatgctgacacgacccaaggaacgaatgaatcgaggaagccactagctcaggccggagaaaccggtggtggtggtggccgcggcgctcgccgacttaggcctacaaggcagcacggtggtgcggccagccccatccacgggcatagtagtcgagcacgtcagagactctccgtctaagggcagggaaagggtgacggtggccgaaccatcgccaatgccctatctatggtccacggcgcaccagtccaccaccatcgtgaacaatacatatatttatattatattcagttttattgtgtcacatcagatattatataggctgtttagatattaataaaaaaactaattacaaaattagtcattaacccgcgagacgaatttattaagcctaattaatccatcacctttgcatttgctgtatataacgataaagcaatataatactccctttgtttcataagttaataatttgcaggattcaatttttgcgcgtgtaaggaacatgcacgtgaaaaaggaagtaaaaaatttaagaaaaaagaaagaaaatatctcacgttaagaccttttgtttaatcgataagagataaggaatggaggagattgagagaacaacaccacattataatatggatgagtctacggtggaaaaaaaataaaccgaattcccttaataggggttttcaaaatatatgcggttttttttctgcaacattagatatatatatagtgaaacattgtgagtacattatgtgaaacattttttgtggaaaaaaaaccaaattccttaatatatggtttctaaaatatgtgggtgatttgttgcaatgaagttgtgtgtggataagtggcagatggggacatgggatatgtggtggggcccaggtgcacatgtgatggggggagggggagcgaccgatttttttcccctcctatcgtgcgtccgtcgttgagtattctcgttataacatatgtggaataaatactttttaaatcccagcaagtataataacatattataagtagctataagcacatatggaggagataaaagatgagagagaagatccgtcccaaaaaaactcaactcttggagtttgaattttatcaaaaaaaaccaacttctaccatcctacctaccctcagcacgtaaaatgaaaaattttattcctttggtaccctttacctacctatcaccattactattttttttaataatgagggatattttagccattttcacttttcgctaattttatattgggatgctagggttggattttatatgggacaaagggagtacatatttgtaaccagtaagctgtcacacggactataatatgttgtgtgtatatacacatatatatatatatatatattattaatgacgtagtatgtctgtataaattggttattaaattaattatagataatttgaaactggtagtcgactgtgctattaatcttgttcttatcccctcgtaggggattaaacgaaccaggctttaagggaaaaaagaaaaatagaaaacccttttggtcgtgaactgtgtcgtctagcctcccactaatcccggtgccttcttgatcccaccgatccccgtgctttcttctcttcggcatcgccacgaagcggagggtgccatcgcagcagccatcgccgacgagcggctcacggtcactgcggcctcggcaacgtccggcgatcgtcgtcgatccttaccttactccctcacgccccctaggtatgaagccgccgtactccaacccaacttctatcgcctttgaaaccctaggcaggtaggcggttgctttgccttcggtgcggttgttgtgctgactctctcctcgccctcgccctcgccctcgccctcaccctcgtcgccggcgattcctccgccgtactccaaccctagctgtcgcctttgaaaccctaagtaggcacctaattaagtgctaactctttctgaatgtaatatcacaaatctttcccaactaattcagtagcattcggttaagcccaacaccatacagttgttggtactgaaacttttttcccccttttccgttatcttcagaagtaacaatcagtcagttacttcagtaacctgacacttgtgttctgattgcctgatccaagttgtgatcttagttatctgcttcttagcttgtgaatacgagtaagtagtagtaaaattggtgtgttttggtagattttgcttgtaattcctagcggttggtaacttggtatattcataattcggctaaggtttgataaaagctgcagtgctgcacatcagcctttttttccctgtgcacatttgcttttcttgtgtttatgctacttgcttgatttattgctattgttcctttgctcctggaggtggccaggggtagcctgcctgcctgcctcattcatgttttctatcatttagtggctattcgctttgaagaaattaatgatttatgcagctgttcctttaaataattattggttaatcccttgaatttatagctgtctcctcgagaagaatcctgcttaagttgatttacctccgggtgtttacggtctttcaaattgctaagcataatcttgaactttccaagaaaaaaaacaggcctgcattaactagtgccagggcagcaataatggatttgtgcgacgacactcatttcccatgggaggtaatttttttaaaaccagaatcagccaagcgccaaatttatgataattattcttcgcatatgtataattttgttccttgcaggggtcccatactattgttggcagcaagcggaaagctaaggatttaatggcaaaaatctgaacttgtttaatggaacttataagatggtggaaaccacagttgatgttatgataagaaaaggaacaaacatgagactcgaaagctacgagtttttgagtgatttcaagcatggcaacgctgtggtactcctggactacacagagtccggaaacaaggggagtttcatcgtcacacaagttgatgggtcattcactgcctggtttgaaacaggtggaaaagagctctgctttgactcatctggtcatattactcagttatttaaagacatgattgtgtgagtatctttattgttgtccatatttttaactttcttcttgttatgttctctgaaatcatttttatttgtgtgaagcgatttttacgatctgacctggagtttgcacaagaggcacttagtcatgcagaattttgtaaaggaaaatatatacgtcaaaatctttgatggcgtacccaaacttatgattctactaactgaaggtatatatttgttgctagtaacttaatggaagttcacagttttttttttatatataaacaatggcaatataacttgtacactggattgaaaatgcgatttaaattttgtacagttaaattggttgatcagctagggccattcaaacaggactggagtcatgtccaaggcctcatgacttggtgtaaagaacaatctggtttaaaaatggactttcttaccaagagtttctatgatttcatcggatctaccgactgcacagtaatcaagctgagaaactaccctgatgattgggatgaaaaaaagaaaggtgattatttgctcacactcgcagaagtaaaccacggagttcttaaagataagttgaagagtagggatgattttcattggccgtttgtgaagctgcctaagctggagcagaacttaccaccaatgttacagcaaattcttagtggggagagacagatgaaaagaaagttcgacgtgacattcttttgtgattatatcaacctcttgagaaactcctacaagaaattcaatgaattaccagaaaatgttaaggtaattgcttaagatgtttccagattgaataataccttcttttactgcaggatttgttgtattcaaacatcttatgttttgacaggctttatgcataaaccaggatggcttcattaaactgatagatgggtggtctcctgagttttggaccaagatctacgagaaaattggtaaaaacagtctgtgcctttggttttaggccttcgtttgactgtgctctttttggaataggggatttatgacggtgttctctttttgcagggtggccagattataatatctggaagtggccttgtaaaaaatagctttagtgctttgcatttgaccagtgagtactgcattaatacttaatgtatgattcctgtacgctttcagttcaagatataaccttagttatcattgttctatgtttgagtaccttattagattgctgcatttatatagcttgtttgggatatggatttccatccctcaaggggatgtcccctcgttgattgtatgtcatctaaatagttataaaaaaatttaaaaaaattgacaacatagattaatatgaaatatatcatgagaactgtggtgctcaattgttaagaggtaatgatctccttgtgagggctaattttgtgccggtttggtcgttgctgtgtagtggtaggaggttgtgggtggcaagctgttatgaaactcagatgttttttttcttccttttcagtcttttgtatcagactctgtaattcctgcttcaggtccttgatctaaaaaaaaagttcaatgggctttggaaaaatctaatactttctccgtttcacaatgtaagtcattctagcattttctatattcatattgatgttaatgaatctagatagatatatatgtctaggttcattaacatcaaaatgaatgtgggaaatgttagaatgacttacattgtgaaacggagtgagtaactgctactcaaattctatgcacaaagatttgtactgtccagatgaaaaaaagggaacttggtgtgttttgtgctctaatcctgaaaaaatgttcagcacattctctatgaatgtcctgttgcaaaattcacctggtgtgtttcccgtgatgcttgtggctggagttttctcccctctgcttttgaatcttgtaatttctggagtagttgggctagccggctccaaaaggaacagaatcaaaatcctttgctttgctgctgtttgtttatcaactttggctgatgggcaacgatatgttttttcaaacaaaaactgttatctactcccccctgactttgattttccgtgtcatttcctccttgtttaggaacactgcttgatctcaatgatggcgatgccggtgcccgcgctgacattctcaggacatatggtgctgttctgcaggtccgatccttagatggctcctgttaggagtttttggttcttagaattatgttagatgctatctcgaaactctcaagtaattttttgtcctcctgcatgaagcaaaacttagtgtattggttgaaaatctggcatgattgaatggagaactatcgagattcattactgtgagtccatgcacttttagaccttttagataatgatgcacttctagaccttgtttggatgggcctcaattccggccagcgcaagtggatgtgtatgaattcaggctcgtcaaatgatacgtggcctgaatcaatataaacacatgctgagttgtgttggtggatgccgagtacaacaaattaagtgagcgtgcataattattattcttagtcggtgttgctgaccatgtatttgtgttgtttaagtttttcgactttgttgtgtttgttgcgtgtgtaacgtcgaatgcaccaaggtctagtttgcgttgggccatcgacatactggcatgtttttgcgccctttgaactcatccaccaagatggctagggaatcgaaggtcatctacactgccttcccttgcattgaaggcttgaaccaccactccgtgtgaaggtgccgtcgatgaaataggatttggttcagggtggtgaaggtgccgtcgatgaaataggattcggttcaggtgcagtcagtcacactaggaccatccaagttgtatctaaggactgagattctcggagcaccgttcacataaaaaaaaatattgtacaactattgtagcaatggtactgtagcacttgatctacatccttgatctgaaaaataaatggagcatgggcgccacttaggggtgtttagatccaggatagtaaagttttggtgtcatatcagctattatataggatgtcgcataaggtatttgggagctaatctatctatctatccgccagctgattagtggagatgacggcttgtatttttctgacacgtggcacgaaccaacatcgtatagatgattctctccagcgcggctgctgtttttctcgatacatcgcatacgtacgcgttcatctgggcctaaagcacctcctgcataagaagcccattagctagccaccctgcgctatggaaaggaataagatcactttgactccctcaactgaccaccgaatctaaatcatatccctcaaccgtaatactgaaattttgactctcgaactgtcactcccttggtggttttttagggtggtttcgctgacgtggcgtacacgtggcagtgttgacttggtcttcatcccacgtgacattgacgtgacgcttatatgccattaaaatttaaaaaatatatatggagctcatttgtcattaaaaaaaaaattgtgggtcccacagacatgtgggtactacatgtcatcttctctctctacccttcttcctcctctctcccttatctctctctccccttgacatgagccagcagctggcaggggctcaagtggaggcggcagcaggagggtgcgcggtggacctcgggcgacgggcgcgggagcagctcctccttgcggatgcagagcgggcgctcaaggtgcgcaagagcctgcaccatgactgccaccagcgagctcctagcatggcatggggcgacgtcctccgtcgacctccacctgaagcttcccgacgaagacctccttgcgcgcccgcgtgttgaaggtgagcggtttggcctgaatcggccggggtgagcgactgagcgcccgacgacgccgccgccgttggtggctgcttcatggagtgttccctgctcagcctgaatccgttccggttcaagccgatt

SEQ ID NO: 27905 - DNA, 5167 bp, Oryza sativa
ccacgtcaatgccacgtgggacgaaaaccaagtcaacactgccacatgtgcgccacgtcagcgaaaccgtcctccaaaaccaccaaggaagtcaaattgtaccggttttgatagttgaggggtcaagatttctggtattgctgttgagggatacgatttagattcggtggtcagttgagggagtcaaagtgatcttattccctatggaaaatcaggggaaggagcaaatgcctatgtcagcccacttgctctacatgtacacgttcaatagtcattagtatcggaaactctagggcttgtttggtttgataccaatttattaccctaccaaaattttgataatttcaatagtagcaagtgtatgtttggtttgctaccaaattttactcacaatagttcaaattgaatactacacaatttggtagtgccaaaatttgccaatgttttggcattaccaagattttggtagggcaaaaattggctccaaaccaaactagcccctaatgcacgatggatcgctaccgcgatcgggtagcgatcgcccaccctcccccctccctccctccacgtttccttttttggcaccgcattactttcctattttagtaaatttatacacctaaagtttatagacccaaagtttataaatcaaaagtttatatacccgattcaaatttgaatttgaaatatattcgattcaaatttgaatttgaattcaaatattttttatatatagtatttagtttcatctaaagtttatacacctaaagtttatagtcccaaagtttataagtcaaaagtttacatactcaattcaaatttgaatttgaatttgaattatatccgattcaaatttgaatttgaatttaaatatttttatatatagtatttctatacatctaaagtttatacacctaaagtttatagacccaaagtttataagtcaaaagtttacatacccgattcaaatttgaatttgaattcaaatattagtttatagacccaaagtttataagtcaaaaatttacataaccgtttcaaatatgaatttaaatttaaatatttatgatgtagtaggaagagaaaaaggaaagaaggaaggggggagaggagggagcgaccatacaagggaggagcgatcacccgcgcattaggcgtaccccattagtattctatagtacatttacaaaaaaaaatgttgaatgcatatacaactactcatattcatacatatctctatgagtattttttaaaatattaaactgcatatcttaaaataaaaaaaaatattttatttcttcaactaattcaatggacaccattaaaaaaaatctaatttttgactcggttcactttacttcgtaatagcatttctcattttttgttactctttatataagttgtattttaaactgaaccatacatgggattattatcaaagtttgttacggatgtttgcttgaactttaaattttgatgtttaaattagtcttaagtgctttcaacctacataaacaatgagaaaaaaaagaaatgttgaaatgtatgttgtaaatgcatgcaaaaatatgacttatatagagatttttttttaaaaaagggagagaaataacattaaaggagtaaaatgaaccgttttcaataattcgggatgtaaaatgagaaaaaaagtttagaaggtgaagtgctttggtgaaatagtataggggtaaaatagattttctcttaaaattaatgaaatcaccatatataactcattgtcaacatatatatcacctaccactaattagctgtcaatacaaattcctatactaagtatatgacttaaacccaacaaaacattatgactcctaacaaaacaaaattctagaacactttaattttttaaaaaagaaataccaacaccctattttattattagcaaacaatttaattataattttagacaaacaaaagaagaattaataatagcaatttaattataattttagacaaacaaaagaagaattaatagtacggacggaaaaaagagagaaagtttgacggatttctctacaatatgatcgattatgttaaactggaacacaaaaaattctattcaattatgatttttgcatgagtttcaaggaaaactaaattgatttctatattttttttatgaaaaatgcgctgattaataacacaaaaatattatatacaggtaataaatcgagcgcgccctaattttctagtctaatcttctaaagctggcaggcgttcctgcaagctgattggtcgattcgtcccccttactttggttgacacgtgtcctcgagcccgtcacgagttcgcgcgacgccctcctcgatgcttcatttttccgtgcgtacacactcgtgcaatcgtgcgcctcaggctccccgttgggccgtgcaactagcgtgggcctgatctgcctcgagatactacatgggagccaggtgctgtggcgtaagcaataataaaagcatataaaaagatttatactggaccatgttctaaaaagtacaaaacaatattctatagtgcagtcgtgtaatatatatttttatatggaaattgaactattttcaaggaaattttcaacatgatcatagataaaattagtttatggacgatgaccatctatcatacgcaacgctaagatcaggaaatagtgcaacggtatactagatcattaaatagagtgatggtatgttcaaaattatttggtggtgagcaaggcaacgtagttcagatggacagagccatctacatatatatatagagagagaatttcactaagacagacgaggaagcagacttgaaaaaagaaagaaaaaacaaaacaaaaataagatttaaaaatcattcatcggtattagacaactagcatcgacccagtattttctccccgtcaatcctccatgatccaaacaaatcacttttcgcccatgaaccgtttgtgccaatggattggtttgatcaaaaacttcaccaacattataaatttaaaacccattaaacaataagcacgggttataaaatgaatatactcgaaggtgagtgagagaccgtttccagcgaggtagatgaagtaggagacaaatcgaagtaacgcgagcagactattaatgcgaggaagatggtttctcatgaaattttgttccatgtgcgagtctcgaggagccgggaagcatgggaggcgcgcgggaggtggggagccggcgggtcggtcgccattctggcagcgccggcagatgagaacgctggggagtcaggagcgataacgacgcagtataatcggaatgggcctaggcagtggcttgggcttacccatgtatattgggctgtggttaacggtagggaagagagggactgcaatctgaaccattgctatttcgctgtggtaatttaaggtgacgtggctgcacgacaatacaggaaatttctattagtggggatgaattatataggtatataggataagagaagattcgaacgacggaaaaaaaacaaagagaaaaatgctgtgacttcagataaaatggttactgatcacgtgtatccaatatttcatcccaaggaacaagtacttgttcccttgttcccttgtatcaattctgattgaaaactagtttcacgcttatgcatccaacagaccaaagctacaaggtacttcgtgttggggaatacgcaagctttagctccatcagtacatcagaatttttcccttgaaaaaagtggagtacatcagaatctcaacactggaaatacctccggtagagataagagatcatatggagcatatcccgcagagacaatcctgctgccaaaaggccggccatggagtgaatgagcagccatgaatgaagcctccttgcacaagaactctacaagtatacagccagcttcgagtgcagtgttgttagaagccaaagcgttgtctctagcatctactgcaggtgccttggtgttgtcactgccagcaggatactctacgacatttatggatttcacagctccatacctgcaaaatcttgtccataatgtaagctgaaaccatcatgataagtaatacagcaagaatgcaagagaattatttctataccttgcacacttcacacgtacatcttccaatactgcatctacctcatattttgaaagcagcgagtattcctcctggtcaaactacatttattgcaagtttgtaaacaactcacatctttataaatgtaagaagtgtgaaaaaaattggttgttctgtttaccgactaaatgattttgatacgaagagagatatctattgggagagacttatgaacagagttaacactatgacataccacattttttagctgcaggacttgtgttggtactgcaagaagaggtttgggattggcaggaattccatgaaatgggcaagcttcattgccagcctgaacagagtggggtttaactcaataaaatgtataaggcagtaaatgaatgaatccaaaatgtcttaaagtttgaacctgcccaggatgatcagttaacacgccaacagcagttattacgcatccaccaagcttcatgccgttaaggccagcacatgcctttgatgtaatggagtgatcaatgtactgtgcatatcaaattgatcagaaattagtttgttggaggtatatccatatgctctagtttaggagtaagcagggctttccagacctcaagaaatgcgcatgctccaccaaggtcttcattaaaaagaaagcggtaagcagccaattgaccaaatgaactaactatatccctgagctgaaagaggaaaatgcagtaacttgtcagggataagagctttaataacaacatgcagagcgaagattactaggttatgcaaatatactggtggatgctgttatattaccatcttagatgaaatcactctaggaattccagcgatgaaaatctgcagagttaaaaagtgagatatccaatgaaagctactaaaattcttaaacaatcaaacccatatgtattccattagttcaaagacaaattttgctacatgacacttaaaatttgtgcaagttgttggtaggcatcgcaaacacatgtcgtagctgaaagacgctatagattattattggtaactagctagaggacactttcagcttaattggagaga

SEQ ID NO: 27906 - DNA, 2023 bp, Oryza sativa
cccatggccccatgtacattgccagcatatatacatcatattccatctttcactgcattcctaggttagaagcttttgtccctaggggtattctcgtctttttgaagaatttctctctccaattgagccaaaagtgtcctctagcaaattaccagctttttagagtgtctttcaaccgtgacacattttttgcgatgtctactaccaaattacacaagatttgagttcaaaataacagtaggcatatgatatgcatgtatcaaatatttaagccagaaaagcaagcatttctatctgtaaatattcttttaccaactctctctagaaatatagctatctttcatagagatgagaataaaacaactcagactgtggcaacttaccttgtgtggtgaatctctaacgacatcagatattaatttaatctcttcaactggcttcttagaatcagcatgctgcatgaaacaatatatataacacaagataaaataaaataagaaagattttacatgctatgatctgctgcaaagctgcaaaattcatgcaacagcaaaaataaaaaatgcaaaaggaattaagtatgctgaaaatatcagagtgatgttgaaaatcggacttaacccttaataatatttcttaccgacatgtctgaacttccaagaagatgccagatatcactgcatatggtaggatggttttgccgaacaatgtcgtcaacatttagctgcaaatatttatgttagaacttagtacagacaacctccatccatcccaaaacatagtgaactagtattcaattagacaccactacagattcatagtactaggtggtatctaatcgagtactaggtagcaatattttgggacggagggagtatttggctttcaacacatgcaaaatacatgtcaaaaaacattacctttattttattccagtgagcataagcaccacagacacagcgtacataatcttttaagcttctgaagtcatatgctggaattccttcatctttacgataggtttccatttcaaacaggagacctttaaagtcttgagttgttccttcattccaaggaagcttacggatttttgaagctctcactcttgacataaaagtgtcatcattcaacctaagtgatatatcctttgcaaagaagtttaccctcgtcatcaaatcccaaaaaagaggatgcccaagaacaatttctttaattgccggcaatgcagtcctgaaaattttgggaaaatgatgctctgcattagagcataaaatccaaatgctcaagtgatccgctacactatgttcaacggtataatgctacaatatcaaagtactgctacagtatagaacaattcaaaatccaaaggctcaagtgatctactacactatcaaagaagtactctgctacattataaaacaattcaaaacccaaaggctcaactgatctgctacagctacagtatcaaagtactagtgctacagtacaaaactgatctcagctaaagatgttgcattgtttttaacttacttatccagggttttcaatagagcagtcaaagattcaacatgtccgcagaaatatctatcacattgagcaagctttgagcttatttcagcagctctttctaaaatttcttcaagcattttaataaggcacaaccaatcggcccactgggcttcctccaagctcattgtctctgtaattcaaggagtaaatgtcacaaaatttaagaatgctacacagtgataaatagtacaaaacatgtaaaagtgagatcagtgatcagattgcaattacactatatatgttttaccttgttttctgaagttagcaagcttaacggtagacggttgaagatacaaaatcgaatcccaattgagattaccatgatacagtttgttcttcctcaagaagtcaagcccctcaatgacttgcctgagaaaagattcagcccaaaataaataactaaacaaataagatacatgcccagcagttatcattgcagacttgcggttataat

SEQ ID NO: 27907 - DNA, 2594 bp, Oryza sativa
tttaagaatggtacacagtgataaatagtccaaaacatgtaaaagtgagatcagtgatcagattgcaattccactatatatgttttaccttgttttctgaagttagcaagcttaacggtggacggttgaagatacaaaatcgaatcccaattgagattaccatgatacagtttgttcttcctcaagaagtcaagcccctcaatgacttgcctgagaaaagattcagcacaaaataaataactaaacaaataagatacatgcacagcagttatcattgcagacttgcggttataattggattattgctaccttaataaggactggagtaatggtgaaggaatgtggtttattctgtcaccccagcaatcatgtttaaaacaaagtgatgataacagtccagtgtaaggctctacaaatgctgctaaggatgaggggccattgctctcaaccttgtccctggatagggctttcattgagagaatgtttcggtgatttagcgtaagcattatgcaatgcacatgatcattatctgccatctccctcttcagacagacaaggggataactgttaacgcttctgcatatcttctttgaggacgaaggtttgataacccttaaggaatacttctttttaccagggactctctcctgaagcactttaaagggaatctccacttgatctagagcaaaaagaaaatgagaatggcatatgttttagtaaaatgttaaccatcaagactgaaatgaattactagaagcaagttggaaacatagtgaagctacagcaagcctgcaacacctcactatttcactttcagatcctacttgccctacttgccagatatccatataatactgttaaacaatcggcacaacttaaatacattttagcttgctatggcttcgaagaagatgagatactatactacttagaaaaccactgaggagatgaagacctttatatgagagaatagattaattcatacatcttgcttgccccacataaactgctgaatgctcctcatatttctatatggccagcccctaagaaccaaataactcaaagatctcaaacctaacagcaaaatcattaatcgatctcgatcttccaactatataactaggctataggtatcaatatcatgtgtagtgtgcttttgatcagcaccatgggcccatacagaagttgccatgtgctgccggccagccattgtacagccatatgctcatgagccatgaaactagtattgatattgagaatatagagaactgttgaatggaaatttacatacctgggtccattttgatgaatatagcctttgcagctgccttgtttgttatcagaatatcaaggagcttactgccaacaatgtacaataaacaaattttagtatgcaagaagttgtgtttgctgacatatatacaatgggtaaataatagcacatcttaacaaaaggagataaatgatacttttttctttcctctcttgcattgtcacaataattcgacaagccaagaatcccgtccttgttacataacagctacaaaccagtaataatgtcttgcatcttatagcgcaaaagggttcaattgacaagttgtttcatattcaaacaagctatcctatgaattgttgcaattatgcagtatcatctggagtatctattaacaagttgttgtatgttttacctaatgttccattcttcctgttaactacaggtttccagggtacttcaagcgtaccacctatcagcaaaagagtcaacctgtgcagcacgtgtaatgtctctagactctcggattgaagaagcacttggatcatgcttgcaacaatcattgcagcttatacctgcaaggctgcaaaccgtgctgtcgatatggagatatggctccagtgatgcggtgacttctagccaggaactgagttgagaaggtgaatgtttctctaattctctccctgggatttgaccatcatttgggctctgattagtttatggatcgtgtggagactgaccaaccaagtaaagttactcctactattaaattcccagaagctactactctttacagagcagtgaaccataaatctagtgctgcaaaagaggctgccacgagcgcatagcccaagacagcacggcatggttgagcccacaggaccagaattctggaagtcacagaaaaaggaatacccaatacatccaggaaagaacgagcaaacaagaggaaatggaggcttgagaagaagacgacaatgcaaagtgaaactttgagcagaagccaacacacattctgtgagattaccagcatgtaatatacacctctaaatatcttactagtagtacaaactaatcaattaataccacttcataacagatgaagaacgcgtggggccgggggggggggggggttgaatatttgtcactattagaagtggcaactctctaaatgccacttttaggtttgtccttgtaatttttgccactggtgagatattatgcactaatattttgccactgtggagtgccacctaggatggccagcatggacaaggcagttgaccaatccgcccctccatttctctggtgatgaagacag

SEQ ID NO: 27908 - DNA, 902 bp, Oryza sativa
gctgagatgcccgatgtcagcgtcaaagaatcttggcacttcactttgtttctttggtggctgctgacattgcctatttcagcgccaactgatatggtgctgatgtttgttgtttcagcgccatttgtgttggcgctgaggatgcaaacactttgagccagcacagcaaactgctctctgcccaggaaaaatacatttaacaccgcatagcaacctatttcagcagcacaggaacacaacttttagaaaccatccatccattccagccattccatccatccagtctggggagccgttccaagcgccactcccgcgtcgttgacggtccgcaagagctcttgtgcctgtaaggttagaaagtgcaaaaagtcacaaaaattaaagcgagagcgtgcaaataacataacatggcaagtactcaccactctatcgcgaagaggtcctgtctcaaccgtggtaccttcacgggttcgagtgtcgtactcgttctgctcctccacatcttcagggtcgtccgctatgtcggctagcgtccaggccgggcgtaggacaagacgatagttcctatggagccacgccaagtatgcatcgaacttcgtcctgttgtgctgaccttggtccggtactccgttctcatcgaatttctcccattgcgtgatatgatcttgatggtagtaagtccaatcagtcaccttcttgttcttccgacgatcgaccctgcacatatgcaaaatagacaagtcaacaatttgaggatggcatcaaatcgatttggtctgttaactcaaagtacttacttgtggaggtcgatactagtggagaaacggtgcgggattgtttgaagcctcccgaactgccgcattatgcggttgcatagctggaactccactgcatagaagcaa

SEQ ID NO: 27909 - DNA, 10087 bp, Oryza sativa
atgaatatatgttaagtattataaagatgatggatacatatgcatacatacatacatgtatatgttaaaaatactatgaaaataatgtgaaggaagatgattggatgttgatttggagaattcaataaattatagatgatgttgcatgcttgcataagttttatatgtaattattgttagtggatgatgaagtggtatgtttgtatgttgaactttaggattagcgggttataactttatactaagatagaatatggagttataaaatttagaaaatgaattagaaatcaaacactagctatctaccagcagctacttaaaatcttattaagcttttcaaacagaccaagtatttttcttttttggcttcgtttctgaaccggagtctgggaatttttactagtaagatcatggtttaccacaatttatcttttttttttctgggaaggtcaaaaggaaatttaatgattgtattctgagctttcattttttttagcttacgtttttgagccgttaaccatacaaatataaaggtcatgtcccaaaaaaaatatttattgttttccctaaaaagagtatttcgtttggtttttctgtggcttatcaactgaagccacaatttagacatatgtatgcgcaacatatcatttagccatgcgcatacatgacaatgtatagagaattaatttgtgtctatgatgttgttcgaccgagctgaaatgtgtgagaatgtagggaaccttaagcataaaaaaaaagagagtagagaacctcgtacctgcgactttattcaatttttttcacggtctagcgtttggagccggaaattattctagcagttgcattagcaaaaacacttatcaaaatattactaacaggcagcgaagcaacacaaatacatcttagctagcaaagtagttgcattagcaaatttatttaccaaaataccgaacttatgtttaccaaacaaacaacatatgtttaccaaactttaaataacaccaaatctcctgtttaaaatttgcattagcaaaccatccgaacagatccgaaatgcacgttgacgaatgcgcgaaagcattaattgttcagaaacagcccctgaaggctgaagcttagtacggtgtgttgcgtccagttggaacttggaaccacctctttccaatcttgtccccgttcgtccggttatccggtgtagtgcgccagaagaagggaggaagggagagggagaattcgggggaccacattccaagttccaacggaggccggagaggatggtccatgtctgatgtctccatgatatccgtccgtccaacggagggacggccggatgggttcgccgtgtaacagagccgtacccgtccgtacacggtacatctactccaggccagtcgtgctgtaatagtagtatatactacctccgttcaattttagatgaatgtcctaggatacgttacgtccgtctaaaatctcttatattttagaacggagggagtaaataactagaaaaatatgcttgtgttatagtgaaaaaaaaattaaaattattgagcaatattaaaatctacttgtttagtgctaagcccttcgttcccttttctgtggggctcaaacagaagagaactcatttgaactacacatatatgaaccaccaatattactccaatgagaaaactcctgtgtaccccccgaaaattcacctaatcccttatatgcccttaagatttactcattctctttcatgcccctaaatttcagtttggatcctttctataccctttccgttagttgaccgttaaattcttatcataaagtccatttttccgcttgaaattgtgcatgaagggccgaagggtgaggtgggtggttcgacctcgaaggttggttcagcacgactgtcggccggaccagcgccatggttgcttgaggggctggacgcgtgaatatggtcagggtcggctgaaccaaatgaggtgaaacctaattgacttgggctgccgtggtcgaagcttgaatcacttgcgtcactgttgagggtcccgaagatggattgggcctcgccgaagccgaaggtgctgtcttggcttgcagggccgcctcataggcttgatgttgctcttgcatccggtgaagtgtgtcgtgcagccttatcatgttctggcgcatggcttccatctcggccctttgcgccgccggagcctcactctcggcaaccgcctgagttgtgcttgggatgatggaggccatcgcctgagtcgaagcttgagtatcaggacttggatggtcgaaggtgctgcttgagtccgagctagtttggccactgcttgctcctcgccaccttcaccttcttgtagctccgctcctgcttcggctcgtgcgggctcttcgcccgccatctccgcttcgccttcgctctccttcctcttaggtgcaactctctctctctctctctttgtgtgtgtgtgtgttttcttcggtgcatcagtggctccgccctgggttccctacggtcggcgctagctattgtcgaagcgacaatagcttcacattgaaggacgtgatttactcagtggagtgattgaacagtaaaacaatgtattaacttatgaaaatttgttgggatcccccattacatgcttctagtgggctatttataggctcagtacaaactcatgctctgtagggtttaatatgtttagagaaatttacatggatacctttataatatatataaactcatgcagtgtctattctaatgatgggcccctagatgggtcattggcctggcccataagaggggaatggtcttcatgggccatgctgcttggtgggctccctggtgaagcctgtcttccatggggcgaacccttcatgccttgcccagaggagagactaggtggtgagccttctcagcttggtagcgaaccctcttggcttcgtcttctggcttcacctcaaaacttcgcacgaggcaaatcttcttctgaacttggttggcgtcttgctgatttgatgatttcggtaggttcagctgaaaaccctcgtgacatgcctccggcacccatcttcctcgtgcaccacaatggtcaacgacctcctggatgctatgctgtctgtggcctctgtgttatgtcgggcacagtttcactgtcgcctgctgctgcagactagcagtgatcgatggaactactccactttttccttcgagctcaggcgttcggggccggggcaccctccgatggcatccagcatccctcaccaccacccgcgtcctccctcagccgcagccgtagccgcgctccggcggtctcgaccaccgccctggcgtcgtccttccgcgaggcaaaagacgagcttgatcaggaaacgaaaggcgtcgtcaggtggctgccaccaccatctgacccatcaggcccagtaacagtcggggcgcggtggcacagcagtggcaggcaagggaggcgatgctgtgctgcttgccggagctcctatcgcaagttcgtgttgccttgcagcaacttggtggccctcagtcttaaggtagagaagatcagagcaattataactaattaagttgcgtttttgctagtgatctgacgcgtgatttttttctcaggtatttcacgttttttttttgccgcacactatgtgcgccaagatttgtgcaagaattggtggccaaggctacatgcgttgtgcgttgtatgtttaggcccggttttttctaaataaaatttgttttctttaacggttgaaaaattaagatatttggaactaaaataaaaaaatataaaattatagtcctatataactaaaattatatttgtattagtgattttgttgagcaggatttgatggtccctttttttagagggaagttttatgcagtatgaaaggttccaatttcactcaaccattcatgatgtcaattaaccgcaaaactgtagtgcagagcacatcagaataatactgttttatcttcacccattgcaacgcatgaacattttgctaataacgatatttgttgcataataacgatataatagccaaacatttcgtaagtttgaatagaaaagaccttggagttcaagcctaattttcaaactaatgaaactttcatagggagacgagagaatacgacgctgttagagcaagtttaatagtatctcctgaagatgaagataaagattaagtgtttcacacaaaacgaggtggtaataacgtgtgattaattgagttttaattattacaaacttgaaaaatggattaatctgatattttagaacaactttcatatataaagttttcgcataaaacacaccgtttagcagtttgaaaagcgtgccactttaatccaaaattttatccgcgtttttaattggattcgaacgggaccacttgtcaactattagctccaatttatctatagtcaatctaatagtccattcatacaatagttacatactgcattattaatacatggtcacacatgtcatacacactgcgtcttggagtccagctgactacaaatctgtagccctttgttcttttctctcctcatatatctccttaaaatatatttatatgttcttttctctcctcatttactttcttaaaatatatttatagcaagcttatagcctgctattatacctactcacggctcacgggatcttttacggtgtattcgtcatgttgatgtcacattcctttttttaacaaaattaatgtcgtggtaaaatatagcaacttgaaatattccaatttcctcttagcttgccatgcatattttaggaccaaaaaagtatgtgatatctgagtatcacagcgctattacatgtagttaccaaacacctagttaccatatgcaagtatcatggcatttagctagtgtaccaaaattttagtttaaatcattatacaactggatggtctccaaagcagacagcgaacatttaaaatgatgaatgtattgtccgcatctgaataactgaggtatttggctaatgcataaatttcaattaagagccccatcgttttggtggcatatatttacaaacgaaaaataatttgtaaataaaaattttatatgcacacaaaggctgaaaaataaactataatgaaaaaccccccaaaatcaactccaattttaagcttcaaaattcaaagactaataagcattaagcataagcgaaaaaataagaccgtaacattacactgtaatagggttgcccagtgtaacacgggataaaagtatcatatctcaacagaagataataaataagaaatttgataataaaccgtagcgccaatatcctttcttattactaataatatactcaaaaagatttcagccgccatttgcttagttgtccatggcatgcattgcctcgctattgtctcccctgggctgtgttgtgcagtgaccttctaggttcttggctctggtcctctgcctatataagcaaatgatacaaaaagaactaaaatccacacattgttcccgttatagtgatgtataatcatatacaactgttgagaagtgtatgcatacttttggtaatcaaaccgatatcttctgcgatttttatcttgtttctggcgtaatccaaataagtctgtggttttggaatctgaagataaaattcgcctccatgttagcaaaataagaaaaatttggtgaaggcactcaacaccataatcaactaggaaagaaaaagagtctacttcaccccttaaagtaatggagttggtctacttaaccccgtaagtgtgaaatcggatattttagccccttaggtatgaaaaccagctcaaataaccccctagatggtttttaaggaggttttgccatgtaaatgatgacatgacagtattattatttgcatggcacaaatattagtccaaccctttacgaaatttcactcgctgattggtatgcctaaaaattatatattagcatcaatgtatattattctaaagccgttcaacttattaaaaaaaaaacttagtcgagtctagctatcatcatgtcattagaccctccatagtaaaaccaccgccatatcatcatgcatgttcacagtaaaatcgtctacaaaggagttatttgaaccgatttttatatttcagggggtagaatacccagtttcatgcttaggggatcaagtagaccatcctcaatactttaggggtgaagtattccactaggaaaatatcacctataccccaggatacatttgcttgatagggaaataaatcaactaaccatttctataatggcatctttgatcaattgacgagcttccttttctggcacctacacatagatgttccattagtgtgaagaacatatttcagttgagcatgaacctcatgcaaaaaagtatatgcttaccgtttcatcaatgcaagccacgtagagatcgtactgaacaacagaaagaaaaaagaattaaaaatggatggattgatgagttgtaatcatcctgatgtaacgaaactgagaagaggaacctacattttccttcatcgaacggaatctccctcgagtactgcgaagctcatccttaatatcaacattgcgcaagggaaacatatcttctctataaagttctgacagggcatcagtgaattccatctgacaaaagatgaaatagcataagtatacatcactaagaatataaagcaaagaacgaacagaaaaaaaaaagagcaccataagctgcgtagttctgcacattgaggtaatctaaccttctgcttagcaacccgcttccaaacctcaaaatacacaccatcaaaatccttgtagttacaacaatcaaaccgcatgctccatatatattcctaaattagaagatagtactattgttaaataccatcaccacttatgcttgccaattaaaattaacaggaggcattacctggaaagcagtcataacttgcattagagaaacaacacgaatgcgtagtgcgatcttcattgcttgaaggtaaactgtatttttaactttgtcccactaaacaatggaaacagttgccattaattgacgcattataacataaatatacattgcacaaatggcttttgggatggttacctgacccatggttatcttatcctcaacagcaatgagtaccaaataatcttgaaaccactgccatgtgaataaatgacatcagacaaggatgattagatggcatatggccagtattttcaccttgagtcagtcataccttagtcttatgtgctagctcttcacagaatttgacatatgctagatcactctcataggtactataatttgagtggtattgatcccagtccatgtacaaaccctgcacaaagaatacattgtccattacttgcacaagtggcatctactaggacacttgtactaacctaaacagtatctacaacaagaatataccaaatgcagaaatatggcacttgcacagaatgccagcttgcaaacaatagtatccaacatgcctgatgatatgaactaccaagttagtttgcggataacatggcaaaaagcaagtttcatatgcaaatcctactgaatatatcaatagagtgatctcaaatgagtcagtcaacaaacgaagtatatctctaatcaaatacttatgttccttttatctctaatcaaacatgtgcattcaacatttcaaaactttgatgccattagatttgctacttttgtcaacgaaagtaaccacaatggctaaacacacatatgcagacctatcattgtccaaaatggcagacaaacaatgttattttgattctatctctccaaattataaatgaatgggcatttgatggtttgcagttgcaagagaacattgattaggataaaaagttaaatactaaggcccaggggtgaaacggaccaaacaaaaaattaatagaggtcagatcagcatccataaaggtcagatagggataaaaccgagactgctctcatcgatgcagggcttgtcctgattgctaggtgactctgatcaagctagacctaactttcaataattatgtattgcttgattatacagaagtacatgtgccgcttaacttgtcccttaagaatacaattgatatctacattcataacaaactatatccataattcctaactaaaccaataccttcctagctactccctccgtttcatattataagtcgttttgacttttttatagtcaaacttttttaagtttgaccaaatttataaaaacaatatagtagcattttttaacacaaaacaaacatattattaaaatttattcaacgttacatttaatgaagttaatttcgtgttttagatgttgctaattttttctacaaagtcagatttaacaaagtttgactagaaaaaaaatcaaaacgatttataatatgaaatagagggattacagataccatactaaatatctatctctatcctaggaaagtaattgatcatttaggcactactccctccgttctatttcatatcatagtcgtctgacttttttcttagtcaaacttaataaagtttgacaaggaaaacaagtcaaacgtcttataatatgaaatggagggagtagatattattgttgtccaaggtaaactccctaatcctataaatgcagtacgcatttcttttcatataacagtataaacgctcttaacaataacaatgttacaaaagaatgtaacataactagcccaaattttaacctttacaatattttcgtttaattaagtaaattaaaattgtggtagcatgggtacagcaacgcaattgattataccaccaagtactgataaaaataagcatttaagctagttgtcatggaggagtcaagtgccgatacctacattatcacaaagcactagacgctggtagttatcaagggcagcaggctggaatcgttcaggatcaaagtaccattcaagactatcctcatagtactgaaagtaccccttctcataaagaatggagggagggtacttctctttcagttttgcaatatccagttcgtcaagctttctaccatttgataactgcaacagacaataggaaagtagtttataacaagcagagagatgcatcaaactaaaatatacataactttactcatcccaggtgatgataaaagatacctcataacctatgatgcggtagaaggccagctgctcatgcaactcagtgagctgctgtggcccatcgcattcaagccaatcatcatcatcatcatcatcaagatggtcctgaacatataactgatgaaagtagtaactgactttgtttgagatggtatcctcatccatgccaaggagatcttctaaatcctccattgattcttgttcttgtttgtgttctcgtgaaatcttggcaaggtccccagaagatggttttggctccccctctattgttgatgtgcttgttccatcatgagaagaggatgggctaccactgtggcatgatagattttctgtggattcgtccatcttgcgcctctgcctcttcttctgtttcttcttcttcttcggcttgctaatttcttgttgacttgaggatttaacatcttcaatgctgtttttcttctgctgtgcttcatatccaatatgcttgccctttcccttctcagcagtgggagaagagtccttagctgcttgcaagtcaaccttttccttaccaggaggagaaccataggcttcaactgcttgcaagtcacccctttccttatcgtctccctgtccatcagaagctgaagctgcagcagaggcttcttctctggattggctagcatcgtacgtgggtttggtttccagctccttcgtgtgtgacaaatccatcaccaactccggatgcaagtccaacctcgtccttttaaggagccacaacaaaaatttccacctgtactcattccactcgcatacatacctcaactccatacatattttgtccataagcttcaatcgggctataacaccgccatcctcaactcgaccaatcaactgacccctcagtagcctcaattggattagggaatattgcaacatcttcatagcattataattcttcttcttctt

SEQ ID NO: 27910 - DNA, 2123 bp, Oryza sativa
cttcactattttttttgatttttttcttttttttttaaatttttgaatttggacgaattttattaaaccgtaccgtgcggtacgggtaaccgtacccccgcggtacgggcggtaaccgcggtaaccgcgcggttaccggcggtttttcacaccctggtcggcactcggcagacggatgcgaatcgaatcagagacgaaggggaagaaagaagaaggatagaggttggtaggtcagtagtataggggaggaagaaaaggagacgggattactcggtaggcgtctactctttgaggcccacgcaccgccgagaggacgcaaacgtaaaaggcccatagattggctcagccagggcgggaataagtctaatttgtctccctcaactgcaaaaccgggtataactcgtctcctaactcccaaaacagttgcaaatcaactcccgtagcggttttggaggtggtttcgtccgacgtggtaactgattcgctgactcatcaggtgggacccgcttgtcagcggcctccaccttatcatcttctccctcacttctccaccgaattaaaggcggctgtgtttagatcacgtcaaaattgcaagtttggttgaaattgaaacgatgtgatggaaaagttagaagtttgtgtgtgtagaaaagttttgatatgatggaaaagttagaagtttgaagaaaaactttggatctaaacacagtcgaaaacttctttttgtcgatattgacaagcacaaatccgtgcacaaattcatggctttggctggattcagtgtaatgcaggcatgtaagcctgttccatccaccaacaaaccggtcgcgatcgccggctactgatcagtagctgaagcgaagcaatcgacgcagctatagctgagctagctacctgtcaagctggccgcaatagcagcaagtacggcctcatgtttactaataaataaggtagactttatatctatagtaataattctaagaaaatttgaacttcaaagagacaacaattctaagacagagggagtagaaaacagaacatgttttaacatcattagataacattgtttctcgcagggcgacaagaacgaacactgaattatttacatttaataacagcattcgcatccagagcatgagttttccaaaataacactactgcatacatttaataacaccattcgcatcagtattccaaaataacactactgcatactactcattggtagtaggcgggctgactgtgcctggagtggtaggcgggctgactctggctggcgtggctggctttgttgtagacagttcctttggtggtaactgaatcaacacaagaacaaaatgggaatgaatgaaaacagaaaacacagcaaaaaaaaaaaaacataaggacttcatcctcatcagagtaaacaggaggcgtccgcgcggatggggctgcactacgagcagtacgacgcggaggggcacgagagctcgctgagccgcaagtacggcctccgcgacgtggtggtgtccgacccggaggccgccaagcgcgacaaggggtggggcttcgtcgcccgcgtctacctcggcggccagaacgtcaccctcgacctctccaggttccgacacacgctcaccaggctgcacgcgcgcgccctgcgcgtacgctcgttgcacccagcgccgtagacggattatcggatagcagcggcagaagcagccatggatgaatccatcggtttctcgagcggatagacgtacgtgacaagtgctccattgcaactagctgtttaggcctactaccactacacaaacgagatggactaccttcagccagaacatgtaagtactaaacccttttatcgtagatgaaaatggtaacttactctataatacaaaatttaactaactgtttattgtgttggtgcaggtggtgtggaggccatatgaggcacaagaagtagtcgagctagacatgaaccctatgtgccacatagaggatacgttgcaaaccttgcggagcccactgatttgcttttatgcagtggagttccagctatgcaaccgcataatgcggcagttcgggaggcttcaaacaataccgcaccgtttcttcactagtatcgacctccacaagta

SEQ ID NO: 27911 - DNA, 723 bp, Oryza sativa
cttaaatagggctgccttttggtgaagaaagctttgggtgaggatgctacactagtatctagctccggccttaaggatgctatacgagtttctgatgctttaaaaaatggaaatagcaataagggactgttttcatcatcccatttaagattgtcccaccatgttttctgccccatgacactctttaatttgacaattgcatgcccaaaaggcagccttctcagcttcggacaagcaaacacatcaaagtattccaaagaaggaaggtctaggctaaagttacagaagttttccaagcttggcaacgaattcaattgcaaaattctcagtcgtcgaaatccctggattggcatttcatcttgtacttcagtattgattttattctttatatggactagctgtttcattttattgcagaaagacacatccaattgctccaggtgcggtagtttcagaatgcaggacatgtccatcagttgatgggctttccctacataaaggacacgaaggttctgaatatgccccatactaatcttctcaattcttggaagatcccaaaaggtgagaaactctagcctcggaagatgatctccataacactgtggcttgtttgtgacagagaactcctttaattctgaacagtccgttatattaagaacaaggacactatctggtatagtgagcgcaagagatgtctcgccactcaatttatatagaccaagc

SEQ ID NO: 27912 - DNA, 8469 bp, Oryza sativa
agcttaacccgtgcatgcatgataaaatgtatctgatgaagatcgatgtgtataattataattaagcatattcatgatatcttgaaattaaatcagagggaaattattagaagtagcttttcatgaattaatgcaagaggttaatcaaccgagctagcttctatatatgatatatgaaagtgtgcataattatttgggcttatagacatgattgaggcagacaagcttgagtgcatgaaaagctaaacatgcaggatataggtatgcagcgatctgcatatgtagaagtttgccatttagcagagttcatgtaaatgtactgaaagataagcgtacgtggtacatttagcttctcaaaaggaagctacatataataatccatacaagtcgttatactaattggagatttggagaactccagagtaataatatgtctggtaatggcttccatcaatttttcatctgatttcttgggcctgcttgaccttaattatgcatatatataatgcattgctgccttaattatgggtgaaagggtggatggtgatacataacgagtgagatggaagaaaaccagaaatgaaggaccagatcgaatagagaatggatcgaaagggaccctgacctagttagtgtacaagaaaaaaagaaatgaagatgtataggtgaaaatgaaatatgtgactacgtactacaaattaatacacaattaattgaactctttcagtagcccccacaagcttctgtggagacatcttgaactaaagctgcatatgaaaaatcagcagcgactctaccacatattatttcccctgcactctcttccttaagaggtacaaggcacaacaaaacttttcctagaagctaagttaacatgaacacactgattaactgaagatgctaacctgtgacctatacatgcaggatggttaatttactcgtgtactagactgacgacacattggatgagagaatttcttgtaaaaaattaatgcaacgttcaccttaaaggagaattaagaagaccttaattgctagaccagactacacaatgcaaaattggacttaccacagtcctttgttagcatgccaaatacaccactcaacccataagtgggtacatttggcgtgaccgcgtgagtgtaattagtaaatatgtgagctgagtaagtatactcatgagagctaggacagatgatatgcatatgagatatgactgacacatgtgtgtggaggaagaagatactgtatttagatggatgcagacttaaggcagccgtggttttctaggccaatggtttctctggagctgcagcgacatgagaagaaatgagcctgtactgatactgtggtgatggtgccggcagagttggagctgtcagagacattgtcatgcctgcagaaaataaggatcgcattatttacttagtactgtattatcatatcaagtgcaattagttaatcgactccattgtagtactaccaacaataaatgcaggcccctctcaataaaaacaataaacaataaatgcaggccaattattcagttgatgttccagatcaggattaatgtattccaacagaaggattaattaggtcaccaagaatggttatctataagctctctacaagagatccatgttagcatatttttctacttggaagatattaaatgaagagagagagcaaagctatctactagcttagaaatagtctatagagaaaaacgagacaatgcatgagagagctatagatacctatgtagacatactattgaggtggtttattattaatctagtctattgttgagatgtacatgttttatagagagcaccttactttaccattgcgggtgctcttagtactccactcctaattaacaataactagggtattactagtactccctccattccaaaatataaggcacaactacccttaatccaaagaccaagaaataattattatcatattgtagtttggatcatcctaataaatataatgcatgcatccaataggattagatagcatgagagtggaggatttaaaaaagtaataatttaatagagaagatatcataattaattgtgtgtttgcatgtatgccttatatcatggaacatgtaagaaaagtggttgtgacttatattatggaatggagggagtattaattagtgcccaattttatttttgggtgagtaggcataacgtcttttttatatgtgataccctcacaagcatgcatgatctcgcgcaaaggattgagtagcgtgtcaatatgcacaagtactcatgcattgtacattgggttgcttgcagattcagacatatatatacagtgcatgtactatacaagaatgaaaatacatcgtgcatgtaggaatgatatatacccccatatggtacggttatgtataaatgtttaacgagaaggatgtttttctttttaaaaagaattaactattaatttcatatttaaataaatttataaaacctaattaacaagatattatgatagatagtataatttttaaggaaaatccaccactaatcatttgagaaattattaatcatcaattttttcataacttgaccaaaccctacactaaatgttaaatatttatagcaggatggagtagctcgcagcctcgaattaatagaaatatgacccccctccgcccctcccccccctaataaaaaaaagctatctcactgaagatatatactccatccgtctctaagatataagtacttttggactttgacatggtcgccaagatgttattttgaccaataatatatataaaaataagatattttaaataaaaagagttgcatattatgatagttttttaataataaatctagcaacatcaattttacatgattgatctttttttattttttactattaatattaatagccaaagttaaaagtatttgacctgtcattatgctataaaaatgtttatattttgggttggaggaagtaaaataaattaaaacatctctgacaaacctgctgcttggccggtagagttaggagcaagagccacagtgccagcgtactgctggagcccggccacggcggtcagctggctggccgtcgtcgccgccgtcggggctccgacagccgccgccgccgccgcgtactggtacatctgagggtactgcatgccggcgtacccggcagcagccgcgttcgccgccaccgctgggccgtactggaagtacggcgagtagagaccgccgccggtaggattcgccattgttagccccgccgccccggcggcggcgccaccagcgaacatctggtactgggctccaagcccaccgtacgcttgatagtagctctgtatagtacgtaaaaatgttgacatgatcatgggtgattaattagtttaccactaattttgagatgcaacattatagtttatgaactagtaatagtcagactttagtaaaatctataggagagggatcgatcgatgaatctctagtagatatatactttatcagcttgcatatatacacaatatatgtatatatgtaaactataacgcaaattgattaaacaaaaaattacatggatgatgattttttttttctgaatggaattgaagtatatatacgtaccagcggatagccgtaatccgagaaataaggtgagtacctgaaatcaattttgcaagtagccaaaggagagtgtcattaatttgctttttgaaatgtacatagaaatgacgtgatgaggtacatatgcatataataaagcaacctaaatacatacatttcgtgaatgaataacctaaatatttcgtgaatgaatacatctggatatctctcctatatatgggactcctaattgcacatggaattacctaaacaaacttggttgataatgctgattattgattataaatttcctaattcctagctgtaaacttgggaactctacattaagtaactgtatgaagcacattaattggtgttcagcctaattgcctaaagtagactaactaatatatgtgcaggcatggttaatttcagtttggagtacagatatatcttaacgtctagtactaatctccggccttaatgtggccaagtgaggtttcatatgaagaaattcatttgcatgaaaattaatcatcttaaatactagtcactaaattaagaacaccaagatctatatcaattagcagagctgcagaatggaaactttgagatctctctagtttcttgctacttttttttcccctcagtgcatgcaggcatgcgcatattgcaggaagaactgagcaagcaagaggggcgcatgcaatgcaaagctttttgtaaagtggcgcgcatgcaactgcatgacactatatataccgaccggtaccccacatgccagacgctgtacccgaggcattatgctatacagtatagtatatacgtacatatacgggctagctatacagtatagtatatactagtagcacgtcaaatgatcgatgaggacacatgcagcatgatcatgaggtgctcgatcgatcgatcacgcctagcttagcttatactactcctttcaaactattttaagtgcagttattgatttatatatgtatccaatgttttaccgtttgctttattaaaaaaatgtaaaaaaattaaaaagtaagtcacgcataaatactatttatgttttatcatctaataataacaaaaatattaatcataaaaaaatttaaataagacgaacggtcgaacgctggacatagaaacctacaactacacttaaaatgcgacggagggagggggtaacagctactacagcaagttgcacacatacactactagctagctgcttctctttcactactcactatttgcacacacatacacatgcatgagagagatgagagagatagtagcattgtctttgtgtgggcacatgcacatggagatggagatggagatggagaaggagaaggaggagctggagatgcacatgcagatggtgatggacggtgcagtcgttggccccctccctccattaaacgagctgaagctgagaccagctagctccaacgcctttaaccccccaaaaccatcctctttacagctagccggccatcttctctactacatatcatatcccagcatgcatgcaatgcaatgcagcagattgagaagcaaacacaagctctatatatcgatctctagctagctagctagctggctggccggtggttagtgtgtgtactattcctacctgcaactgtatatagaaggagagagggtgtgtttagtgcgctaaaattgaaagtttgattgaaattgaaacgatgtgacggaaaagttagaagtttatgtgtgtaggaaagttttgatatgatggaaaagttagaagtttgaagaaaaagttaggaactaaaccagaccagagatcgatatgagtagtttacccatacacattgtaggtcgggatcccctgctggatgccatgatctgccatgctcaagctggcaccaccaccgcctgtctggataatggacttcattgccctcatatgcccagctgctccagttcaattcatgcatattcacaaacaatttatcaactaataaagtacagtattcaattactatgcatggtaataaagtacagtattcaattactatgcatggtttgtaattaagcatgattagtaattggctgctggataattaattaattaattaattacagtcagtatatatatatgaacaggagtattggacaatccaaggacggcagataactgcatgcctgacaacatgctactatacacactgcaaactgcacaagaagcaagcaaggcagcctagaaggctggaattaacgactcccgagaataactaaccgtgctcgcttttagcacttttgcagaaaagctttagctagctcagctggagaccacgcagccttttcattaccggtgaaatactgtcggatgctcggatagcatactttatctagctcgatcgcttgttgttttgatcttaattcatataagcattatccaactaactatactatccagcttgatgacagtgaccggccttaatttggcgcgaagcaataccatatagttagacataagtacttaatgtgtacaggtattactaattagtttacatcacaattaataacttactagcttgattcaagaattagcatatccaaaaagtgactatacaggatttaagcttttgttagtaggaatttgttctcaactaactgatcaatcaaaagggacgcattttttgagccaataatataaattaatttgattctgaagaatgcaatttttgctcaagggaaaatgaagagtatatactaagtttagcagtacgtgcagtatgctcccaaagtatgagcataaaatgatgcacaatacatgttgtagaatctagctaaaagatgcaaattaagccaggaaacgcacatatatgctcctcagttattctacatgatcatcatcaaccttaaacttgtctccacgtagtgtcagttaattatatgatcatcagaaattaagaatctggattaaaaaaaccatgaagaaaagttaaggtgcgtgttttatgtgatagtgatttcgattaccataaggttgcagagacgctgcagctgccttggatctctggaccccaagatatgcaagattgcagttggccctcctcccatcgatcaccgggtacggatcaaagcaagctttcatagcagcctccggctcgcggaatgtaacctagcaaagcagaaataataaagattcagtagagatcgaaagataaccaatccaagatcacaataaaaccatgtagctagctagatatagatatatagatatcttaaaaaatcgatcgatcagttaggttcttcggtgattaattatgtgcaagaaagctgcatatttatcctggttaattaattattcttttggttgaagaattaacttgggaggtgcaactagctagctagaacagctagttggatcgatgctgaaattaaaatccaaattgattgaaatccaagcaaacagaagtagaattgaataggaagatgatgattgattggggaattaagcaggaagagagaaataggaactcacaaatccgtagcccttggatctgccggtgttcttgtcggtgatgacgacggcctcgaggatatcgccgaactgctcgaagtatccccgcatcccctccttctgcgtctcccacgcgagtccccccacgaacaccttcgtcagcgtcgtgtcgccgaactgccccgccgcgccgccgccgccgccagccgacacagccatctacaacctctacctcttcttcttcctcgatcgatcgctcgctccgatctgtacttctacagtaacctggtgatcgatctcaaaaggcaagggcgatcgagaggggggctgatggctatatctatcgaggcttgatatgcaagggaggatgaagagaagggtccaacctagctaggtagctagcaccaaccctagatagcctcgatatggatgctggcctttgctagtactacacctattagcttgagttgtagagagagagaagaagaagaagcaaaagaggaaggagaggagaggccgaaaggaggaggaggaaagaaaagcgaaagctggcaaagggaaaagaaatcaacgagagagaggaagaggaagaggaagaggagaggaggcgggaggaaaaggcgggtacgggggtactctccttactcatccatcgagtaggtataaagaaacatactccctatcccaaaacctattagcttattttggaatggagaaagtatcttctaacttattgtcctcttctgattttaagtaattgacatctaagagatgatctagaataagattagagcgtggactcatctccttcctccttcagccccctactcttcctcctcccctcttcttcttagggttgcaagcgggccaacccgcgaacccgcttataggcaaaattagtaggtaacctacggatcacctactgatttgacttataaatgggtttatggatcggcccacttgtatctctaagtgcagcaagccgaatcacgatatgaaaacctacgggttatcacttatttgacatataagtaagttcgcgtgttggcccgctttcatccctacttcttctccctacattctatcaattatgatccagcggagtagaggggactcaagtcccccagcacccacgctgcactgacacatgggtcttatagctcgtgggccgacatgttagcaacctacgacagatgatagtatatcaaaggagcttctttaataggtatatatatctctctatcccgatggcttgtgtttcatttacttaggcaatgtgcatcaacatatgaatattaaattttgaactcgtttattgtggattattaacctacctctacattattccct

SEQ ID NO: 27913 - DNA, 6213 bp, Oryza sativa
cccgcgaacccgcttataggcaaaattagtaggtaacctacggatcacctactgatttgacttataaatgggtttatggatcggcccacttgtatctctaagtgcagcaagccgaatcacgatatgaaaacctacgggttatcacttatttgacatataagtaagttcgcgtgttggcccgctttcatccctacttcttctccctacattctatcaattatgatccagcggagtagaggggactcaagtcccccagcacccacgctgcactgacacatgggtcttatagctcgtgggccgacatgttagcaacctacgacagatgatagtatatcaaaggagcttctttaataggtatatatatctctctatcccgatggcttgtgtttcatttacttaggcaatgtgcatcaacatatgaatattaaattttgaactcgtttattgtggattattaacctacctctacattattccctccgtccaaatatatatgtggcgtattttattcgttaagaatataattcccatcacacaaaatcgatgtctttagatttgtattcgaaatatttatagttacacttttatatcacataaacggtatatatagggtaaaacaattgttagtcaaagtcttgccaatatttttggatgggggagttgtatatatcagctagcttagaatggaggaatttattttagcaaatggtgtggtgggaaagtcatggcaatgcacatgatttcatccaacagtgttcaaattctaatttctgtatataagaactttttactgtcacttgaaaggcggtgcattagctgcataccggcataacaatgatttgtaaaacgaaaccacacatgtcacgaagcagattaatgggttagtctgcattaaaaggaggggattaattactgtactttgatccgtacttactattgatgaatgtaggaacagttgtttaaacagtatttcgactagtcctaatgaatctgtaagtaataggaccggcaattcattcatagtgagagctgtagaaaaagattgcaattattatgcttaagattgattgacctatttgcctttcgccgtatggatattattaagtgttagcaagttgcaaggcaaggacccagtcattagggataatattgccaacacgtactacatctctatgcacaatccacataaaggattagtgctaattatttgcaatcagtacatatgtacacctatctgtgggaccataagtgcaaagtccatatatattttgtggttactgatgcgctagctcttaatttagtttataaagatctcagaaagttaaggcagaaatggtacagtattcatgtttaggtggccataatgtgtttagtttaggtgtaatgacaacccaaagtgatcatatctgtatctaaccatgaaaatgacaccagaatagatatcaacaaaaagctagagtagccaccaaataaccacacgaaagaaaaggaggggagaagaatgtgtgaatcatgtcacaaaaaaggtcaccattctattggctgagtgggagaccaatacatgaatcttccttgagatgacagctagccctattaacaataacttggctttcacctagctgtgaccatatatgtttagtgttttagtattgctctattatgatatactactagtaagacaaagtgcttttgcagttgaccattgtgaagtagtggaagaacacattctaagctacaagtagctagatatatttatgattctagctacttattaatacatacttacaaaataagaaaccatgttctaaaaaaatacaatcaagaattctggggttaatgagttttggaagtatatgtgctgctagcttttgggttgagtcctcagaaaggtcaaaactgttatgttggttttggtgtgtttcaccaacctttatattcatattgacttttgatgttgaacctaagctaatctgttactaactttgcatcagtactgaagaatgtgtatgcatgtatgacaaatagggtacttgttaataataagacatccatttggtggatatatgtactatatctgcaaaagcatacccatgggaatagaacaacatgctcattgctgtagacctttcaaccctgatctggccaacttgtcttcaaaaaaggcttttcatttttttttagtaaagaaaaggcttttctggtagaacagaatagtggaggttctccagttgcatttctaaaatgaaaccttgcgtcacaagtgatccaaagcaaacatttttcttcctctaaaaaaagtcaattgattcacatgtattatcttgatctcatctcaaactctcttaattagcagataacttagagcttagagaactttaatgatagtgacggcagcattatgcaagcgcattacatcttgagtagaaatttctctgacatgttcataaatcagatgctgcaaaatcattgttcttgagtagaaaacccaacagaaatgatgcaaccgcagccaaattcaagacaatattgtgatctatcaacgaggtgtgagtgtcgtgtgaactactcattatgatcacatcgaatcctgacctggacgtgaaacatcgttattcatcagagattatccaactgggttagacgttgatggcctaaaagtgaggtcaagctttcttcactagtacatccatcatatcgtatctttggtctgtcgctggtattgcatactttatccttttgacaactgtcttgcaggcaccaaactttgctttttgaccatgggggtgggccagtctgtaaggacctgcagaatatatcactgaatttggtgagagatgatgaatcgaagctgaatttgcagtgtattcacattcagtgtagatacacaaccacaagcaaagtgacagatttagctgataatagaaagacgaatctacatagtatcaatattgagtacatcagcaggccaccattagcatcatcctaaagaactgccagatatatatggaacgaagagaatggtccatgtcataaggtgatagcttactccaaagtgatgcagccatattcactgttatgaagaagtgtgctctgtttggcactcccaaccagttcctctatgataagtagataacagcgcaatttaattgtgtacttagtgcatgacatgctgttgtgatactcatgccgacagctctaatttctcaaaatgatactgctcgccagcaactacttttagaagctgagaatatctaccaaccgacgttgctttatggaccacaattagctaagaacataagatgtgtcttattggccacaaaatgcagatcaatcctgctgttggagttgagtactaacaacttggcatttgtttaaattcttccagctaaagacctttagtctccaagtgtttgcaacaacatgcctcataccatctgcaggatgtctggatcagatccaagtgccataaagcataaacatggaaactgctaatgcaggtgacaggtgatcatccacggagtttccattcaactgttcaagaaatccaaatgtatagaataggggtctagacagatgcaaaatacaattcgtagtcagcaaatgagttgatgccacacaaggtatcaccctgttaccttgaagcctccatgatcataaagaacagtgcctatattatctccagtctcatcatcattatcatcatattcactaggattagcttcttcgtcagactccgaagcatcagtgatatcagagaaaccatcgttatccatatgcgataggtccttcccttgactcggttcttccattttcagagaagcagctcttctatcatcacaataaacaggatcaacattctgggattgtgggtttccataaagtgcaatatgccgataataaagttcaagctctttttcagacacggcaataaaacgcctcactgtctccagtgattgttcatattttgatttttcaagtgcctgatgaaaaaaagggacagaggtaagtgcgcaaaatgatgcatagaaaacatcagttatctggcatttctacaagctaccaaccataggcaataatccatctgagacaactgaactgggtaaacagaatcaacaaacctacctttttctttgatagtgtatcgactggtgacatgacatctggctgaacatagttctttccccgatagaagactatggtgtcatttccaatagtattaatagggataccaccactcagtctggctatctcacttgcgtactcctggatttgccctggcttgcagggtttgcagatgacttttacagtctcatgtttcttccagtgcaaatgcatgtttagaataacaccaccaaagactcctctccttccaacagggacataatttgactttttttgagaaaccttcttcaaataaaatctttcctcgccatcaagatcatcttgtttagccatagggccttgtgctttagcaatctcatacttctttaacttctcaaccaacatagcttctttcaatttggcctggaagagaaacagatagtcttagtttgtactcccctagaaacaaaacaaagagaaatcaagcacattgtcttccaacatatttagcatatgtacttctgaaagttccttggaaaccaactacttctaaattctgattatatcatagaaatagaagaagacaaattatgaaggaaagtatattggcagtgaattgaagctagaatgcttattcaaatactgaatggcaaccagcaatgtcctactctgaatgaaagatgcttaatttgattcattgattgtaaagattgcttcaacaagaaactagtcgagcaaactaaattaagcaaatatgtaaaaagacataccttctcaatcttgtatttgagtcgagcttcaggtgtagaaaatttctgttttatcttctttcccttgggtctgatacgccgtggatcatttttattggcctctttcctcttcttcttttccctcttcctctgaagcttcaatcgcttctttgtcaaatacccccgcttcttggaaggttccacctcctcaatctcaaacttgggtttcccatcatcagatagaactagattgactgagctatggctagcccatctaaccatccatggaggactaaactgataaaagggatttaagcatttcccaaatgaagcaatagcaggcctgcaacaagtagcaggaaaaaaataccagggaaattaaacccgaattgtcattggttacatattactcacatcatgcttggtaagctacacggagtaattttagtgaacaagtaggcaactcttgccaaatgaacatcagtgctatattctttacagaaacaacaatcgtttgggaggaaactcctttatatgattattggaattaaagttgcacacatgcttcatgttgcatacatcatttttgccgcctgcagtttccagctcctcataaacaaacacctattcacaaattctagtagtaataatttggtatttctcccatctaaccaatgaggatgtactcgaggatcaggagagaggagaatcgagtaacagatagagttacctgagaggttcaggggaaggcgagattggtgccctctgggacagattgaggagtgagaacgaagccaactttctcaggttctgtgacaggacgcgggtcgccatagcccactagtcctatgccaacgcattgaaaagtggtgtagtcaggaatattttgttgagtgtgcctaacttcatataccgaaattttctaagaccgcaaatcctgtatgaaagtacaaattttagttaaaagtgtgatacaaatataggaataatatctcataatatcactaatcgacaaaaaaagagagaagatcatatataaaaggtcttacataaatatagcagattcacatagaacaaataagatgtgtgtgacagagggagagagaagcacttgtaggttgtggcatggccactgtcaatggtgatcgcacaaactcgtcatgatggaaataatgaatataatggttgtaaatacaagaacatatcactagaacggatgataatttaaagatctccgcaatttcaactctaaaaggtagtgaattaaaaaggcatagggtctggttattaccattgactcacatatacctaggttattactatggcatttgatcgaacacctttctgtcatgaaaaaaataat

SEQ ID NO: 27914 - DNA, 1596 bp, Oryza sativa
ctgttgcagtacacgacggcgacgccgaggaggaagtcggcgcacggcgccccggcgcggtggttggtgcagaagaagcccaaggcgaaggaggggccgaggcgcgccgggttgaggcgcagcagcgcggcgcgcgccacggagccgtcggtgtaggcgacgtggtggcgcagcgcggcgtcggtgttcgcccacgtcgtggacggcttcgccgtcgggtagtcgtacggctgcgcctgcgcgcggaggaggcagagcgcgaagcccacgccgagcagcgccgcgtgccgcatcgttggtagaaatgcaaggagtttgatggtggtggtgtgtggtgcgagttgtcgtggtggaggcgagtcggaacgtttttttatagctttggattgcgtgcaccgtggttggatgggcgttttccttgcatgggcatgcatggtgcacaccgcgcgcgccgctggttgaagactagtagaacaatctgataccaacgcggtgtcggtgtcaatgcctatctgggaatcaatccaccggagcaaacgcgtagcggtgcattgcgggccagctgcatgcatgtctcgtcccctctgtgtttgactctgctggcttaattcgtttcgcagtgctcaacagcgagcaggttatagcaattgtggcttgcgaccacaacgtttggtaacgttctcccaaagccactcgtttattttaacaccaaatgatatccagggatgcctcaggactataagctagctataaatatattttaataacataaaagagaaatgagaaaaacagtgggttacaaatttataaccaactataacacagatttcaaggcgcgatgtgtatatgacaaataggaccagaaattaatagtgtagtatatgttcataggtaactattgtatgatttaactagtattaaattgactataaatgatttggagttagtagttgactatactattagggtattctcaacccaatgactaggatggtgtccataacattaaataagttgtcacttaggacaaaaaatgatgtggcaagtgaataaatgaggaaagagaaagaaaccatgtcttgcatgagacatggtttctacacaacattcaagacatcatgtgagataagtagcattaaattgaagtatggaatagtggtgtttgtattgaaagagtagtgtctagtactagtttcttgatgatataaaatttatagaaaccatgtctagtgttctgggttgtgactgtccttaaacttgctctcaggccctagattcgtttgtcattgttaacaatttttcgaggagcttagctctggcaaccactggcgattgggtgtcggctaacaatggtgatcgagcacgccacggcgcgtcgcatccgcacgccaagaacgaaacgaaaaatccattaccgcgccgctgcgcacacgggaaagcagcagccaccgcggcagcaaatgcccagcccggaagtagcagtcagcgtctcgccccggcaaggagagatcgtgggcctcatgggccgcagcgtgaaggatagtcgttcttagacaaatgggctacgcaaggagaaatcgtgggcctcatgggtgg

SEQ ID NO: 27915 - DNA, 715 bp, Oryza sativa
atttttttttctgcgggcttgaaaccacaaccacagcaactatatgggctatatgagagtttatcaaaaatccacatgcagtggagaaagcgcaatcagatatacgaaaaatccttggaggcaaaagcattgtcgaagaagcagacatcgaagggcaacttcattactttcaaatggtgaacaagagactctaagattgcatcctcctgtgccattgcttcttccaaggttatggtctgaaccttgtaaaatcatgggttatgacatacctcaagaacacagcaatatttgtgaacacatgggcacttggtagaaaataaaaaacactggattgatgcaagtgagttcaggcctgaaatattcgaggatgggcatagtcgatttcaatggtttagacttcaggtttcttccttgtggtgccggtcgtaggatttgtcttggtttgatgtttgaactttctgatattgagctcacacttgcgagccttctttatcattccagctggaggttgccaaccagatcatactctaataaactggatatgaccgaagcaaacgggatcacaactcatcgtagaattgatatttggttagaagcaactccttttgttcctagaggctaaaaaaatatgtggttggtttgtgtttatacaattgtactatcttttaaaacttatgaaccatggcgttgcggttggatatcctaacttatatgt

SEQ ID NO: 27916 - DNA, 1361 bp, Oryza sativa
gctaatttcttgttgacttgaggatttaacatcttcaatgctgtttttcttctgctgggcttcatatccaatatgcttgccctttcccttctcagcaggggagaagagtccttagctgcttgcaagtcaaccttttccttaccaggaggagaaccataggcttcaactgcttgcaagtcacccctttccttatcgtctccctgtccatcagaagctgaagctgcagcagaggcttcttctctggattggctagcatcgtacgtgggtttggtttccagctccttcgtgtgtgacaaatccatcaccaactccggatgcaagtccaacctcgtccttttaaggagccacaacaaaaatttccacctgtactcattccactcgcatacatacctcaactccatacatattttgtccataagcttcaatcgggctataacaccgccatcctcaactcgaccaatcaactgacccctcagtagcctcaattggattagggaatattgcaacatcttcatagcattataattcttcttcttcttcttcttcctcctcttgagctgccgatcaggcctcgcttcgtcaccaggcgagcggtgttggccccgcttcccgtcgctttcctgttgatcagcgggtgcatcttgtccggatccgctagcaccgcacgcgggatcaggttcctggcaataaatctgccaccgcttctctggatcaagctgcggcggcgtcttgagcatcttctccctggagttgtaggagcaagcaggacgtcgaaaccctaatataacaagcgaaaatagtagtcaagattaggggttggcttcaggagcaattcgagggagtcggcggagattgatgatataatatttagggggggaacgagtgggatctggggattgtggaggcgatacctttccggtcttccgtgtgtggtcggcaccagggtttcaaaaaccgccgggggcccggttaccgccacccggcggtacggcggttaccggcggtacggcggttaccggcggtaaccgcggtaaccgcgcaaaaccgcgacaaatttacaaatcgaaatttgaattcaaaaattcgggcaaaccgcgcggtttggcgcggttaccgcgcggtttgacgcggtaaccacgcggtttggcgcggttaccgcgcgatgtgtaatgggttgcacagtaacgggccggcccattttttttctttttccaattttcaaatttattctccgttttgctctcaaatttgaataaatattactcttttttgagaaatttcttccccataaaacactataaatcaagcactaccttcactattttttttgatttttttcttttttttttaaatttttgaat

SEQ ID NO: 27917 - DNA, 5112 bp, Oryza sativa
aatagaaaaagaggagcacgcaggcgcaaggagagagcttgcgcacacaagcacaaaacgaattcagattttctttttgggtggtcatgtagagcctctgcacccttattgtgcattcttctttattttgttttgacccgttttcctagaattcaatggttgggttccaggcattgggcatgagttctcgtgggagccatgcaaacattgtgagaaaatttccaaataggtcataaaacggataaaaatgcttgggcctaaactcacagtttttagcaagcctaatcctttaggaatttccatatttgaaattggacgattttggagagtaccattatgtagtcttgtaatccctctgtttcatatcataaggtgctttgattttttcctagtcaaactttgaccaagtttatagaaaaaaatagtcacatataaaacagcaaactagtttcattaaatctaacattgaatatattttgataatatgtttgttttgtgttgaaaatactaccatatttttctataaacttggttaaacttaacgaagtttgactaggaaaacagtcaaagcgacttataatatgaaatgtggggagtaattgcgtattggacatcaaatttgaagttactgttactggatcatgtacttgattgtatgggactatgggtcgaattttaatgtaatgttcgagtttaaaatttctagttagcgtcaaaataagcccaacaaagagttaagggatggtttatttctcaggttaagtttaaagcttagtccattgctccatttgaaaatctgaagccagttgggatagactatagagcttattaccagttcctttgcattgcaggtttctgatgagagagtaaaccatgatactgtgacctcacatgaaagtgaaattgggtctgggtccatctccacagttagctcaacagttagttcagtagaatcagagaaagcagcttatgaattccttgctcaaactcctatcaagtcaaccgatgcacaccttgttgagttttcagaagctatgagaagtaaggagacaaaagctttacatggcactaccaaattcctgattatctacagttatatatacctttcagtcctttcacttgcattcaaaaaacaaaatattgataaatatagtttatttttaaactgaagctgttgcaaaagcattgcgaccagttgcaaaagggaaagctgctgctcaagctgatgcggaagagtggaggcgtaaatatgaattagagatggcacacaaacagcagagaaaaatcaaaggttagttttgtatacattcgtagttgctattccaggagctatctccaaaaatctaaattggaattctaccttgtgcaggctatggcagttgtgccaataatgaattagaaaagttggccagccaactaacactggagacgcctgcatctgatcaagcgggatgttgtggaaatcatggtatatgttcacatgaggttcttcaggatgaaagtcctggtcctaacccccgatctagtcacaagctggtgagtagaaaggcatcatttagactttcatggggatgcaatggggataaaaacggccagcacaagcatgattttgtatcatttgaaaagggagatataacaacagcagagcgcagcaacaagcaggttagtcctcctgtgctggaacagtcaagaatattattctaattatttcactccagtagctggaataactagaccaatgaatcgtctcttatgcacatctatttctgttacaacgattttttttatttcagattttgctgaaatgggaatcctcgccacaaactgttcttttcataaccaaacctaattctaactccgtgcatgttctttgtgctgaaatggtcaggtgtgttctttgatttttatattttaaatgccctaaatatctgacagatgcatgcacgttttaagtattgtgtttgcactgctaaatgtactatttatttttctgcagatggcttaaggaacataaaaagataaatgttgttgtagagccacgtgttagcaaggaactcttaacagaagattcctactacaatttcatccaaacatgggatgatggtaaggcatttctattgatttaatacattagtttcatgctgattcatattttttcttttgaaatacttcatatgcttaagagaaaaaaaaatggtgtttcagttatgaaccctttccttgtcattgatattctgaaaaatgaaagaactttcatgataactaaattagttgattactgccgaaatggcatgggtatatagtacgggcatgcttttgctttactttatcacccttatgtatcctatcttgttttacatgggggcaaaatttacaatgagaactgaattagttgattactgcttgaattcgagatgtttattacctatgtctagatttttatgaaatcatccaatcacatctcaataaagatttcggtaaaaatccccttctactgcttgaatttgtgatgtttattacctctgtatggaattttctgaaatattccaatcacatcccaataaagtaatatccttgtactagatgtcggtacaaatcattcttggcattgaattggatacacattataaagttgtattttgtatcaaatgggaagattagacatcttgtttgagtaaagtagttctattcattcacctagcactctcccttatctgtgcaactaattagataattctgatagatgaggagaaaaagatgttgcacacaaaggttgatctcattgtaactcttggtggtgatgggactgttttatgggtaagtaaattcaattctttgtctagagttctgcctcaaccactgtatcttttgatcgaatcagaccaactagaggattaacctttttttttttccaaaggtccatatatttagtcaataatcaatattgcttagtttaatggcatatgtggggtagaattggctgacagctgaaatggaaggtctgtcggtgcctgcagcataagttatcatgagaattgcttcttcacagttaggcagagttcttttctgattctgacctatcaaaatcaaaagttggaaggttctagtacaaattagctatcaaaaccaacttacctgatatttattgctttgttcttccatatttaggcgactgattattcctgcatttgaaactataattgcttctcaatttgtactagttactagtttttgtacattgctctgctgggctgacatttaaatacatggtgaatcaatctcttaacaggctgcgtctttgttcaaagggcaagttcctccggttgttgctttctccctaggatcactgggattcatgacacctttccgtatccttttattatggatgttgactgctttctcgatatcgttttgtgtagtgactggttcttactgttttgctatccaatctacatttttagtaagtttggatttggtctaaaagaaacctgcttgttagacgataaatctcacatgaagctccctgctctcctgttaacatttgtgttatccatgttgtcctccttaacatgcttttcagcaagtgagcaatatcgtgattgtctggacaatgtgctgaatggaccatttagcatcacattgagaaaccgtctacagtgccatgtaatccgtgatgcagcaaaggatgaacttgagactgaggagccaattttagtgttaaacgaagtcacaattgaccgtggaatatcatcttaccttacctacttggaatgctactgtgatagttctttcgttacatgtgtacaaggggatggactgatcatatcaacaacatctggaagcacggcatattcattggcagctggaggatccatggttcatccacaggtatgccctacatcgcatgatacatccttagcacttgagtatttactgattaattttattggattatcttcttgggcatttcctaatcacacccccttagatttctgcaataaatcgtgaagcttttttccccttggttctaaaattgtgtaatgtggttcagaagtttagataagttgcactgaacaccagaatctgatctgtttcacaaacataggctaccctgtactacctgtaattcttgtagcaaattagcaatgtctataaattaaccttttgaggcctagttacaatcatgaaatgttgctatttcctttgtccatctgctcaacataacttgtcgactctattttggtggtctcaaatgttgtgctggtatatgcaggtcccaggaatcctattcacgccgatctgcccgcattccctgtcattcaggcctttgatactgcctgaatatgtgaccctgcgcgaacaagtgccacataacagcaggggccaagcttgggcatcatttgatggcaaagatcggaagctgctgtcacccggggatgctctcatctgcagcatttttccatggcctgtgcccacggcttgcctggtggattcaacatccgatttcttacccagcatccccgagggtctccactggaacctgagtaagtcccagtcattcgacggcccgcgtgattgatcccagctcctggatacagtccagtgtcagagttgagagtttcagctggccatcagaagagtttcccacgagtccagctaacaccgagcggataaatgtacctagcagagtttgttgcttgttaccattccatatacatatacatatacatatacatatactagaaggctgctgcgtgtagatttggggtaagtactggggactgaagaatgaatcgaaatagaaagtatcgagaatacactgtgccatgatgaatgtataacagtagatgtggcaggcaacatatactgatgtgcactagcatctgaagtagcatgggagagtagataccggtgacaagtcatcgaagtgtaaaaacacaacatgtatactggtatatatatgtacccccatgatctgaatgaaataatttgaccatggaaaggaaaccctgcgtactctgctgttacagtttggtgttcatgcaatccgccaattgagggtgtggagcagtggaagcttcactccagtttccacaaatcacaactgatgca

SEQ ID NO: 27918 - DNA, 6222 bp, Oryza sativa
aatagaaagtatcgagaatacactgtgccatgatgaatgtataacagtagatgtggcaggcaacatatactgatgtgcactagcatctgaagtagcatgggagagtagataccggtgacaagtcatcgaagtgtaaaaacacaacatgtatactggtatatatatgtacccccatgatctgaatgaaataatttgaccatggaaaggaaaccctgcgtactctgctgttacagtttggtgttcatgcaatccgccaattgagggtgtggagcagtggaagcttcactccagtttccacaaatcacaactgatgcatggatggtgagagcaacaacgcatccctgatttgaacccgtgcgtgcacggtcggtctcggtcagtgatacagtgatacagcctcagttcccgtgcagtgtcgcgttccggcgagagttggattccgagtggccggcgaccccatccggcagccaccccagcggcggaggaacgtgagctcttttgttgctttctatctgtccaacctaccccccctcacgggccttgcccacgccacgcacgccaatccaaccagcgtcccatttccctcctcgtctccccccgcgtccacttctccactcccaccaccaccatgcaacgcagccgctggcactagatctcccacgaccacctcgcctcgccaccatatctgcagctccactcccctcctcctcgttactgctgaaatggcgacgcctatcgcgttactgctgttcgtgctggtggtggcggcggcggctgacagtacgatgccgatgccggtgaacgaggaggtgctggggctggtggtgttcaagtcggcgctgtcggacccctccggcgcgctggcgacgtggacggagtccgacgcgacgccgtgcgggtgggcgcacgtggagtgcgacccggcgacgtcgcgcgtgctccgcctcgcgctcgacgggctcggcctctccggccgcatgccgcgggggctcgaccgcctcgccgcgctccagtcgctctccgtcgcccgcaacaacctctccggcgagctccccccggggctctccctgctcgcctcgctccgctccatcgacctctcctacaacgccttctccggcccgctccccggcgacgtcccgctcctcgcctccctccgctacctagacctcaccgcaatgccttctccggcccgctgcccgccacgttccccgccaccgtcagctttctcatgctctccggcaaccagttctccggcccgctgccgcagggcctctccaagagctccttcctgctccacctcaacctgttcgggaaccagctctccggctcgcaggacttcgccggcgcgctctgaccgctctcgcgcatgggcgccctcgacctctaccacaaccagttctcaggcaccgtcacccccggcattgccaacctccacaacgtcaagaccatcgacctcagcggcaacaggttcttcggcgccgtcccgagcgacattggcatgtgccctcacctcagcaccgtcgacataagctccaacgcgttcgacggcaagctccctgactctatcgcccatctcggctcgctcgtatacttcgccgcgtccggcaaccgcttctccggggatgtccctgcttggcttgccgacttggcggcgcttcagcacctcgatttctccgacaatgcgctcaccggccgcttgccggactcgctcgggaagctcaaggacctcaggtacctgagcatgtcagagaaccagctctccggtgccatcccggacgccatgtccggctgcacgaagctcgccgagcttcacctgagggccaacaacctcagcggcagcatcccggatgcactgttcgacgtcgggctggagacgctcgacatgtcgtcgaacgcgctctcgggcgtcctgccgtcgggctcgacgaagctggcggagaccctgcaatggctcgacctctccgtcaaccagatcaccggcggcatcccggcggagatggcgctcttcatgaacctccgctacctcaacctgtcccgcaacgacctccgcacccagctgccgccggagctcggccttctccgcaacctcaccgtgctcgacctccgcagcagcggcttgtacgggacaatgccgagcgacctgtgcgaggccggcagcctcgccgtgctccagctcgacggcaactccctcgccggccccatccccgacaacatcggcaactgttcgtccctctacctactgtaagtcaacaaattgctaattacatttacaatatcgtcgttgcgttgaggttgaagacgaagacgacgaatcgcgtgacacgtttgatcgatgcatcgggtttgccatggcaggagcttggggcacaacagcttgacggggccgataccggtgggcatgtcggagctgaagaagctggagattctgaggctggagtacaacaacctgagcggcgagataccgcagcagctgggcgggatcgagagcctcctggcggtgaacgtctcgcacaaccgcctcgtaggccggctgccggcgtcgggcgtgttccagagcctcgacgcgagcgcgctggagggcaacctcggcatctgcagcccgctggtgacgcagccgtgcaggatgaacgtggccaagccgctcgtgctcgaccccaacgagtacccgcacggcggcgacggcgacaacaacctcgagaccagcggccgcggcccggcgtcgccgaggaaacggcggttcctgagcgtgtccgccatggtggccatctgcgcggcggtgttcatcatcctcggggtcatcgtcatcaccctgctcaacatgtcggcgcggcggagggccggcgacggcgggacgacgacgccggagaaggagctggagagcatcgtgtcaagctcgaccaagtccagcaagctcgccacgggcaagatggtgacgttcgggccgggcaacagcctccgttccgaggacttcgtgggcggcgccgacgcgctgctgagcaaggcgacggagatcggccgcggcgtgttcgggacggtgtaccgcgcgtccgtcggcgagggcagggtggtcgccatcaagaagctcgcgacggcgagcatcgtggagtcccgcgacgacttcgaccgcgaggtccgcatcctggggaaggcgaggcaccccaacctactccccctcaagggctactactggacgccgcagctccagctcctcatcaccgactacgcgccgcacggcagcctggaggcgcggctccacggcaacggcgacggcgcgttcccgccgctgacatgggcggagcggttccgcatcgtggccggcacggcgagggggctcgcgcacctgcaccagtcgttccggccgccgatgatccactacaacgtgaagccgagcaacatcctgctcgacgagcagtgcaacccgatggtcggcgacttcgggctggcgcggctgctgccgaagctggacaagcacgtgatgagcagccggttccagggcgggatggggtacgtggcgccggagctggcgtgccagagcctccggatcaacgagaagtgcgatatctacggcttcggcgtgctcatcctggagctcgtcacggggcggagggccgtcgagtacggcgacgacgacgtggtcatcctcatcgaccaggtccgcgtcctcctcgaccacggcggcggcagcaacgtgctggagtgcgtcgacccgagcatcggcgagttcccggaggaggaggtgctgccggtgctcaagctcgggatggtgtgcacgtcgcagatcccatccaaccgcccgtccatggccgaggtcgtccagatcctgcaggtcatcaaggcccccgtcgctgcatcgtcagccagaatcgaagctttctgaattctgatcgatctgacgacgccacatcattactcctactaaaccacagggttaatgattccaaatcatcgaatcgatcacttgcattgcattgcatgcatgcatccgcaagtactacgtgttccctagtgcaaaaattgaaaggtctgagcagtaggcagtaatagtagtacgtacaactgttcctgccgtgctaattttctcagggtctttttttgtctctgcttttggatgtcagataaatctcattattattacgtggtgccttgttcgatctacacttctacagttctactactactctgctactgcaagtacgtgacccattactgctgcatcgtttctaaccgttcttaatactgccattggaccattggtgcccagctctggatggattctgtacatgcaacgcatggaaatatgctcacttgtgactgggctgagttgtaacaaagttggcgtgttgcattgcgcccccactacttacatatggacacggttccatctgggagttaatttgtttgtgccatactgccatagttgtcacattagcttagcctgtggttgacgagatgcccatgacttggagctgcatgaggcatgtgagtgcacagctaaagtgtgagtgaactcgggggtccactgcacaaaaaagcatgagaaattgagaagttttgtggataaataaattaatcctctcgcgcacacatgagccctggatatggtcttggaaagaaaataatggaggttgatttggcaccattgataggattggatcttggcattggacagatgttcattgctgcatgcgtacgttttccctttggtgcaggacattgggtgctacgtgacaaactgaccgagtactgtggtagctatcgctctttgctggtgtcatattatatatatgtttctgctaaatctggattaactaatcgattaatcaacttggtttcaagtttaactaacacatggaataaaaatgtcacatcaatgcgttgtataaggccgtgcaggtcattctcatcttaccaatgaactgcgagtctgcgaccccgtgagtgcacagtttttgtaagctgcaaccaatttggtactactatactactattcctacatgtcaaaatgtgattttgcttgtaacataaattttacaatttgggggcacacagttcagatttccgcctttcacctttttttttttgacctgtcagtttactcttttgacgtgtcagttgggtagtttactggtggccccgtacctggaaagattatttggaatgtgaccctacccagctgcactgcttgtacaggatggtcacgtccaatgggggtcggagattaaactccgaacccctttgcctcagctgattatttcccatccctttacggtttggtagctgaaatgctgaatgatgtatgcgccgttgtgttgaaccctttcctaattacaaactgtatcctatacgtagtgtacaacatatgaacagaaagtcagaaactagcgttgtagactacttatatgctagtgcatagatattgtcagtgaatggtgataaatcaagtctagggccatctcaattagcaccttaatttgctgaatcgctgtgaacaaaacaaactgatgcccggttgccaggtaatattgatgatgatctctcagtatgttctgctactatggagtataccacacgttctaatgttttttcatagcccagatctgtacaaagagactttgcagcaataattgatgaaagtcgacaaatacgaagcaacacagagacagaggcatctgcaagtcttgaagctatacacaaactgatgaattcctacgcataaaaacacgtccttactggcaaaaactgttggtttctgaagcacgagaacgacaggagaaatggaagagaggatgactgcatttctcggtaccactgccgtaagagtgaattcaaatgaagaacaaaacatggatcacttaacaagaattctcactgaaatgcagacaagagagtaatcccatatcgaagtgccactagcagtaacacttaacgaggcggttttgtctgatcttggactgtcttgttgttccttgtccatatgctgtaggcttttcattcttttcggggtgagagtgatgtgtccaggagtagagccttagtttaaccaaccgcatcttccagataaattaccaactcttgtttgattttttttttgagggcctgatttgaatttcgaactcgaattgccttctccattctcctagccatcaggtctctctctttttgataaataatgctgtagcagaaatggactgaccagccaactgggttcatggtttgtttgaa

SEQ ID NO: 27919 - DNA, 2799 bp, Oryza sativa
  unsure (1)..(2799): unsure at all n locations
gctcggtacccttgcttggggctgtttctgtttgataccaaataaccaaaacttgccctaccaaatatttgccaatttaaaatagtatctgctagatgtttgaattggtgtcaaattttgccaaaactaacacaactgatgcaaccaaactctatatgaaaacttgttcagtaggttgggcattgaaccaaataacggccctttgctttcaacatggcacataatttgcttccggcccatatgaatgttggcagcccacatatatatgggtcgtcctacaacagtgcgaggcccatcaaatcatgccctccctacaacaccgcgcgccacgacgcccactgcaccgggtcagcccattgacgcgacgcggaatcggagcgaagaaattcagaatccacgggccgcggtcgtcacggcaacatccaacgggaagtgcgcgtcacgtnccaccggggcacgcacgcacttcgncgncgncaccaccaccaagggtctaggctccaacccaggcaggcgccgcccaccttgacgaggaatcacaagaatccctcggccgaatcccgtggattccaagtttccaaccattcggcgggcggccgcaccaccattccacccgtccacctcgttgccttcgccctctgtctcccggtcttcgcttcccctcgcatccgcgtctccaaaaacccccaactttgcactgcaccgaccgcgccgagaggagagacgagagcccccgagaccgcgcgccgccatggccttccactacgcagcaatgccctcctcctcctcctcgtccctttcgggcgtctccccccagcccccgcttcacctcccccgtctccgatcccctcaccaagcgtcccgccgcctctccgcgctccccttctcccgcgcgctcccgcttcccctccgcctccgcctccgcattccccgtccccaacttcctccgctgcccctcgcgttctcccacggtgggggcggagataacgatggcgacgataataataacaatggcggcggagatggcgagggggatggcggcgcgcccgacaaccggagggaggcgctgttcgtgctcgcgcaactggggaggaagctcgagagcctgccgtccgacctcgcggccgccgtggagggtggccgcgtcacgggggagatcgtgcggcgcttcgctgagatggagggctcggcgctgctccggtggctgctccagttccaggggttcagggagcgcctcctggcggacgatctcttcctcgctaagcttgccatggagtgcggcgtcggcgtcatcgcaaaggtcccatgacgaattctccctctacgtacttctattttggcatcattgcactgtgttatgttgccaatctgacgttttattcatgctgctctcgttgtttagactgctgcggagtatgagaagagaagggagaattttgtcaaagagattgatatcgtgattgccgatgtggtatgcttctgaaagtatttctaacaatttctgacaataaaacaaaagaatctagctcgatgtgatttcacttgtttggtttacattgggtgttactagaacaaccacttatttagcaaataattaccatgtggtataccgcttcatgttcagatgactagtactctaataacatatacatcatggaatttatttattgacctcgctttgtaaattagtcgctaagatcgttagctgatagacctttttttaaaaaaaaaaataatcatatgctgagtattatgttatcaggaactaataaagctggtgatctaaaccaaatagacttgaaaaaaaaatcttataatgtggtgatgtttggttttggaactatttctgaataatactaatagatactatgtggttgattaactgaattcagcattgaggtttgtactattaagtccatgtgagtaccacacctgattctagttgctattgaccatgagcgaacctatttttgctagcctaattttagtttaggaagagagtttatctcatgccatgggttcaattttactttctttctgaaggtaaatggataatgaaatttgaagttttttttttgttatgatttgtgaaatctaattttgtgttgcttctgatactacccatacaggtcatggcaatagttgctgatttcatgcttgtctatcttcctgctccaactgtatctctgcaaccaccacttgcaacaaatgctgggcatattgctaattttttccacaattgcccggataatgctttccaagtaacctaaactttctctcttttcatctgagtagaacattcttcctagaatcctccatgttttgctaaaaacacttcatgccaactgttctccagattgctttggctggaagatcatactcaattctgcagaggctaggggctattctggtatgcagttcttttgttgtggttattatgatacttagaccgtcggactcatagtggcctcagtctattcagtgtgctatattgatcaactaatgctagtggcttctttgcagagaaatggtgcaaagcttttcactgtgggaactagtgcttctctggtaagcttgccattttggtttgctgctacatcatatgattgtgatgatcatgtgttagcaacctcttttgatttgtgttagggtttgcatttgtttttattttctttgagcaggaatcctgtcatgaagttttaatcctgtcatgaagttttaaataaaacatttcagcaaggcaggaataaccaatgcgtcctggtgttttcattatgtctacctatctctgtcgttaag

SEQ ID NO: 27920 - DNA, 4859 bp, Oryza sativa
  unsure (1)..(4859): unsure at all n locations
ctctgtcgttaagttttaattctagtgagtctgacaaagtatatgttgcacaaaagactggcagagtactgaggctgagatctaacctttttaaagaacagggtaactgttaactcatgtggatttctttcacagttaactgattttctgtagctcctagttggttctaaactgaaatttgaagcatgaaaactttacaagtgggatatattgaggaaaaaatggcattcataatcggtttcctagggtggctagttcaattgtttcactatgcaggtgttgttgccaaaaataaaaaagatcagtgatatacgtttctgttttggatggcagtaatctatcgacaccttttacccttctatccataagacaatttgttatgcatactaatcttcaatccttccagattggcaccggtgtcacgaatgcactgataaaagcaaggaaggctgttgacaaagagctagatgacgaagttgaagatattccagttttgtcaactagtgttgcttatggtgtatacatggcagtatctagtaacctcaggtaaacattatcttcaaactactcaccatttgtagcatacttaagtcatgctaaacgtgtgaataaatgtcctgtcgttttgttactaagggacctggaggacttaccccaccgttgaaattgttttacctgtttctctcttcaaacaggcaaaccgttgtagagattatacatgaacaatccttgtgcagataaacagttgcttcttttttaaatggattattttttacaacaaaaatcatattcatcaccaggtaccagattttggctggtgtaatcgaacagaggatgctggagcccctactacataaccacaagcttctattgagtgctctatgctttgctgttcgcacgggcaacacattcttgggttctttactgtgagtaatatttacctcgcatgaagtttaactcctgaccttggggcagtaatgttacttactgatgaacttttgttaccagatgggttgactatgccaggtgggtaggcgtacaaaaggttcaagaagaggcctaatgttggcataccgtaagttactacgatatgtattctacaacgtcacgacattcttctcttcatagggaacatctttactggtaaaggcagaagataggcatctccatatgtcgaattcatatcaacagtgtcaccgtatttttcttcatagcctgcaacttgtaagacttgtctttgtaatatacgagtttttgacccaacgagcactcggagggacctgtttattggttgtctttgttctaggattgtcgtgccttttattttcacttatggggactgttgacagcactctgccggagtttactcatgtaatgttgataaaggactgtcagtctgtcaccatagcattcgtctgaagaaaaacactcttcccgtttcactttgcctaattcgcatctttcgtatggttcgattgattctgaaaattatgcaggatcacacacaagatgaggggtttagcacaagtgtcgtctcaaagatacctttctcctatattgctatttgggccttacacacatcataggctgggccgagggagatagcaagatagcccattaacagcagcaaataaaccctaataaaccatgacagcctctcgatctcctcgtatttccccaaacccttgccgccacgatccagacgtccatcgttcccgccgctggtgcagcagccaattgcgatgtcgtcgtggccgccgccgccgccggtgcaactcagcatgcagttcctccctccccggccggagccggccgccgccgcgcgcacgtncatctgctgcacctgcggcgtccccatggcgcccaacgcggccaacacgtgcgccctctgcatccgctcgcgcgtcgacatcgcggcgggggtgccgcgccacgccgacgtggtgcactggccgtcctgctcctcctacctccacccgccgcggttctggctccgcgccgcgccggagtcgccggagctcatgagcctcctcctccgccgcgtcgaccgccacatcgcccgcctaggcgtcgccctcgccgccgcggagttcgtcttcaccgagccccactcgaggcgcctcatgctccgcctccgcctccggggcgaggtcctccacggcagcggcggcggcgtcacgctggagcagggccacgtcgtggagttcggcgtccacgaccgcctctgcgacgcgtgcgccatggcgagagcgcgggccgccgagccccccgaccagtgcggctggtccgccgtcgtgcaggtgcgacagcgcgcgtcgcaccgccgcacgctgctccacctcgagcagcaggtcgtcgcccacggcgccgccggcgacgccctccgcgtcggcgcggcggcggtggcgggctcgacttcttcttcgcgtcgcgctcccacgccgcccgcctcgtcgacctcgtcacctcgctgtcgcccgcccgcgtcgtcgcgtccaaacagctcgtctcgcacgacacgagtagggccggccctaggggggtcaggccgtgcggccgcccgaggcccccaaaatctagggccccccttatatacacatataatatatatactacgtactatataattttagtctatggctatggatctatattaagtttgacagctaaatagcccaatatagaaaatgaattttagtccatcgtcacgcctatttcagcgaagccgaagcgatcttcatttgactcccgttgcttcgcctcgatcacatcacgccacttgcgtcgtgccgcctcaatcacgtcacgtcgctcgctgctcctgcactctcggcgacttctcgacttctcggcgtctcgcaaacggaaacaagtcggcaaatcgtggctcgccagtagccacgctcgtgtcgatcatccgccgatcgccttctcttctcactactgctatttatttctctttgaagttttaaaatgttatatatatagataattttatcacatcgaatattaaatgttgtatgactatataaatatatatattagtttatgtgtatatatataggggcctccatataagtttttgccctggggcccaaaaacctaggaccggccctggacacaaggcacacctttgccgtggagctttgccggtgtgccgcgacgacctcgtcttccttcccaaggaggcgtcccgcgacctcggcggcctcggccccatcgtcctctgcgtcaaggtcaccaacgcgctcgcgctgctcgacacctccacgctccgcgtcgtccacctcggcatcaaggagtacgacaggtgcaggctcgagcccgcgctcaccagccggcagctcgtcgagtacgtcgttctcgacgtcgaccacgagccggagccggccgccggcgtcgcgtacgcgcaggtcgcgcgcgcgtcggacttgggcaagaacgacaccatcttcaccgtgaggacgcacctcggccacgtcctgaacgccggccaccgtgcactcggggacgacctctacggcgccaacgtgaacaaccatgacgtcgagagccatggcttgccggatgcagtgcttgtcaagaagatcaatgagaagggtagtactcgtaggcagctgcaggatggcgacggctgcaggagaaggaagcgagacggcgatgagatggaagagatcgccatggggatcgggtgcattgatctgaacccgcctgatgagaaggagcttgatgagttgctcagaggacctcacaatttgagggcatctgcagtcacttcaccgtgcctttgtcaggcccacatgtccccacatgtcagtgacaatggcacgatgaagtcgactacggaggatctcaatccaatttgaggctactgctgctacatatagttgcgtttattttctactaggaattggaaggtcctttttcctttgtgaacgactattaactttcagatataatgttactgaattggcaagctataagtgcaaagagagattcagacgagtgaatgtgcagtgaaattgctagaatgaatgcattgttagcagattgccacaaatgttttgcaagatgtcgcagggttatattggttgattaatttaagaaaattttattccctaataaggaaatatggacaactgatgaagctaaaaatgataaatcaactaccaaaaagatatgatgggtccgatatatgaagattatccttatatgcattcatggtgagaatgtgtttgattttaaatggatatccttatatgcattcattgtgttgtgtttgattttaaatggatatgaagcatttttaaagtaggcaaactttgataatccacttacagcaaaatctgatgggtccgatatatcaagattatccttatatacactcacggtgaggacgcatccgatttaagatgtgcaaccagaattaattcatttgttaatgcactcccactacatataaacgtcatgttagcattcacactattttcactcctagctagttggatttcccgcgcaattttacatggctatgtaatttgaacagaattatgtttgctatagtttacatacaactttaccactcaatcttcatctttataaattataacctatatacctaagatgatcaaattgtgctattatttttctttttattcaatataaacatggtaatatcttaggcacttggagtaaaacatggttccatttaactctattttaataatataaccaataaatagatggacactcatatattttaacgttggatttactctgagacacatcatatataagtttttggggttggaatagaaggggagtagtgatgtatttaagagagaaatagtgacttatat

SEQ ID NO: 27921 - DNA, 3446 bp, Oryza sativa
  unsure (1)..(3446): unsure at all n locations
cggtagttttcaagttttcactacatatgcggtttgcactgtatatttttccgccttatatagtggtgtagagagaaaaccttatagaaactagaaaaacaacaagtgtgatgatatagcatgacaacacataagaaaggtgtaatgaaagaggatgagagggtgacggcagctctttggcaatgcaagcagcaccatgtgcaggtatatataaaatggtgcggggcagatccaagaaaggataaaaggaggggctaaacaaactatacaaaactatagcacccctcttctaatggatatataataagaagtggaggctcctatggttacaacgccggcaatgggggtttaaggggtcaccctaatgggcgactagtcgcgtggaggcacagacgcgcgacgagcgctcagtctactagtactactgactactcttctactacagtactactagtcttactagtttactactacagtactactactagtagcactaatactacactactattactactactgttatactattaatagtattactactataaaatatatatatttttatatgtactatatatttttttatgtataaaaaaatatacacatatacaaaatttgtatacggcgtgtacaaactttgtatatgtacatattaaaaaatgaaaaaacaaaaaaaaacatcatgtatattcgtatacaagtatacaaactttgtatacgatatatataaagtttgtatacacatatacaaactttctatacacgtatacaaacattttatacgtatccgcatatgcttaaaaaaccgaaaagaaaaaaacagaaagaaaaaaccggaagaaaaaaaaacaaaagaaaaaccgcaaaataaggaaaagaaaaaaccaacggaaaaaaccagcgggccccaccgtacagacgcggctacgtgctgccacgcagccccctccgcgcgcgccacttgcctcgccgcgcgggggcgcgcgcgcggatgattgccttttagcccttttggggtttgagaccccgtatatctcatggtggatccgccactccgtaagcatgttgtgggtgctgaatggtgagattggagaaggggattaatagcagctagggtttaattcttcttcttttttttagaaaactagcgtttaatttggaggagcagtgagtgaaggttgatgggccagagatttttctgttttttttcctcaagataatatgggcctggcccatttactaaggttggtggctagggtttcgaggaaaagatggtgtagtgaaagaggacgtccgtctgatgttgatccaacggctgcaaattagagtgggtgatcactgaacatgccagttataaccaagacaaacctctttaaatttcagcgacgcgctcaaacactcacctgcgccgcaacagtttcagacacgatctcgatcgtgtctgccatggcggcggcggcggcgcctgactggtccatgctcccctccgaccccatcgtccgcatcggcgactgcctcctcgccgccgacgacttcgactgctacgacaacctgcgcctcgtctgccgcatgtggcgctccggcaccgacgacccgaggacggccgacttcgaggacgcccgcttcctccccaagaagctggccatgctcgagctcgacgtcaaccccggagaccaccgcgccgccgncgtcgccacgttcgtcaacctcgacaccggccgcttcctccgcaagcgcgtcccgggcctccgcggctgcttcctcgtcgccgtcacgtccgccgccctcgtcgtgctctccgacgcggcgccgccacacgggacccgcggggaagggtcgccgtttcagggcgcccatccatgcggangangaggtgagggangttgccctgaagacgttcgcgctcatggtgttcgtctcgtggtaccaagggaggtccgtgaggtgggttgatcaggacaccgagggcttccccgatgtaatggtctatttccccgacaatttcatgaacctgacgcccttcgccgccgaggtgtacgtcaccaaccgtggatccatcgtatccaccgtcctcctcaccgncgncgacgaggaagaagaagaagaagaaggtgagcagcaacaaggtgttcgtccgcaaccccgcgccgcggacaccatcgcgatgatccccatcattcgtatgccaccaccagcggtgaagctgtacgcctacttccaccacctcgtggagtctgccgccgagctgctgctcgtgagcgtgctgtggcgcgtgcacatgaccgcacaaggtggacaccgtgaacaaggtgttcgtcccggtccggagcctcggcaaccgctccctcttcgtcagccaggccaggagcttctccgtcgacgccgacaagttccccaccgtggaggccggatgcgtctacatcgtggagccgggcccggcgacgtacgagcgtttccatctcgccgacgggaggctggaggaggccataccaatggtgaacaggcgccgtgccgctgaaggagaaagctgcgtccttcctctcaccctggagcaagtcatggtgaactactgcgtcgacacggagaattattccgagctcgagatcgcgctcgacaccgatgatgacgaagagttcttcctgcctgaagctgaaggccacggaaccaactgatcgatccagatgctggtgatcaaaatatatgggtgaaaattaagagggcttacgatataattttcagctccaactatatatcctgatgatatatgatcctctctgtagctagtctctacatttcatgtaattttcttcaattgtattccttctctgttcgatgacatcgatactgtgcgatctcgccttgtttgcttttgcatccagaaaaacatgtcattcgcttaatccgtactatttaattatttttttagcttcgctgtgccttggtcaaattaatgttacaaaaaagaagttctggtatggtgtattggtgttaccatgactttgcacttcaattgcttatgtagtaatgtaaatctcgtgatctagcgaagctccatgagcatgcaagatgtactacatccgtccctagatataagggatttttgttgaatgtgacatatcctagtacaacgaatttagacaagctttctgtccaaatttgttgtactaggatgtatcatatccaaccaaaatcccttatatttagggacggagtgggagtagcttaattgggtgaagtaagcagcagtcaggccgaagcgcggctaagcctgccaatggggcaagatccaccccatatccaatccactagccatcccataaaatccaaaccagaccaatccattttcctcgtcagtccaaaccgaaccaacccattccaattttatggtctcaattcactttcaaaaccatttaaacccacttcaaatccactttgtcgatcct

SEQ ID NO: 27922 - DNA, 17391 bp, Oryza sativa
ttatttttcataccatctaaatacttataaactttaatatatgatatatcaatctataaatatgtgccttcaaatttgatcatcataaattatagaaaaacaaaaagtaattaaactctaactcacatatatttgctaatagttattttcttaatactgtaaaagtcatatttaaatttgcatattttgtgaagtgacacataaaatattaatctatctttttttaggaaaaaatattaatctatcttgctattttatttttaaacttttaataaactagtatatatataagaaacgagaaataccttcctgatagattataagagtttcccgtttcatgatcactctcttatctcttagtccatctaaaactctaaatatatattccttccgtcctaaaatataagaaatctataattgaaagtgacatttcgtcaagctcaagctcaggacgaaggccttcttctcccgtgagaacactatcctccctccggtcccatggccactcccggtcatcggcagcatgcactgactgctcggctcgctgccgcaccacgccctgcctgcgccgtcgagttgctcagcccaaggcgcgcccgctccttccgccgcgtccgcgaggccgagccggcgaggctcgtgcgcgccgtcgccgcgtccccggcgtggccgctcgtgaacgtcgtcgccggcgagcatgtcgcggccatgatgaccgccgtcggcgcgcggccggtgcccccggcaggaggagtacctggaggagctgggcaaggtggcgaagctcgccgccggcttcaacctggtcgacctgttcccggagtcgcggctcgtgcgggcagcgcaagcggcccacgggaagatccacagcatcatggacgccatggtccaggaccatctgaaggcgatggaggagcgcagagaggaagtcgcagatggcgtcgtcgacgacggcgacggcgacggcgccgatagggatgaagagctccttagcatcctactgaggtttcagagggatggtgggttagggatcactctcacaaacggaaaccatcagcgcgacagtgtttgtaattaattaagcatgttaccatctcactctagctcatttgtcaatgtcacccgcgaaaggtttgtctcactctttttgtattttgcgggaacgtcctttttttcatgctagttaaatagttataaaaaaaagcaaagatagtttgatatttgatatatcacctcacaagtatatatacaaattcaaatttgacttcttaatgttgtaacaaaataatgtaatatgatttaatagtaccagataataacttctagctagtctagttttgtaaagtcctgtgtagataccatctcatatctataattttagggtatcttggctggcggctctgatacaacaactacaactgttatgtgggctatgtccgagctattgaggtgccctcgcgcaatgcaaggtagaaacaaggtggatgaggcatacatattggagggtcccttcaatattacatgcaattggtcatcaaagaaacgttaagattgcaccttccattccctttgcttttcccaaggttatgtaccgaaacatgcaagataatgggatttgatgtacccaaaggaacgatagtcattgtaaataattgggcgattagtagggatgagcgatgctgggaagatgcggaggatttttgacctgagaggtttgaacatgacgataccgattataatggtacatattttcagtttctttcaggtggttttggtcgaaggatgttcccagatttcatatttgcacaatttaacatcgagattgcactcgcaaaccttctataccatttcgattgggaattgccatgtagtgaaaaccgaatggagttggatatgactgagtccgctgggttgacagcttctcggcttactgatctttttggctaaaggcaactcccatcgttgccacagcctggattgttggatttcttgatatttctactaggagctagctagctctacttgtgttttaagaaagaactttaattagcacttggtattttgtaacccgttataataagtcatacattgtgttttttcgactgttatttttctggccatgcatgcatgcatggctacgactagaaatatcgaccactcttgctagtagccacgattatgtgccacagccacagaaactaggcatgcggctgcagcaactgctgcaaaaaatcgcagtcgaacaatgtcattatcatgtggatgtactatagaaaggtatcatcttttttgagggaaaataaagaggcgtcatcatccgtaacattatgactataggacccatttagttatgcatcaccatcatcattttcaataagtgcatagagatgagttgtataacacacgttaaaccagtgtaaatcaatcatataggtacatagtgtgttagctccggccgtggccattttgacatgcagttttatcttttactgaaccttttgtagttttgtcagcagttggatgtgcatgcatataagtgattgcatgggtcgtagctaatgggtgctacaacatgagtctactccagggtttatattttcgttttcactatttctatcggtccgaaatagttttatttttttaacaaaatttgatcaaatttgatgaacaaatttttttcaaagtctaaaaatttgaaaaccccaaaaaaacatttggccgaaatcatttcttatcgcagggtccgataaacccaaaattttggaaaactcaattcaaaattttgaacccttgtctagagtctagaccatgatctagaaatcaaacgcatgcagtgctagaaatcaaacgcaacaaacgcaagaatatatttaaatttggcggttgtttttttttaccgccaaagaaattagttggcaaaaaaaaatacggattcttgtagtagctagcactactacgaaaaggagtttttcgtgcggtcaaaaagggtttagcgtgcgggggggggaggggggtgtgaacttcacgcacccaggtgtttgcaaaaattgctatttttgtgtgcgggtggcgcacccgaatgcgaaaactgattttcgcgtgcagggtggttaggtcgcccgcacgcaaaaataaaatccaaaaaaaacaaaacctaaccctaaagctgtcgtcgtcgccatcacctcctcgcggtcaccgtcgtcctcgccacgcctcctccccaccgcccgcaggccgctgccagcgctgcgccggccgccaccgccgctggatccacgcggatctgggcgggggatggccgtcgccgccggatccgagcgggggccgatcgccgttgcccctcgccaccttccgcatgcgcccgccgacgcgagcacgccgaccgccgcctcttgcctcgctcgccgccacgcccgagcggccgttgagccgctcaccgccagtcccggcgccacctcgtcggtgtcgccaccgagccgcggagaggagaggagagaaagggacagagaggagaggagagagagatgagtggaaataaaagggagagaggtgaaaaatttaaagtgaatgagagggaaaagaggtagaggtatttttgcgtgcggacctctgcgaaaataatcttattttcacatgcggtccatttaagaggattgcacgcaaaaatcgatttttccgtgcggttctattaaagagccgcacacaaaatggatgacgattttcgtagacgtgacctgttatggtctatctgcaatctaaaaaggttcatgtacacaggaaaatcgtttttgtactattgtagatatcattatatattgctccatcccttatcttggattgatccataccaacaataattgtcgtagcctgtcggatgaatccatacttgaaagagaaacatagatactatgtgcagaaaatgatatgtcaactattgcatagtaattgtattattgtaagcacaagttaggtcgattaacgcaataatggacccaaatcactgataattaagaacgaacgtgcttttgtgcttgatactgtgagtcagtgaccctaacatgcatgtacactgttgtttgttgagagcaagacaaacacgtctggattaaactagtagcaaagcaagtatcacgaggaccatatagaattataaatcgtacgacatagctatcaaactttctgtaaaaaaaaaaagaagaagacattgctccgaaattatttttcaccgggggaaaattcagagtactagctagtacgtgtatatagatcgatatatatctatagccactgcaacttccaactatatatatatgcagcacagatcgagctcacaaacaataaagatgataaaaatggccggaatagtggatacagcagcattctgcaccttgctgtgcctactcctcaccctcgtggtcttcaagctcaagacggcgacctcttcccggcacaacgccggcgtgaacctccctccggggccatgggcgctgccggtcatcgggagtatccactgcctgctcggctccctgccgcaccacgccatgcgggagctctcccggcggtacggccccgtcatgctcctccgcctcggccatgtccggacgctggtgctgtcctccccggaggcggcgagggaggtgatgaagacccacgacgccgcgttcgccacccgggcggtcaccccgacggcgagcatcctcacctacggcgcccgcgacatcgtcttcgcgccgttcagcaagcacctccgggagctccgcaagctgtgcacgctggagctgctcagccccaggcgcgtccgctccttccgccatgtccgggacgaagaggcggcgaggctcgctcggtcggtggcaacggcggcgccgcccgtcgtcaacgtcagcgagctggttaagatcatggcgaacaacatcatcatgacggcaatcatcggcgacacgtgcccgcagcgggatgagtatctcgaggctctagacaagaccatggatctcatgaatggattcaacctgatcgatctgttccccggatcgcggctggcgagggtgctcggtgcccgatccctgcgtgcaacgaagcgggtgcatcagaagctccatcaaatcacggatacgataatccaaggacatgaaatcatcaaggacggcagcgttggtgatgacaccatacaagaaacagtaggaacacacaatatgcatgggcatggccataagtgtgaggacatccttgacgtcctgctgcgatttcatagggacggtgggcttgggatcaccctcactaaagaaattgtcagcgccgtgttgtttgtaagtactccctctgttccaaaatataagcattatagcataataacgagtcaaatatttttaactttgaccattaatagaaaaaaataaaaaagatcaatcacgtaaaattaatgttactagatttatcattaaagaaactatcatatatgtaattttttttatttaaaatatcttattttatagatattgttagtcaaattagtatctcggagaccgtgtcagagtccataaatccttatattttgggacggagggagtactcaaattcaaacttatgctcaacctccattcctacaattacttgtgtcgtgctatgtggtaatggatcatatacgtaatatctctaggagaatatggttgtagtcccactggctaagaatatttgattatttgattgatgtttagtacaagatttagtcgtcaaatacttttcactagagggagtatgcatcataattacaaagtttatggagtattttttttaagaaagtgtaaatttgaatttatcaggatcttttcgctgctggctcagagactacatctacaacaataatttgggccatgtccgaactcgtaaggactccccatgtgatggagcgagcacaatctgagattcgtcaagtccttcaaggtaaaaccgtggttagtgaagccgacatcgaaggccgactccattatctacaactggttataagagagactcttaggttgcatcctccggtaccatttctcataccgaggttatgctctgaagcaaatagtaagatcatgagatataatatacctcagggtgctatggtgttagtgaacatatcagcgattggcagagatgagaagatttggaaaaacgcaaatgagtttaggcccgaaagatttaaagatgatatggttgattttagtggtaccgactttagatttattcctggcggtgctggacgaagaatgtgcccaggtttaacgtttggactatccaatattgagatagctctcgcgagccttctttaccactttgattggaaattgcccaatgacgcaagctcatgtaagctagatatgagagaaacgcatggagtcacagcacgtcgtcgaactgagcttttactcaaagctactcctttgtacacataattggattggtccataaaaaattcatgtacgctgtgaagacgaagaattggtctcttaataaaccattgccaattaatgtttgcctaaatttgtttctatcagaactgaaggataattcatgtacatccgttgttttgccaaccccttgtcacaagtcgatctgaaatctagactctattttgaatgatgagccaagcatgaaatttgcatttccccggtgcccagactttctagattaaggagttgaaacttgtgctcggtgttctttgacattgcgcatggtaggccaaggaagtcgtgtagagtccgctacttgcgaatttccgggtaatctggtctggctctccgatgcctaagtgaacattccggaccgcttcccacaggacaaccagttgttcgacgaggtctagtgtaataggcgagtgtgattccagagccaggtcctgaacctagacgtcctcctcctttccatttcgtagagacctccctctgtttttagagatcgcatagatcagcggtataagttttttgggtcttacttgtacttgtacactaagttaaaaaaactcacttgagacgatataagtttaaaaatttactccttttaattatttaatattagatcattctttaatattcacgtgtttttaaattctttaatattcacgtgtttttaagtactctcttcatacacaattaatcatcatatttggttccgtggccgcagtgacggttcggttcctgtgcatgccgcgcacatgacgaacgaaagttgagaggggatttagctaatcttgccctaatcacatggcattaaatccatgcggtaaaaaagatgccggcgatttaactgatttcgggaaaatctcaaagggctaaacggtatgtgttttgtaaaaatttctatagagaatttgctttaaaaaatatttatttattaagtttgaaatagttagagctcagttaatcatgcaataatagctttaaaacgagagaaatcttgcttctttctttcagcaacaaacgcagccaaacatggataagaacgaatgaacgtccttttttttgaaacaatatggcaggctttattcattcaatataattacatcgttcagtactagagaatcaaggattgggctcatcatcccaagtactctctccatatcttacttttgtcaccaaaattaaggagaaattaaataatcttacatgttacaaaatcattgactgaaagcaagcatgcaaccaatgagtatttagatgacttcttgggttctaatcaaacatttaatttatctcttcatttaagtcttgaatgcataaagactacaaatagaaataatttatttaaaaaaactcaaatgtgaaatatgtctaatttttgtggatgaagggagtacaattttgctttgactgcatcgctctccttgctaaattatgtgctgcttggttcgcctccctattgcaatgctcaattgttatatcttgaaaaccgctccaaattgtagagcaatcatcatataaggccgctgctaaatttgtcgtgaaacctccatccttcattgtctatacgacctccatacagtcttattggataattagtcgattacaccctatgtgttgtgcaagcatcaacccttctttcaaagcataggcatccgccatcggtgcatcaactaagtacggcacatagctgtgggaagcagctaggaatccaccagtgttgtcccttgtaatcgttcacacgctgccgcaccccctgtcctcatcaaaagctgcatcaacattgaccatcactttcccctctggaggcttcatccatccttgccttatctgcgagcttttcttcattgttgctttatatatagttctttgttagtgccacaatagacatagctgatcttgaaggtcgctggatgatctccccgtgtacatgttgccggcgttgccaccaattataccatccggcagtaagtactaattcaaccaatcccacgtctagtgcgtcaacctgctcttctcttcttatgagatgtcttcgatgattactgagcctgaccgatcggtggcaagaaagcgttgtaatttctcctagatgccaagtgatctccagacttctcttgcacggtgacacgtggaaaatatatgtttgatatatatcctctcctccattcagacaaaagggggccgtgtttagtttccccaaaattctcaactttccatcacatcacatcacatcaaaaactttcctacacacataaactatcaacattttctccaaactactaattttctcctaacttcctaacttttccaccatgcatcctcccgattctccgatatatctattctctagggtagctcggcaaggtataaaccccttcaacgctggcgcgccatccaaaaattttaattttccccagcaacacttcaatctccacaaattcttccacagctaattccgtgaagcagtactagcttgcacttgggccctatttagatcccacataaaaattttacgccctatcacatcgaacgtttgaacacctacataaaatattaaatataggctaaaaaaataactaattgcacatgttgcgactaatttgcgagacgaatcttttgagcctaattacgccatgatttgacaatgtggtgctacaataaatatttgctaatgacggattaattaggcctaatagattcgtctcgcggtttattgacggattctgtaattagtttttttattagtgtccgaacaccccatgcgacaccctatataataaccgatgtgacacgctaaattttacacccctgaatctaaacagcccatcttgctgttctactgacaatgataggcagaccgcagaccgaacgtcctttgatcgatacagtgaaactagtaacgcatgcactgttgtttgttgagacggacacgccatctgaattaaagtactatagctacgccaggagcaaattaacaaagtatcatcatgactatataaaattatagacccttaattatgtttttaaggtaagacgtcaccactactaatactctctctacccctaaatatttgacgctgttgaagtatatttaacaataaatcaaatgataagaaaaaaattaataattacttaaattttttaataagataaacggtcaaacatgtttaaaaaagtcaacggcgtcaaatattcaaagacgcggggactattagtagtggtgatgtgcattatcacatcacctctacaactaacatcgggtctcgcaatttataatatcacactatatttcaataagtcctcaataaatattggcttctccaaattttaaaatcatctatttgttcaataagaaaaatcatagtattatttacgttaaacaaatacttattaattgattttataaactagaaactcaacttgtttgccgttggaatgcgcgggtttaggctatatataggcatatggtgctgcaactgcaacttctaaacggtgcagcaagcaatagattgagctctcgatcgaaccagcaaataatggccggcatcatggacagtactactgcatcctactacaccaccttgctgtgcggcgccctgctactcgctgccgtcgtcttcaagctcaagacggcggcagctttttcccggcacaacgccggcgtgaacctccctccggggccatgggcgctgccggtcatcgggagcatccactgcctgctcggctccctgccgcaccacgccatgcgggagctctcccggcggtacggccccgtcatgctcctccgcctcggccatgtccggacgctggtgctgtcctccccgaaggcggcgagggaggtgatgaagacccacgacgtcgcgttcgccaaccgggcggtcaccccgacggcgagcatcgacatcgtcttcgcgccgttcggcaagcacctccgggagctccgcaagctttgcgcgctggagctgctcagccccaggcgcgtccgctccttccgccatgtccgcgaggaagaggcggcgaggctcgctcggtcggtggcggcggcggcgtcggcgtcgtcggccgtcaacgtcagcgagctcgtcaagatcatgacgaatgatgtcaccatgagggctatcatcggcgacaggtgcccgcagcgggaggagtacctcgaggctctagacaagaccatggatctcctcgccggattcaacctggtcgacctgttccccggatcgccgctggcgagggtgctcggtggccgatccctgcgtacgacgaagcgggtccatgagaagctccatcaaattacggaagccataatccaaggccatggaatcaaggacacggttggtgacgaacaccatgagtgtgaggacatcctcgacgtcctgctgcggtttcagagggacggtgggcttggaatcaccctcactaaggaaattgtcagcgccgtgttgtttgtaagtactcaaaatttcagtcttaattatacccaacatgactctttttctacaattacttttggcatgttctgttatagtcttatgtatcatctttgggggaataattgtatatatcgtacaaagcttacggaatgtattaatttaatcgttaggatctttttgctggcggctcggagactacgtcaacaaccatactctgggccatgtccgaacttatgaggagtcctcatgtgatggagcaagcaaagtatgagattcggcaagtccttcaaggtaaagccatggttagtgaggcggacattgaaggccgactccactatctgcagctggttatcaaagaaactcttaggctgcatcctccggtgccaattgttatacccagattatgctctaaaccgaatagtaagattatggggtatgatatacctcaaggtacttcggtgctggtgaatgtatcagctattggaagagatgagaagatttggaaagatgtaaatgagtttaggcctgaacgatttaaagatgatattgttgattttagtggtacggattttaggtttattcctggtggttctggtcgaaggatgcgcccaggtttaacatttggagtatccaatattgagatagcacttgtaacccttctataccattttgattggaagttgcctagtgaaacagacacacatgagctagatatgagagaaacctatgggctcactacacgtcgtagatctgaccttttactcaaagctactccttcctatgcacgattgggttggtccaccaatatgcagatatacagtgtcaagtgtttggtctatgaataaaataatattgtccatatatatttatttaattagttttcttctattataaatggaggataagtatgagttaattaggaattataaatgtggtggctacaatgagctgatggattcgagactttgatgtttcttctgtctgatttgtggaaaccaactttacaacacttatttgatttttccgttttgcgtcgcattgtctaagaaaactagctatttcactttttgcattgagctttgacacgagagatcttaagctcttgttgtaattaagcacgtctccatgctcagagagtcagagagagcggcaatttttgtgtagttttcatggtttcgttaacttgttctcgtgcaaacaccactatttcatacttaaatttaatgctaatatcacataatgtcttggatgtagtgtagaaactatgtctcgtgcaaaacatagtttccttctctttcctcatttattcacttgcaacatcattttttatcctaagtgtcagcttatttaatgctatggacaccatcctagtcattgggttgggaatggcctaaacaaccaatcgaacgggggtgcaaaatccaaaaaataacggagttgctagaaatatggcgccatatgttacaatcgatttttttcagccacttacacagtagttacacctcgtttacaccccacttacatatgtaattagtatgtaattttcgaatttacatatgtaattttagtacttacatatgtaattttgatacttacattgtaaatacactaaaattacatatgtaatttacggacttacagtataaatacatgctgactattttttgatgaaaaatatggcgccataaatatagctacacccaaaaataataataataataataatcccgtactagtagtagctatagttaggcactgttaatacgtccaagtgttggacttgcggcccatgagatcgtggacgatgggcttgagtcgacgcggccgtgctccgggccgggatcacgcggccttgtcgtggtctcctctgatgcttcctactggcccatcacgagtattgatgggccgttcttccatctggatttccccttaggcccggtcctgcttgacaaatgagaaactgataatttagctgctcatctgaaacagctggtacatctgtgtataaactacacgcaaaggaatactccgagtaactaataaaccgatacataatagcgtcgcggctggcgaaaggtgctcagcagccggtccatgcgagcggcgagagaggcgcacgcacgcacgaattcactccatcttgggcgccatgatccaggaccacgtcgtggacatgtagagcaagggcggggcggctgccggtgacgacgcggacggtggcggcgcgagagaaagagtatcttctcgttgtcctgctgcgtcttcagagatgggagcatagagacaacccatactacggaggttatctgcacgacctttttcgtacgtgtcactctcttgtacccccatctatatctatatcgtcctccctccgtcccatgaaaaaccgatattctaataaataattttagatatgttccatgtcaaaacttattgtactagaaaacattacatcatattttagattgatttttatgggatggatgtagtagtccgcatgaatataaatcaggcaaaagacgagttttttctttgaaggagaggattttttttaaatgtccatatagtaagataagattaaatataggcaggtagtgccaggattaaagttttagcatcacacatgtgttatatatatcatgatttggatttttttttctgcgggcttgaaaccacaaccacagcaactatatgggctatatgagagtttatcaaaaatccacatgcagtggagaaagcgcaatcagatatacgaaaaatccttggaggcaaaagcattgtcgaagaggcagacatcgaagggcaacttcattactttcaaatggtgaacaagagactctaagattgcatcctcctgtgccattgcttcttccaaggttatggtctgaaccttgtaaaatcatgggttatgacatacctcaagaacacagcaatatttgtgaacacatgggcacttggtagaaaataaaaaacactggattgatgcaagtgagttcaggcctgaaatattcgaggatgggcatagtcgatttcaatggtttagacttcaggtttcttccttgtggtgccggtcgtaggatttgtcttggtttgatgtttgaactttctgatattgagctcacacttgcgagccttctttatcattccagctggaggttgccaaccagatcatactctaataaactggatatgaccgaagcaaacgggatcacaactcatcgtagaattgatatttggttagaagcaactccttttgttcctagaggctaaaaaaatatgtggttggtttgtgtttatacaattgtactatcttttaaaacttatgaaccatggcgttgcggttggatatcctaacttatatgtagaaaagacatataatacgacgtgtgttttattgcttaaatatgtgaatgtcttttttacatgtgtttttcaagtgtatgtaagtcaaatcaaaactatttactagaagctactccttttatacctttgtccacatgattatgtgggttttaaaatattaacatcatgtgtgatgatatatgatgtatgattggtctttgtgtgatgtaagttggcaataatttcccttgccattttgttttgtgccaatctacaagacaataagagcaagtttaatagtatagcccactgctagctccaaaccatctataattaatgtaatagacaattcatacaacagttgcttactatactattaatatctggtcccatctgtcatacacacattacgtcttgtagtccgtgctgcagctggctacagatctgtagcccgctgctcttctctctcttcctttatctctttaaaatatgtttatagttggcttatagcctgctattgtacctgctctaacctgatttcccctcttcaccttgttgcacacgaataatgtattttcctgatttatctcgaccatattctgtactttaaaatgtgattttaaccaccattctcattagaatgatatagaaacatatcctaaaatgaattatatgtaactctattttctatctggacatgattgacctcacgtttcaccgtcggacggagggagaacgtgaaggcaatactgtaattaacccagaagaacaggggtataatagtctcatactttaaaccctagagcaggtaaatcaactccgccgccgccgtcggcgagtccaaaacccttctccggccggtgtgtcgcgtcgtcggccatgaagcggaagcagaagcccgccgccgccgacgccgccggcgaagtcgacgccgacgagccctcccaagccccgctccctctcgaggccttctcgggtgacgtctgcgccgcctcaccgcgcgctacggccgctccaccgacccgcagcaccgtcaccttctcgacttcgaccgcgccatacgctccattctcgtcgacgacggcctccccgtgacgccagcatcctacctccccgccgccatttcggccctccaagccgccggctcggctgaccccgccgccgcttccgcccttgcctccctcctcgtcatcctcctgcccaatatcccctcgtccccatcgtctctcccgccagcgtccgcctccgaatctgcctcagcgctcgccgtcttcctctcctcgcccgatgcatcccagctacccaccggcaccgtgcgctcggtggtcaagtcccttggccatttggctttccatgtcgacgctgcagccgattggggctctgtggcctctcctctggaggctctccttgctgcttccgtcgaccagcgggccaaggtgaggacgctaagagcttttgccacacatacttgaggaccatgctcatgtggttgtcactctttgcttggtaggttcgaaggtgtgcacaggagagtgtggagaagctatttgcgcacttgaaacaatgtggttgtgggaagaaagttagtaatgctgcaattggcatgtttgataagcacattgcatctgtgaaaaatcatgtcaatttgaattcagatgcttctgagggtaaggagatggaggctgcaaatatgctaagtgcaatggttgttgtagttccatacctatcaaagaaggcaatgaagactgtgttttcagaagtttatcagctgttaaccccttgttttagtccacttacaaggcatgtcttgaagcttatggagaccttgttggaccatctgaaggctgagaatgttgagtcagacttggtgaatcttatcccattgttgttggcatacctgaattatgatgaaaagaagcctgatgataccattgtcgcagcattgaagctgatgaaaaattgcttggcgaaactagttggtcgaccaaatttgtggatggaggttcttccatctgcatttgaggcagtttcaggtctgtgcatctacagtttcacctgtcaacatttcaatatgataatgcttcttttatgagttttcagttgacatacttgtgtttgagttattatggttatcattgatggggcacgttgaacctatggtcctcaaacatgtttcctccagttccattttgcactggtgcatctgagggggaaaaaacttatctctttgctctttcttgacaacgacagttaactaactttgagttaccacatgctaatgttgtatgctgcctttcttctaatgaatacttatgtttatcagataagagttggtattcctgcggatcaacccattttggtggatttagttcactgctattgttctgataagtgtatttagacattgtcttgtctatatatcatatatggttggaaccaataggtcaacatgcattgagctacatcacccgccaaaacaagaggcattggatcatcttcatgcttaatcacaaccatccattccgtagttactctctctcattaattagcatatatctcaatattcattgagtcacttagtgtagttatttctataaaaagtcatggcctcatccttttattaacacccttggatggtgcttttacaattcaaatcagtccataatattttgtgtgtgtgtgtattgaaattttgcaactgcattgcacagaacaatatcctgctgcaatgtgtggggtgtcatctagttcattatatgtattgtaatggataacagtcccagagctaacttggtaaaattttgaaatgggcaggatacctgattctggacagaaaatgttctgaagatatagcaggactgctacaagactgtattgattctcatattgaccggaatattattttgactggatcacagttatgcgatcgtgattatgagagcttaagtgatgcggctgctgttaaatcaatctgttcatcgattaataacatgctttgcgcatgtgcttctcctcccaatagtatcttaacaacggccttggttttgtttctgaaacttggtatggcttcaataatttcagtaaagtatcttttgcctataactgtaccagtgtatataataaccattcgagaatatgtagaagactagaactgtagaagtaataacctt

SEQ ID NO: 27923 - DNA, 5273 bp, Oryza sativa
caatgctagaaagtcttataatatgaaacagagggagtatatacatattctctataatctatacatgaaacactagataccatttattctatctcatgtgaattccagcatgcaccatttcgtaaaatatgtatgttgattataaataatcacatcttgcaccacaaaaaactaaaaaaaaattgtttaccgctccctttgttccaaaatataagcactcgtagcatttgaaattttaccaaaatataagcactcctagaatattacttgtcccatcaaccactcattcaattttcttcccatattacccccaaacatacctcatttaataaggggcatggtctttcctactcaaaccttaatctttgctaaaacacctagaaatgcttatatcttgaaatggagggagtatttactagtgcaagtacctacaaagctaatttagacatgaaatattgacacactctcccagtaccttttgactttctatattgtcatacattggtcgacttttttgatgtatgatattgcctgctttttatgattcatttgcttaattaactcatctatattgtttggttcttctccaggggagagttcgtatgcctttatgaaaaatataatacttacattgtcacaaatcgctgcgaaaacagacaaagaatcagagcggaagaatgtaagtttatttcttgattgttctcacatcaaagatagagcatctatttgcttctttgtgtgtactgcgtacatataccatgtacatgagcattgaaactatttcatggcaatgcttatgtttcagttcctcccatgggagaatccagacctcagaaactttcactccaaataggaagctagagccataatgcctgtgaaagtttaagtacagaataaaaacgagaagtttataagattattgtagtcatatcataactgaaaaaggcttgagcattgaattattgaaatttcatttaacttgtcgtgttttcaggttgaagagtgcattggggcagctgtcattgctttggggccagataaaatcctttcactaattccaataggttttgatgaggaccggctaacatgctcaaatacttggcttctgcccattttagataagtatatctatggggcctcaccacaacaattcctagagcgcattgtacctctagcagaatctgtacaacaagcttctaacatgggtaggtaaagccaattcattaggtcttaaatacatacgcaacatgatttcctaaccttctgctttaacttcagccaagtcagcacggaaatgtgaagacttgaaatcatgttccaatcagctgtggaatttgcttcctgccttctgccgctacccagttgatatatgtcagaatttcggttctctatccaagttgctactagagatgttgaaatgtgacaagtatctgtacaaatccgctgttaaagccctgcaggtgcagttttcatttacagatatactgcatttttcttatcttatctatactcattttctttctggaatttcgaactacaaggctgctccatgtcttctctcagacaacatgttttatttttctcagcaacttgtagatggaactagaagattaagtagcagtgagcaaaacagagaaatatatgtggagctttctactttgttctcctcgaaaattattaacttaagctgcccaagctttgagaggtgctctaaaaaagatgctcgtaagaacatgaaagttctggcatcacattctgtgtatcttctttctactgtcacagattattttctagattcttcaccagagaagcgttctcatttgaaggtgtgtcacttaatatttctaattattatcagttgatgagcatgttagatgtcttcaaaccaattaagtctaaaaaacccctacttaaatcagtcacggacggactcacatattgaaacattactgtattttctattatttggcatttgaagtttgattgatctatgcacattagagtaccactgatttaaatgaggttttgtgtcacaaacttgagaaaggcttaacgccgcttgatgcagcccaatattgactgctgcaggctgtgccctacacaattaaagagagattatattagtagaacatggttattttgttgtgtttgtacttttttactatcatttaaccatgtttggttgatatagataaaaccaataaaggtgtatcagggatgagttatataagtaaattttataaatgcacttttgcatattattatcaatacataagaaaaggaaccacaaccttatttcttctcagcaaggcgcactcaaatgactaaatagcaaataccaagtgaaaaatgtctgagagattaatatcctggtccagttggttattccatatccatgtgcacggtgtgcccatgaatggctcagtccaatggcactgaatacttgttacagttggtttgatactttgatgcactgtattcttgtagtgtatattaacaaaatacagttttaccttgaatacatgatttctccaacttccttagctgtttgtacctgggagaggttgagctgtactagttgtgtcagtaaattaggttatgtaccctttgctctagcacaccttctatttatccctgaaaacaacattagtttttagactacatattgcacaatatttatcatatcatctttgtcttcttgcaggatgcattgagatgtttggctcaactttctggtagcacgaacatttgcaaccttttcctttcactggttaaaagatttggtttagaagatactcagtcagagcaagagaatattgaatgccaaactaatgaggtagacaagaaggatgaagagggtactgatgtagatgaggagaaaaataaaaagaggtctgctattattcctttatgcatctatgatgtttgttttcaatgtaggttactcattctgtagaaaaagaacataaaccatcaaacttgcctggctctcagcggtacctttttaattctttttggtttgaaccatataagcaattactcctattaatgttagggaaatgctcattaaatttgcattctaggatgatatttatcaacaaacctattcaaattgcatgccctacatttttcaatggtgggactatatgattatttccgtcatcatgtattgattcacacatggttactttctgctagcgtgtgtgtattatacatggtatgattgtaactctacttgtgtaggtctcttgtaatggaacttatttcgacattcgctgaagctgctgacgaggatctgcttgatttgctttttggatttgtcaaatcttctttactggtacagcttattaatttgttctcttgttaacccaactcttatcggagcattcatgctcataccagtttatctgttcttcacagaacaacaagcaaccttgtgagggcaaagctctatttgctctaagcataattttgaaggtcagtatgactgtgtgggaccctcttgcgtaatttttatgactatgctttttcttattagccaccatccctttcttctttttttcaggaacacaatgaatattctttggctcggttggatgaaataatgatgcttcttcatggaataaaggcagacttggataatgaagttttagaaggccaattattatgctaccagtatttgttggttcacatgattaaggtaggtttgacaggttttcccccctcttgcaataatctttgatgtagcacattatctagatctttcctttttgatgacttggattgtggaatttcaaggttgttctatgttgatctctgaaccattgtgcagaagccaaagcctcacaccttgtttgccctgaatagaaagcatctgttgtagcaaaagaacatgttgttctgcctgcatgtcatgtttagtacttggagagttttgttgtttagtcaatttgtactgttcgcgcataaacatgtaaattatatcctacttggtgctaatataatatccatacattgaaatttcagttaagtaattaaacaatttgttcacatctacttcaaagcagcaaaattttatatgtctaataatataaatgctcagaactattcaacttaaattgcacagaaagtagacctctagaatgtatgtaattgctataactgtaataaacacacgactagaaaatatcaaagcactacaatatctgtggtagctagaggtgcattgtacatctataaatatttctttgaactgattataataacataatggattagttcggatgtcttctggattggatgagtctactgcaaagagagtattgaaccatcaacactttgatggcatttatcccaccttgtctatgatgtgtacctatagtctagttctatgctattttggtttgatgttaccaatcctgcttgtatatttatgtaatgtatgtttgtctgacttcttttctgcgttgtaaggctaatgaagagaacacgagcaagaaggcgttcctgattctaaacgagttaatagtcgcgttgaaggtttattccctacctttttttatcagttaccaattatgtatcaggaggatatatcatgtcagtcacaagccttttgctattagatggatagttttcctctttcaaaaacttaaaagcaaggttcttaaaatatacacacgaccactgatgacaattgttcttgccctgctgtcatcatctgctttattttatcctgacccaccttttctccgtacgcagtccaagaaggaaagtagaagattggcatatgatgtactcctggctattagtaatagcttgagaagctctgagtcaaacagtgaagattcagatcttcaacgactattcacaatggtatgttaaagaaaagttctctctgctctgaaggtatcccttatgttttatgattttatctggcataattggtgaagttaccttgtcagagggatgcaaatacttcttttttaaaaaaaaaaaatcatatccttatcataacacctaaaagaatcattttgcttttcatgaaggaaatctgggaacatgttctccatttctattgtttgaacttaatgtctatgtaatctgaagagttgtaccactaggtcctctcatccttatgaattgcttagtgcattcagcttgtagaaaaactctctcagactccaatgtacaaaggattaacaattcgcagctgccaagcttttgagtgtatatctaattagttatatctgagagagcctcaagccctaggatca

SEQ ID NO: 27924 - DNA, 13297 bp, Oryza sativa
tccttatcataacacctaaaagaatcattttgcttttcatgaaggaaatctgggaacatgttctccatttctattgtttgaacttaatgtctatgtaatctgaagagttgtaccactaggtcctctcatccttatgaattgcttagtgcattcagcttgtagaaaaactctctcagactccaatgtacaaaggattaacaattcgcagctgccaagcttttgagtgtatatctaattaggtatatctgagagagcctcaagccctaggatcattacaatgattttctgccaataacttactaactgacctagaagactagacttttattggaatttgctttagtcatcagatttaaatgtgaggccagagttttacttgggtcttgaggacctgagagatatagttgctttgcttgcagattaccatggtaggagttgagatcatgcaaactgtttgctgttttgttgctttagcaccacatgacagatttgtcatgcccaatcagtacatgctagagacttgtcatgcctaatgtttttttttattaaagaatgtgtccataatatatactagtactaagaattatctgtaaagttgtgatatcaatatggcacaactttattttgagttagcagtaccatttcgacaactttattttgagttagcagtaccattttcgtgaaaaacaagcaatataatttcatatgggaagttcataggaagatcatttacatgtctaatatgcaggactttccttgttgaacttggaattgatttacaatcaaccatctgtgtatttaatgctgtaagatttttatagttcaaacttggagttgatttaaaatcttgttatttttcaggtgatgggatatctttcaagtccagctccacacatagtgagtggggcaatagctgcactatcgctgcttatatacaatgatgctaacttttgcttggaagttccaaatctgataccatcagttttagttttgctgaagcataaagctattgaagtaatcaaggtgagtaatgtttcattgtgtgcctctcttaattgttttcatattattgagagttaaatcggttcaatcctacatgttttaggcatctttgggctttgtaaaggtgttggtaacatcattgcattcagaaaaactgttggaattgcaagcagatatcatgagcggcatattaccatggtcgtctgttacaaaacaccatttcaaaggaaaggttagtcagtaaaattatcctgtgtcttttttcccattcaatcttatttttcttaagggtaattaatatgacattgtgttgctctgatatttaatttgcaggttgtgttaataatggaaatactgattaggaaatgtggctttgatgctatcgacttagttacacctgaaaagtacaaggcttttgttagaagcgttgaagaggtcagattccctttacttgcttggtctagcttgggaaactagtagctatagtgaatttagccaatacgcaattagccgctggtgctccaggtcaattactgatgcacatttatcgaatataaatataaatgctttatagggtcaatttcttcaaaattttactttatttgggcttcttggcctacttttatagtatacaacactagaatgtggggaggtcaactgacccattttggagagcttctcattccttaattaatatgaaaaagtttagtacagctgcacaggaaagtttagtacagactgcataagctataaagtcaatgcttgatctaagggatgatgattacatgactattggctactgtctgaaggaaagacagcaaaccaacgaagtaataaattagcacaatctttaatcataatttactatgcaaagctatttctggtatgtgatctcacaaacgtttgcattaattgtagcataacatacacacatcaaggagcaagttttttttttgttttaaggacctatttaacccacctcttgtaatgttgaggctttacttcactcttgatcctgatgtatggactggttagcatgttatcaaatgtgtggttcaactggattatccttaaatgcagtattaagctaaatttgtgtagcaatgagccatgtttctttactttgaccgcccttaaagagaggaatagagaagaactgtgtgcgtttaagaagtttggtaatatttttcccctccccccaacataatttcttgtttgggttacaatgttacaaaaactgcatccttcgacaatatgaacttgtacctttgcatgatttatttttgaaactgatgtacatcctagttacaaaggcatatctcggtacttctgaaattcagcctaagacaactctgatattgaactcaatattttcttgaggcaactgatttggattctggacagttccttgaacggctctcattctttcaacttgcagggccgcaagggaaatcataatccagcagatggcgcagagtctgaggcacaacaacctacgcaacatgctgctaagaggttagcctgcagcacttagctaatttcccttccccccttaccattacatgttaatagtagttaattgtatgttttatgaattcgtatgtatgcagaagaaaacggtctgattctgatgttggaactggacaagagggaacacacactcgggcgccatcgaggagtttgccagctggaaagaaggaattcttcgttaaaggggccaggaatgctcgctctcctggtgtgaaaagccaacgaagcaaaccatcaggccgcaatggtgatagaactaatttcaaatccaaatctgaaccacggccaggaaatggccaaaataccaagggcgacaaacctcaaggtttcaacaaaagaaacagaactggtaagttcgacaagacacaaaatcgtgggggtaaagcatctgatcgctcttctagattcaagaagcctagaactgcagcaacaacatgaaagccaaggctgtcatttgcaccatccagctatcaagctgcataaacgcttcttgttagcctcatatctttcaccggcaaggtcaggtcctttagttgagtccatgccgggaccttgaaatttgcatgcaccttgattcctttaggacttttgagaactgcgatagagaaggtagctggctaaaaggagcaattcttcagggaatctgcgtcagttaaaaggagcaaatcttcacttcagggaatgcgcactgtctgcgttagtaaaagagagcagtggtgtcgattgagaatccacctagttgtacattaaaattttgacttgtgggtggattgaatcatacgaaactattgatctagggggcatcccttcagtgttgtattacaatttatacgcaggtgaaattttgacttgtttgtttcagtcatccacaagccggacaatatgctgtcatttggctggcgttgtcaatcaggtttactcattacttttgcacagtttacatccagagccatacagatccaaattgatttttttttctaaagaatacaactccgaattatgacatttcatcctgttgaagtgtagagcaagctcggtttaggtcctaccccaaaatttttcaccatgtcatgtcaaacgtttaaatacctgcatgaagtattaaatataagttaaaaaataactaattgtacagattacgactaatttacgagacgaatcctttaagcctaattgcttcatgatttgacaatgtggtgctacaataaatatttgctaataacggattaattaggcttaaaaaatttgtctcgcagtttacaggcgtattctgtaatttgttttgttattatactacgtttaatactttaaatgtgtatccgtataaccgatgtgatacatgtgtatccgtataaccgatgtgatacgataaaatttttcacccctgacgcgtatcatcgcactgtctgtctctataaactacacgtaaaattatggaatgtgttttttagcgtgtttttatacaatttgattcgaaaatatctttaaatttacccaacttagaccaaggcccttttatccatttcttacatggaaaagcctacacactttttcttactaaattattactaactctttcttaccagtaaattcttggggtaattgtaaatttactactactttgaatcgttattgcaaaaacgccactaaaaaattgcaaaaatgcaattagaactgtcattcgagtggcatacttgcaaaattgaaaaaaacggtggcaaatttgcaaattcttaggcttcgttcagtagcaagagactaagaggagatttctctcgttcttcacgcgcatgcttcctgaactactaaacgatgtgtttttttaaaaaaaaatttaaaaattgctttaaaaatcatattaatctatttttatatttgaaatagttaacactcaattaatcatgcgctaagagcaagtttaataatatagcccactactagctccaattcatatatagttaatctaatagccaattcatacaatagttgattactatactctttatatatggtctcaccatatatagccaatttatacacacactacgtcttggaatccgtgctgcagctggctacatatctgtagcccgattctcttctctatcatattttatctcattaaaatatgtttatagctggctaatagtctgttattgtacctgttctaatagctcaccttgttttacgtatcttcttaaacttctctttttttctcctctcaaacacaaccttagtaatgctgtgagtgcatctagaatttttataactcatctacctaagtaaaaaatttagtaaggaaaaaaatagtagtaatatagttgtgctctttctgcttttccgactcagtcagacaggtctagacgcggagggagtccgactcggcgacttcgggtccaaaccaaccttgcggcttagctagggttagctagcacaccacgcagcttcagctcaggcgtcgagaggaaggaggaggagggggtcagcctcgctcggttccggcggccatggcggtggcggcgcccggccagctcaacctcgacgagtccccctcgtggggctcccgcagcgtcgactgcttcgagaagctcgagcagatcggcgagggcacctacgggtaaaaacatttcgctcaaaccctagccatgaatcgagggggattgctcgtctgattggattctctctcgctcgcccgttgtttaggcaagtttacatggccaaggagacggagacgaacgagatcgtcgcgctcaagaagatccgcatggacaacgagcgcgaaggcgtatgaattcccccccccccccccctttttttttctccgccccttcttccaatttttcctctctgatgacgtgttgctgattgcctcggcgcagttccccatcacggccatacgcgagatcaagattttgaagaagctccaccaccagaacgttatccagctcaaggagatcgtcacctctccaggttagtttcatcgtcgcaagcacggttggttttgatgtatcagaaccgagtccatttttggtgctaattgaatttggaaactatatgccttttcaggcccagagcgagatgagcaagggaagccaagtatggcacattttattcctgcaattccttggtttgtgggagtggttctaggttgtaatgtctgatgcattgtcatcttgttgaaatagtcgagggtaacaagtacaaggggagcatctacatggtcttcgagtacatggatcatgatcttactgggcttgcagataggcctgggatgcggttcactgtgcctcagattaaggtagaaccacctgtttgtgtgacttgttcttgtttggatgtgatatattttgttatgacagactgatcttctgatgtgtgatcttctatcgtcccagtgttacatgaggcagctacttacaggcctgcactattgccatgttaatcaagtgctgcatagagatattaaaggttccttctttagagatatcttgtttgttcctacttcttgcatgtatatcagttttttccctgaactaatatgttgtatccgttctttcttgcaggatctaacctcttgatagacaatgagggtaacttgaagcttgctgattttggccttgcaagatcattctcaagtgaccacaatggaaacttaacaaaccgtgtgatcactttgtggtataggtatggaaacttcccatgaggaggttcttccattcatatttctcttactttcttttcattgttctctctctcttatttgtgtatgcagacctcctgagttgttactcgggagcacgaggtatggtccagccgttgacatgtggtcagtgggttgtatttttgctgagcttctcaatggaaagccaatattgacaggaaagaatgaggtattgcatcttgaagctttgagctatcaattggataactgaagtgccgttgcattttagtttttcatttccctccttagtgcattatttgtgctgatacatgtttattgtttcttccctcattttggggattggaaaattgaactgtcagttatcatgcagatgcagtcttgatttaattttgtaaaaccgtttcccctacgcattgattacatgcactgcacattgtttgtccatgcaatagttataactcctaacctcatctgattttatgctattactgcagccagagcaactgtctaaaatttttgagctttgtggtacgcccgacgagttaatctggcctggtgtcacaaaaatgccatggtacaacaatttcaagcctcaacgaccaatgaagagacgggttaaagagtcctttaagcagtgagtgctatgcttggcaatgtttttcttatgcagctttcgtcttgccattgatgttcactgttttacatatttgcagctttgatcagcacgcgctggatcttttagagaagatgttaactttggatccatcacaggtatgctgcattaaccagttgtgacttttcagacgtgtcacttatcatttctgtttgctttttgttctatatattgacaatcattttggttatacagaggatatcggcaaaagatgcacttgacgcggagtatttctggactgatcccttaccgtgtgatccaaagaggtacatatgatggttaaatttgtcacgctgctaactagcttaattctaataactttgcatctgatacagcttgccgaagtatgaggcgtctcatgagttccaaactaagaaaaaacgccagcagcagaggcaagcagaggaagccgcaaagcgccagaaattgcagcatcctccaccacattcccgtttgcctccaatccagaacccaggccaaccacaccaaatcaggcctggccagcctatgcataatgcaccacctgtggcagctggcccaagtcatcactatgcaaagccgcgaggacctggaggccctaataggtacccacaaggcgggaaccaaggaggctacaatccgaaccgcggtggacagggaggaggctatgggagtggcccatatccacagcaaggacgaggtcctcccccttatcctggtggtggcatgggcggagccggtggtccaaggggtggtggtggcagtggctatggtgttggcggaccaaattatcaacagggtggaccttatggtgcatctggtccaggtcgaggcccgaactataatcaaggtggttctcgcaatcaacaacagtatggaaactggcaatagcacggcggtatcatgagcagcaaatgcccttccggtaggactctgtatgttgaaagaacctctgatgttgtatttgagatatactttttgcatggtgtattcagatccaggcatctctcggaagtatgatgtttatgactagctgtatagtatggcactgatgtgattcccaatgtttgatgtactagtattattattactgcaagaatgtggaaagacatgaaaagtttgttatcaggatcaaaacttcgtgttggtagtcctgccattagataatggcaatttgcccataatcttcttttatgagaaaactagccgggtgtattgtgcggttagaacccatataaaattatttattttttaaaacatgattttttttatttttttaaaaataatcatcttcttgtcttagcattaaaaaaatatatctagtttctaattttatagtttttaaaagttacttcaccccttactcctttgtctttacttcaccccttactcctttgtcggctttttatttacttgtccatgacacggctactattcattactacctccgtcccaaaataattgcaattctatgttatttagcatatattaaggtttgagaagaaagactacggtgcccctcattaaatggtgtttatgtgagagtgggaagatggttgagggtaaaatagggagaaatttgaatgagatatgattgatggggcaattagtactctagaattacaattattttgggacgaattttaaataatagaaatgcaattattttgggacggaggtagtattatttagacctttcaaaatcggatcttatagcttcgcgtttcctttttatatttttagaaatctagtcaaacgttgttattgtactattttacgattagtctgttgtccccatttttattctcatttcaaatctggtcatcgttgaggttcccttttttactttctaaaaatcctatcaaccaccatgacccttagcatttgccaccattatgttttagatctcctttcaatatttcttaatttttaatccaatttttttatctataccactttaaatattggtagtggtgatgacagtaaatctgccgctaccactcctatcattgacgtgtggacccctatttatcattgaaaaatttgaatttccttgcctttgagagctgaaagagaatagacttgggctagctgccaaagagctgcttttcaattgtgatggactgagtttttttttcaactgtaccaaagatgaacttgggtctttggagtggatgagaatgattaaaataaacaatggtcacaagccacaataaagtcgcattgattactttttgcaacatgcacatctaattaatactcatatactctatatttacaatgataagcaatataattattccacaacatttgattttctcctttaatcccataaagaagtacatgcattctactggttatttctatattgtattttctacttagattgtattcctacatagatcctcatttttttttctaattttctatttccttgcacctttcgcaccttagatgcgagcacggagcaccgtcatcgtaagaatttgtgacactctcatcttttggccggaacgggatagcatatttgggcttaaatgggattcgccgaaatcatgggtcatatgttttctaaggtgatattcttttctcctaaagatgaagattaagttttttacacaaaataaggtggtattaacgtatgattgattgagttttaattattacaaacttgaaaaatagattaatatgatatttgagagcaactttcatatagaaagttttcgcacgaaacataccgtttagcagtttgaaaagcgtgacacgaaaatatttatctttatccaactcttattggagaaaattacaggacctaagggatggtcagcctatctcgaccgcgcgctgaaaggatgagcggttaaatggactgcaaactgactcgaagaattctactgatttttaccatagaacacgtaaaactttggttaatttgtttttcagaatttatatgctgttttgatttgaagcccaacaaatcttgtgacagtatggtccatattttaagcccaaaactgttagatacttgttcatgcatgtgcataggcttcagtcagaggatcaatgggagaaaccagaagtgacacaacactgaacaaaactgtgatggtccaaaattttgcttctaatttcctagcatgttagcaaatatatattacatgaaaggatggacacatagtgaaattgtcacaggagtgaaaaaccagaatgatgtacaagtaagcaaacatgctctctccgaaacttcaaattctccatctcaaaaaacaaagcgtcctagctcaaggaaaaatggcttcaacaaatgcctcagcatcaaaaggctgaagatcctccatcccttcaccaacaccaataaactttactggaattccaagttcatctacaacgctaacctgcaatagatcaaacaacaaaattcaggtgaaccactaaaatgttgttgtttataaactgcatatggcaaggaatatgtgtataccacacaaccaccacgagcagttccatcaagctttgttaggacgaatcctgtgactccaacaacctggcattaagccaacagagttcgttatatcttgatgaaaaaaaaaagaaaaatcaggagtaccaaaataaccaggaaatggtgattacatcattgaactccctcgcttgttgtagcatattcaagccagtcgtgccatccagaaccagcaagatctcctgttaagcaaggaatatatgctagtagttaataacaatgagagcgctatgaagtattagaatcataaccgtgcttctctaagcttgccctcaaaagtactgcacatgccaaaatgatccaatcaacacaaaatcaagtcctttgcatgtaaacacagcatacattaggagcacccgaaagggctttagctatgactttcttgcaggaaaccaattcttccatcagaccataatttgtatgaagtcctgaaaaataagtgctgaaacaaagtcatttcaaccaatcagcaaatcaccaaacatatgcatattctgctctcagtcactaaaataatcatacgtcctgacgtgtcgcaaagaacaagatcaaatccttcacgcttcccgcgcttcactgcctgcgagagaactaccaagcaagtcaaattagatgaaacatagaagctaacctccttatgagaacagagtgtgatcacaatgcttggcagatcaaaaaatcatacctgatgcaggttttgctttcttatcattatcgataacaatctctgaacctgttctctctgcccaaacttctagctggtcacgagctgctgctctgaaggtatcacctgctgccatcaatacctatattattgttgaaagcatgaacatgaactcattattttgatctattgtacaatattacatgttcagagaatgtggtgaggcaatatgtacatagctgaatttaattcccatgcatctagcctataaaccagggtatgtctagaaaatagcctcaccttcactccttcattcttgaatctgtaagcaagttttcctacaaatacataaaaaaggagtaagatcaatcttccacttcaaagcatcatgctgtataaaacgttccaaactaaatagtgatgccagatgcagatggtagaaaatgcccgaaccagaactgcatattgaggagctccttactatctaggtaccatattagctttaaagcgacaagataacctgcagaagcttaatccaatgctatgccacaatccaagcttaatatgcaagtagttttgcattgagctgaaaataccttacataggcgtgataaattcacttcgagtaactagtacattggtgtataagagataatcttgtgatggcctaattacagtattgtgcttttataaccaaatatcttttccttcacaaatgcacttgcgtgcctatataaccatgtgttgtgcctttagaacatcatcataatgtcaattgtccatatagtagggtactagggtaggaccataggagagtgtgttaccgtttattgaccatctatcagaatggaacaaaaacatctaagcttaacaaagccaagcatgcaagaggagtacctaatgaggtagtctttccacctccattcactcccacaatcatgataactgccggctttctgccataacgatgaacaacattgctcaaattacaaacagcaagcaacaaatggcactgagcaggaattcaggagaaagcagaacctgaaaccgagctgcagctccggattgccgcctttgctcgtcagcagttcaagaatacaccttttcagcgcttcctgcacaatcaaccaccacagatgacaaaatgaatcatcagaccaatcacaatgccgatgtcaatgtacactaagaggaaactgaaatgacctttatctcagccccagacttgagcttgccatcgcggatttcctcgcgtagagtgtccacgatccggaacgaaatcttggggccaaaatccgacaccagcagagcctgcgtgcacgagaccaagcaggaaacattcaaaaaaaacgaagacagaagcagcgccgaacagtgaagaaggagagaacagcatgcagagcagtggagcaggggacgcgcctcctcgagctcgtcgaggacgcggtcggtgtcggcgaggttccagtaggtgaggagctcgtcgacgacggagaggctctcgcgggtcttggagaagccggagaagagcttctcgacgtcgctcttggccttctcctggatgaggcgtcccaggcgggtgaagaaccccgcctgccccgccgccgccgcgcaccgcaggagccccgcgcggccgcggcggcggtggccgtagggggagcagcgcgcggacgtctccgccggggagaggaaggggatgacgtgggagtgtgccgccattgtagggatgccaaggctccgctctgggtggatagcgcttcgctgccaaaacggcagccacgccgcgtttactgtccggtggctacttcataggccgaaacattgagcccatgggctcaaggcccatgtaaagcccacttgtctctgaaggactatccttcacgctgcggcccatgaggcccacgatttctccttgcgtagcccatttgtctaagaacgactatccttcacgctgcggcccatgaggcccacgatctctccttgccggggcgagacgctgactgctacttccgggctgggcatttgctgccgcggtggctgctgctttcccgtgtgcgcagcggcgcggtaatggatttttcgtttcgttcttggcgtgcggatgcgacgcgccgtggcgtgctcgatcaccattgttagccgacacccaatcgccagtggttgccagagctaagctcctcgaaaaattgttaacaatgacaaacgaatctagggcctgagagcaagtttaaggacagtcacaacccagaa

SEQ ID NO: 27925 - DNA, 1176 bp, Oryza sativa
acatgccgttcccggcgcgcgcggcacgggctggtgtcgctgcgcgacacggcctacttcaacagccacgacaccagcatgcgaacgctgaagagggtgggcaagacggcgtgcaagccagcgtgtttgggcgactgcgcgtgcatggcggcgcagttcgtgtacggattcgaccccaccgacggcttttgctacctgcagtcggaggtgttgtcgctggagacgatgcagccggaggtgtttcactacaactcctccatgcatatcaagattgcccagggcaggttgccaagacgattctgatcgcctttttacagtctactatactatatcaaggaggagaaatccttgtaaatacatacatgaataaattcacgagaactagctaggattctcgattcatatgtttttgtattcaacatttgtttgtgggttttaacaaaatataaagaaaacatttttttttattttttcatttttattttttaatatttacagaaatattataccatccaaaatatttacagaaatggcccctgccgtccaagtggagggaggcaaggtgtgtgcaattttcaccctgctaaaaatgcatttttctagttttttttcatcttgtctgtcacctgccgccctcagtctacttctgtaaatattttcgccggtaaaatatttctgtaaatattaaaaaaataaaaatttaaaaatgaaaaatattctttttaaacaaggacacagcagcgtgccttactacgagttgggctggaacgggattcccacgaacgtgttgggccttttaactcttgggccgtgggccgtggccagtcatccagtcatcgcttggtggcactcgccgtcgccgccgggtctgcgtgaagccccgtgcgtctcccctccggctccgcttctcccctcgccggcgccgtcgccggcgttcctcggctgcagatccaatcccgcgccccgccgagtgactctcctgattccctgacggcctattgaagagctgcctagaccaccgccgctcgcgactcgcgagcgctggggcgcccgccggcggccgccacgcccttgttggctaggctgctagctctctgcccctctcgcctgtcggcctctactccggctaaccagagctcctcctcccttgctcccttggctacacgggtataccat

SEQ ID NO: 27926 - DNA, 2641 bp, Oryza sativa
tacaacatttgccacaaattaatagatgatattatagcagcataaacaataacatatatgcttatggcagcaatattgaggtattgtttaaagggaaattaaattaacaaagtcaactcacttgtatgagccgacggattggcatctccaaccagattgatttttttcatcacttgggtgtgaaagcatactttggacccaaacctacaggtaaaacagtaaaaattaagaaatagatacgcagagcatcatctcaataaccaatagatatgcacaccttaaagttgccaccaaatgaagagctcacagccatgttttttccagggcggaaagcaatagcagaaattccagcatcgctgtatgaaagaatggtaagagaacatatgcaaccatttataattgaccttatatagtcatgttggtacctgtgcggctcataaatgacagtggacaaaaaatattgtccagcacgagacccttggttccaaaatttcaatgtaacaagcccacctaattcttcttcaggaagcttgacatcaatggtgcacataaacttaccatcaattgacaatgaaactaaggaaatgtacatctgtggaaaggaaagcattctcatcagagcaaacttctggatactaaaataaatgtgaaaaacaaagaaaaattttaagccacaagaacctaacaaaagaaatctacggtacaagcaaaaggaagttgttatctcactgtgatatcatcaacagggtgaaagttcctctcacaaacttgcacctgtagaaagtaaaaatattgggatgggatattcttgcacaaaaccagaacaggaagacaagtaccgattcaatatactgagaaccacagaactggataaaatatgatgaaatgctctcatatgcttactgttttacctctgaaacttcagtattctcaaataaatcgtagaactgtatgcaataatcttctgttggcacagcaacaagtttgttactgtaatcaaatccatacacatctcgataacaaccacccaggtttggtgaagatataggtagctgaagagataaacaaataaaagacatccattagcacataatataatcaccaaaaagtgaaacagcagagatcatcaatacaatttatttggattagagtgggctcttaaagggcatatttatgctattacaaaccttaattccagcaatagatttcatgacctccatgttgggcatttttagaagatggacttggttattcatacatgacacctgaaatacaaagaacattaagctctacttcaaaaatgaattgcaaacaaatgaaacagaaacagacaaaaagaaacggtagtttgaaacaatcatagagccaaaaaaaagtctaatacaaaaatgctacctgctacactttatgagcccccatcatcagtacagcccattaggaagtaaatgtgttaccataaaaagatgctgaagtgctgaaccattctagttttctcatatggttctaataacatcatgtaacctaatgtggacatgtatgattatgatatataattatgctcactctggccacaaaaaaacaagtcaatttaaaatgcatgcagtcaacacgagttctttgaccataaatatcagttaaaatatagtattccggtatgcaaatgaaactgataaattcaattttgtcataacaagagctttcataatattacagttatataaacttttttaaaatttatgctaaagaactaggcagtaaaaagttgtataatgtggacttagataagtccaaaacaacttgtttttgtgactggaggctactatgtggcaacatcatattcaaataactcttaaatcaacaaaaatagtgtgtttttcactcttcagattactatatcaggtgcaacgaagttcaatgggagatgtaaaatatggggatacttacacaggcaatggaagaatccggagaatctacaaaggacaaaagaggagaccctagacgtggtttatatcttctcttcccagtatctagttgccatacaacaataactccctccataccacctataagataaggaacttgtcattgaaaagcataaaaccctagaatcacaactgaatgaacacaaatcagcaagcaaaacctgagaacaagtaagctccatcagtagaaaatttgagaaacctcactccgcttgaatgccaatgccatgtagtgcaagtatctgcatcaccattacccctcacatcacccctgtcttcatctagttcagattttgtgccatctgatccagaaaactttgcatttccaaaacctctccagatcagtattcgccccgttgcatcaccactagcaacaattctctcacttggatggaaggccagtgtgttcaagttttttgtgtggctaagctttatcttccttatcttgtcgggcttgaaattttttgttggtatcctccatacatggagctttctcttatttgtaatacccaaaaattcaccagagctacttgcaacaatcatttccggtttacgggtctgtttaaatcgaagcaaacaacacattgatgtaagttttaatagaaaaccttaccacagatactacagcacaatattattgttatatttctaattgcaat

SEQ ID NO: 27927 - DNA, 2515 bp, Oryza sativa
cggcgccaccaccaccgccgtgacgtccccctcgtgcccctccagctccgacacctgcaaacacactcccccatcggtaaccaaaaaaaaaaaaccacagcgagccacaaaatctctctctctctccatggcgcgtaccagcatgccggtggaggcgctgaagacggagacggtgcggccggtgcaggcgaggaggagacgcccgtcggccgagaaggccggcggcgcggagacgtagctctggccgccggtgatcatggcggcggcggcgaggggtttgggagctagggttttgcggcggaggggagaatggtggcggcgaggcggcggcagaggcagcgtagggttttgggatttttggcaatggcagaggcgggttaacgggtagcgacccggtccgctttgtttgggctcttgatgggctccatgggccaggttgatgggctgtccttgtttaggttaaacgtgggccgggtcgaatttgtagtgatttaggcctggtttgataggtccaggttttagttcgagcttccgcagcccatctagatttctttggaattgaggcccgtctatgtgtttgcttaagattttaggaaaaagtacaccgaaagtccctcaacttgtcatcgggataaaaaacgtcctcgaaccgcaaaaccagatatgcggggtcccttaactatacaaaaccgttcacccgaggtccttcgatggttttgaccccggttttggcctacgtggcacgtgggacccacgtggtccccacatgtcagcgtgccacgtcatcaccatctctctctttcccttcgtcctctctctctcacttttcctctctctaggctggcgacaggcgacgtggtggtggcggcgacgcgggaacaggcctcccatcccgacagccaacgcctcgctcttcttcacctacgacgaggccacgcaccggctcacgccgccggcctcctctgtttgtgtttggtgagtggtgtttgatcggcgtcggtgtttggtggatgccgtgcaagccgagcggatgcgcgtggggctggaggaagcgcagcgacagcacgtccgggcgttggtggcggccgtggcgcgcgccacgacggggagggtgcgtgcggcggaggccaagctggatcgcgcacgctgccgcaacgcggagctagaggagaagctccgccagatgagcgcagaggggcaggcttggataggcgttgctaagagccacgaggccgtcgccgccggcctccgcgccacgctcgactagctcctctagtccccctgtgccgtcgccaccgcagcgggggaaggcgacgccgaggacgcgcagtcgtgctgcttcgagaccccaggcggcgccgccgccgccactgccgccgacgcggtgtccagggcgacgtcgtgcaaggcctaccgtgtcacggaggcgtctgtgccgctgctctcgttccgccgcctgtgcctgtgcggcgcctacgaggccgccgttgacgcttgccccgtctgcgccgccaccaagatcgcctccgtccatgtcctcctctcctgaagtcactcacatgtgccacaccagccactgcatggagtaggagatttcgatagcgcaacagctatggccagaccgaaaccgggcatccatcagccaactccgatgacaagcaagctaacaacaatcatcctgtcccaagttacatggaaattcatgctagggaagccatggttctgtcatcagtgatctccaggccatgcgagttttgtcggtggaaacaacagtgttcagtgcgatgaattaatggttgattgccgatctcatctgtcgcaggtaccattgcttcaaatatttggcagcccaggtcggcacgcacgccgccccgtctccccgtcggccgctgctcgtcagttgtcctccccatcggccgccgcctgtcccggcaccccttctccccgccgatccccgcctgtcgacgaagtcccggcgctgcttcccatccaccagccaccgcagctccgtgcctccgcttcgccggccgccgcgcgctcacacgccgcctccgccgttcgccgctcaacccccctcgctgcccggtcgtctgctccctacccgtcggccggcctgagaagagtgcgagagagagagagaggggaggaagggagagaagaagaggggaatggacgtggcacgctgacatgtggagcccacgtgggtcccacgcgccacgtaggctaaaactggggtcaaaaccactcaaggaccttgggtgactggttttgtatagttaagggaccttgcatatctggttttgcggtttgaggacattttttatcccggtgacaagttgagggaccttcggtgtactttttccaagattttagcccaaatccccgggttgaggaaaccatgatcaggctctcaccagccatagctaaatttaaattttagaaataattagaggtcttttttttataaaaaacacacagtacaaatgtagacacccacaacatacgcacactcact

SEQ ID NO: 27928 - DNA, 5843 bp, Oryza sativa
  unsure (1)..(5843): unsure at all n locations
ctccgcgtcgatctttactcccgggtggtttaccaaccgggactataaatagatctttaggcgtatggcgatcttttttcccggttgatgttatcaaccgggactacaaatagatctttagtcctggttggtaacaccaaccggtactaaagattgaaaagtatcatgtagcttttaaaccgggactaaagatatttttagtcccggtttttaatacaaccgggactattgtaaaatctggtcgaccgaccaaagatggtttcttcaccagtgtagcaacaccatcttttatgtaaaattaactgtaccgtacagatcaaccaaccaagaagcataatatatacaaacttgatcctacaagatcaaattcctatcaattcaaggacctacaggatcaaagcatatcggtataatctaatcttgctacacaggcctcaaattaatttgttcagtttcagaggtgcttggtttgaagcctaatcttggtctagtgtttaaaacttatgaagataaagattaaattggcgtacgacgtacgtaaaacgcgaaagatattaacacatgattagttaagttttaagtattacaaacttgacgaatggatatattagatattttaaaacaacttctatataacaagttttcgcacgaaaatgtaagtttgaaaaacgtgctaacgaaaaccgaggtaaaatctatatcttcatccgaaaagaacatgattcagccgcacttatggccttatcggttctgacaaattagtgtacaagagtacttatacttcactatataaaaaaaaactacatagaaatatgtcttttttactgtacagatggtgtacataagaaaatccacttatgcctgcagtgcgggctgtgcggcccacagttagtattgcacgcctcatttctattctagagacggttatgcgaacatctagaaattgatttttagatatagttgtcttaagcgattgtctttaaaagtagattttcatatgtggtcgtctaagttgtccgtatgatttagaaatgtcactactcgtatgtgcccccaccccccctccctttttttccatattacgaaggtggtattttttaacctggagttcttttgtgccagtacttattaattaattaatacttcgtaaaaaaacaattgaatagtccttacatgtctaaagggtttttttttgcataaaacctatggcttttccacgttttcaaaccgtgtgtacatgccacatgtgcaacgattactctagattgctgtcttttctaacatattaatctctatggtctaaatatcaataaataattgtgaatctaacacgtgatattacatgtaagcaaaagattaaaatgtgaagtaccatatcaatgctgaatatggtccagagagaggacggacgaatcaacggtgtatgttgtaccaccaattattatatcaagatttgtgcaggactggatgatggttgtttagacattgcaatcttataaaagctaggtcatgtcctcatgtgcagttgtcggcctatacataactactccctccgtttcaaaaagaatctaacatattctaggacaacaaatttggacaaaaacttattcagatttgttgtcttggatgctgactccaaccaatcaaccaccgccacttgtggcactgacaagcaggcctgcctgttggctagataagacaaactttgtgtctctgtttggtacagctttagatcacaaatccatggtagatttgtattttgtatgttaaataataatggtttaaaattttaaattatatataaaatatgaaaaaaatgattaatcaaaatgttatcaatgtaatctagatccgctgattttgtacccagcttcaaaaaatttttgatccagagttgtgccaaaaaggatttgtatatatatgtttatgatctttttttttgttctgattaattcctcctcctttttcatacatggtccatagcttgcatcctgtactaattaagtactaacagcctaacaggtaggcacaggcaggtccgaatataatgctgaagtgagaccctgaaaaccatgaaagctctccttgctaatcttgtccctgttgtttgttaatttagttgaaagtctatgatggttgcattagaggagattaattagttggaacttggaacagctctttcaagaaaattctttgccctcaattaatccacttgctatcatgagccaatgctctttgcatacaattgatcgagattggttcgagtttgcaatatcacgctgttacctcacagttatcatagttaccccctcagtaactaccttagtttttaaccttatagcttttatggtaaccacatggatactagggtaaccacgataccgtcaggtagaggtaaccatcactaaaatggtaagggaaaccatggggtgggctacgcttgcaatgctcaatttctgacgaaagactttttttttctctacgaaacacagtacaagaaattcacgtatatatacgctacacactcacacctatgaatacgtataggtacgcaacaaaccacatttataaaagccaaacttttgctatgtgtatctctattgtaggtgaagatcattagatcaagaccagagttatatatgttccatcatcctaaaacgtacttccaaaagctctaatcatgagcactactcaagaccaaagtggatcatgcatgtaacaaatgaaataagataagagtcactggcaaacaaaaatgtggcatatatgcctctgggccccaatcaagcaaataggccaacctggtgccctaattaagctagcttgcaaaaattcaatggacaggtagatcgatcagtgtgtgactacctatagctatatagctttagctagctagcgtcctcacttgtctacaacgacgtgccacccacttctcctcctcactaacacacatccacttatatatacacacatttgtaatttgtatctatatatatttgcaatgcttaagcttgaaacctagcttgaagctagcttaatttgctagccattatagcctctcatcgatatatataccccaatgcatatgtaattaagcttgaatcctatttttcttccttgtttgggttttgtgtttgtgacttgggtcgaattagtttgagagaatttggagggtttttggttttgattttgattttgattttgatttagtttttgagttacatgaacaggttcagaaatgtgttgctacgaaagtgcaagagcctgtcacgctctctctcgaggtcgagctcctacaggaacctccgatccatgtccacccgggagcacgtcgtcgccggcggcgatggcggcattgtcggcggcggcgacagcaaggcggtgtcgccggcggcgacggggcggtggtgttcgtcgggagctcgcggcggcgctacgtgatcagcaacaagcacctcagccacccgctgatcgccgcgctcatcgacgacgacgtcccggcggcggccgccggagacggaaaagaaagcggcggcngcngtggggtggtttaaaagaggaggtcnacttcngcagcgacgacgacgtcgtcgttgaccaagccgatcgccgtcaactgcgaggtcgtgctgttcgaccacctactgtggatgctggacnacgccgtcgacctccgcgcgggcggcgacgtcgtcgacgacgacgccgccatgagagagctcgcccagctctacgcctactagctgctgctgctgctgctgctgatcatggagagagatcagcttaatcaacaccatcaatgttagttaagtactcgatcggtacatgcgtgcatgcatgttgttagtaattgttttgattagttcttaaaattaactgccttgattgatttcatttttaattttgatgttcatttggttcttgcgcgagatctaaaagattattcggcgcgatgaagaagatgatttgatgcatgtacatgcaaaatgtatggaacatggtgtagttattatggtttatgatgtttttcacaaaagaagaacagatgaatgaatttatggatagagttgtttgttatggttttaatctggtctggttaattatgctcttgatgatatgaataagtatagttggccatgcatcatcatcatcatcatgcatgcatgcagcttaattaaggtggttgttgatatgatgatgctggagttaatgtaggtacattagtaggtgctaatttgatgaatgatgcattcttgtgtaccacaagctagctcaataaatttggttgccttcactttgtgcaattagttgacttgtgatcaaagtgaagatgcaatttgtgcatgcaatttgatgagtgcttgttagcttgctgcaagttgctgtctatacagctcatacttatatactacactagcaaattgcccattgtttactatgggtaaaagaaaatatataatgctttatcgtagataaaatatatttttatgaaatatgctattattattattatttacttattttagcttgtgttattcatttgatttaaataaatattaaactattgcatatactattataaaatattaaggagtaatttgtaagactgcaaaattagtggtttcgacggcgtattgtattttatagtagtatagatatgagcagaaatttgtcgaccggaaatgatatttggtactcactttaaaatcagtatacatttattaccttttctaacattatctaaaaatgcctttccaaacatgtatttcgggaagaaaataattattgggggaaaaaggagccctggagtcttgagacagattagacgttaacatctgaaattcaagtaaaaaaataatatctgaaattaaaaatggaggcagtgctagcaaggtttagaagcgaatttgaagttaaaaaaaggcaaaaagaaaaaattaaagagagcgcaatcaagtagttagcaaaggcaatcagatacagctagcagaagtaattaacacagctaacatttgtatcagacagcaagcaggcacagaacagctgaactgaacagatataacggcagttcagagcagacaggccaccaaatacagcacacccgttagttccaacccaattttagctcaacagtccacatctcataatatatgcacaaaatctagcttttgattatcttggattttatgctcttctaaaaaaaatacttcttcaatttcaaattataagtagttttgatttttatcaaagacaaactatttcaagtttagctaaattaatagataaatataataatatttataatattaaattagttttgttaaatctataattaaatatattttcataacatatttgtcttgcattgaaaatgttactgttttttctacaaacttagttaaacttgaagcaaatttgactttgactgaagttaaaatgacttataatttgaaacgaataaactacaaagatagaatgcttcattgtcagtttgatatcatgatgagttcaggtttgaacgtgtgtttgaatcttaacaatcaataatataatctcgaaagcagcaacattatcatcttaaatggagtacataatactacaaacattggagccattagctgtatgtttcccttttgtctagaacaaaacacatttgagttttataagagacatcatgcgcatctgcaaaattttaaagctgtactagctgtcagtcacctgaaattcccatgtatatatatctgttccattcttaaagaagaaatattcaagtaagtattatatgtagctttgaagttactacatgtaattcagtttggtccagattgtttttggcagctgga

SEQ ID NO: 27929 - DNA, 3099 bp, Oryza sativa
tgtctatattcatataaatgttaatgaatctacctgtctaagaaaatataggcaatactagaaagtcttataatatgaaactgagaaaatagtagatattactattttttctataaatctaatcaaactataaacaattttactttaactagagtcaaaacctctttacctaaaacggagggaatactttccatattcatttcgcgcttggccccctcattcgccgaaagaatccatcgggcccacctgtcagccactcatacggctcaccgagttcgtgctggtgtgcagtgtgtagctgctctgatcatgcgcgttgccggcgatttcttctacgagctctgaatctctcgtgcgcatgcgatgcaggtgaggcagctgctgaagaggagcgacgagggccgcgtcgtcgcgacgtgtcgcgcgccggattcagccgtggagcttcagaagctgaggcaggagcacgagcagcgcctcgccgtgctcccgctcgacgtcaccgacgagagcaccatagaggtatagatatactgtgcactatatgcagagattgataggtagtactccctccgtattgtaatgtataacgctgttgactttccgaccaacgtttgaccatttgttttattcaaaatttttgtgtaaatataaaaatatttatgtcatgcttaaagaacatttgataacgaatcaagccatagtaaaataaataataattacataaattttttgaataaaacgaatagtcaaacgttagacaaaaagttaacggcgtcatacattaataacggcgtcgtacattaaaatatagaggtagtagtagtagattagattattctttgcttggattgctagtcgtacccggatagacaatgttgtgttgtgagcagagttacttgatattcagattcagaaggatgatatgaggttttgttttttctagtctgcacagcttgtttcttggtaggaactactagattatgatgctagtgaaggcatgctgaattgagacttgagagttcttaggccattcacagtgggatgatctgtcattcagcccaacgctgccacatctgcgagattcttcaatccagtgccacgtttactcctgggcccactaaattagtccgcgtgaccaactttggtcacacgttcttcggctcaaaaagcgagataggaagcagaaaagcgagagagagagagagagaggagctcccaagccagaaaagtagggaaaagcattacttggtgggcccactttagatacccatgctgccaatctgccatgcattgtgagccgagtagctttgagcgtggtttgcttacgtggaggtagaaagcccctgctgattccgcggcgcagtgtgaatggccttatgtaaaattttgagtcttccggtgacaggcagctgcggcctcgataggagagacccatggatctctgaacctgctgatcaatgcaactgggatcctttcaattccgaatgtgatacatccaggtttatagttgaaatttgagcatagcttttcaggttgcatttgattggttggttggttgttgcttgctgaatttgggatattttcatgttgtgttacagagactacatttagcaaagttcagaagtcatccctgctactggcatatgaagtgaacgctgttggccctattttagtgatcaaggtataaataataactcactgtttcacttccgttttcatattcttgtcgtgatgtggtcggatatcatctgttatatagacatgcttactctaaattgatttgttctatcagcatatgtggccattcctgaaggctggaggttgctctgagaccgggagaggattttcattggttgcaaacatgagtgccagagtcggttcaataggtgacaatggcctaggaggctggcattcatatagggcttctaaaacagcactgaatcaatgtatgcaaatactaacatgttccatcttgtctgcactagcctgcttttggcactaatcttaattttacagataatttgtttccatcagatttacaaaatgttttgctaattttgtgcagtgacaaagactgtatcagttgagctggggaaaaaggacaacattgcctgcatcctgctgcatccaggaaccgtggacactgacctctcacgcccttttcagaagaatgttcccaaggataagctcttcacaagggagttctctgttcagaagctactgtccatcatcgacaatgtcaagaagagcgacaacggcaagttcttcgcttgggatggacaagaaatcccatggtgatatcaatcagcacttcagcagagcaagtgagcaacagtgtccaaaatttgtgctcaatattttctcagcctttattgtgttgttggcaccaaatagatcgtgtcaatgctcgatttgaattctatttggatctacgatgatctgaacataacaaaccaaaatccattttcttttcgcttcctttttagatgcatacaaatgatcgatgtaactttcttttgccactggtggcacaacagttaacccagtgtaattagctgcaacgtattctgatggatgtatatgttgaaaaacttccagccaatttctcaactactgcatcatgtccatatcatatcctgcgacgaccattgacttgtaaagtacttcaaatctcctccatagtactagaaattatagaacattatatgctaccacaggagactcctggtagtctatcattgatgccggattgactacggccatggccggctggggtacgtccaggaaagaagtcgccaatgccagatgcatggaagcttctgtcgataagttgacagtgacgtggtctcccttgcacgatacttgaatcttatgtgcactaatcaacgaagaaaaatatatagtgcaaaccccatatgtactaaaaatctaaaaactactactagatctaaaaataacgtctgataccaatagtaaaagtttgagttaatttgatccataccattgtaaatgtgtatattcagaaaaatatcattacaattcatctatttcgaaccgtgccattgaaatttatgtaaaattagaagtgtgccactg

SEQ ID NO: 27930 - DNA, 13000 bp, Oryza sativa
tggcactgctccctgccaccgccgccgcaaaagtggacgtcgcggcagctgggcaccgctgcctccttgaacatggctctcagcgcctggacattggccacaagcgcatagaacctctccatctgctgctgatcttcctctcctcgctcgtcgccgtcgcgtgggaggccgagaaggagtccttgagcgcgtcggcgtcgcgcgaggagggagcggtccagagcgaggcgagcagcggctcggggcgcccgcacgcgaacgtgcgccgcacgaacgggcccaggtcctccccagcggcgatggcgatggagagctgggcgaggtcggcctccgacgctgccgccgacgccggcgcgtcgccgggctgcttccgtcgcatcaagatctggtcatccctgtcgagctcttcgtcgtgttctcgtcgttcagcagcaaggtggcgccggcagggcctcctctcccagctcgccgtcgacgccaccctcacccagttcgccatcgacgccgccctcgctaggaagtccaccgcggtggtcgggatgaggacggtaacggagatggatggaaacgtgatgacagtgggagacttctaatctatctatctatctatctatctattatctatctatctatctatctatctatctatctatctatctatctatcgattttctagaaacgctctcataccgccatgtagcaccctacaaacactcctatgccgccacgtggcgctctaataaatttagaattctaaaataaatctggtgaacccattattttttaccattggatctataataaaaataaccaatccgatttatcttaaaaaggcccacgtaacccccataggtggataggtgcatgtacgtacgtacgtacgtcatgcacggccccacgttcatcttttctccttttttcttttttcgatcataagaataaaaaccgaattaattatttcagcccatagatattaaatccagcctatatatatgcaaaaatatatgtacatgccaataatatattatttttttcatatattatatatattatttagtacgttgggccccacgtccctccttttcttttttttttctttttgactcgcatcacataaaactcaaattaataaataataattattaatctatctatcttctattatatactaaaagtccattagactttctagaaacgctctcataccaccatgtggcactctacaaacactccaatgccgccacgtggcgctctaataaatttagaattctaaaataaatctaaccgttagtattcatttaatctggtgaacccattattttttaccattggatctataataaaaataaccaatccgatttatcttaaaaggccataaaccgtcgtgtggcatctacaaacgctcctaagccgccacgtggcactctaataaatttaaaaaaaaatactataaatccggagaaaagaacatctaactatccactttcacttaaattgatgggcccattattattttaaccgtcagatttaatctcatacaaacagagagatggaaagaaagaccacgtaccttccccacctctcccctcagtcgttgcatttgccctctccccccgtacacccctctctctccctcccctctacgtataattcttttttcctatattagctaacggcggaaattcgattgaaaaatttcaacatttgtaacatctaaatcatatatcctgaaaaataaacatctaccctttaatttttattaaaattagtggacataacacttcaagccattaaatcagatttatgttttctcatccttaaaaaaaaaacgtacatcctcctctctgttttcttttaggaaatcctctatttttttccctcacattctctctttatgaaagcttttgcaacaataaattttaaataagcatacttctaaatacataatatttgcaacagtaaattttaaattatactaactttttaacttttaaattataagttcaatttttttatctatttgtaccattgtgttatttatgattaaaatcacaattagaatttatgacacatgttgactatattttaaattgtaaaattatattcatttaagttttgttgagaacctttacatgttattcaaacatatatgaacaattattaaaagaaagtgacattatatactatttcatcatatatcacttcaccagcatgcataactaaaacagatttatgaacttcaaaaagttctaaaaattctgaattatgagaaaaacaaaatatagattataccataatttgatgcatcacaaaacatgcataactaaataagatttacttaaaaaataatgagtcatatcctagctgtttgtccacctatatatcattcagagcttaagatagaaatgacctattatgtaccaaattctacttgataaggccatagaaattatatggaagtaaagataaagctaaattttatttctatataacatgataatatgttcagttttagaacaagcaagcaaaagctgcatgtgtattgtcctgtgtatctatctattatatatgaaaaatccattaaacttcctaaaaaaaactctcaagccgccacgtggcattctaataaattagagaaaaccttacaaattttgagaaaaaagaaaaacatacagccctcgatttttatttaattcggcggacccactatttttaaaccattagatttatttaaaatacatctcaaataataatatatatgcgtacttccgtactatactactcacggcaaaaaaaagaaaaaaacgtaattaccattgtaagaagaaggattaaccctgccacagtcccacctaattggtacgagagaaatgtatatacgtactgttcacctaaaaaacccaaaaaactataaaaaagttctcacatgtacaatacgtactactatccaccggattgagaacaaaaaaaatatcctgggcatgtacatactacgcaccgtcaacccgtccctaataaagttatcaataatgttggatattttcttgagaaacaaagtacaaatgtgggcgctcacaacgcacgtacacttacccctacgaacacacacacgcacactctacccctatgagtacctctgagagattgggccgatatattttgagatcgacaaagtcaccataaatgcctcgctgtcgatggatacgtcgtctgaaagaatttgtcaagtccgggacttgaatatgagtaggaaatttccaccacaaggaacctaaccagttgaactatgttcaattcaaaataatgttggatattaaaacaaccatttaaaccagtgaaaccattatttttaatcgttagatctatcttatataagaaaaacaatcgtttattcatggtacatcacatttcaaaaatattattgtgcaattatattcacgttaggttgcgtagaacctcttacccactctacatgaaatgtttatagatggattgtctctcaaactatatcaatcatattatgctatataaaatttagtggagtttcatgtgccaccaaattcatcctctaataaaccatgataatatatatgcaataaaagaatgaaaaacacactacttttgctttacacttacttttactttcgttgaaatattttctaaagaaaataagtctacctttttttcaaatgacgaagaagattagaaataattgcttatagatattacttaaatatgatataatataaagctaataggttaaaaattataaaaccaactaatgttaaaaaaaattacggagaaatcggggtagatgttctctggttaatatatcgcttttagtgtctcaaacttagtgtacgacacatgcccgcgcatagtttctcaaaaatgtcaaaaaaaaaaaaagaagaaaaagacgattgactgaccagtgcctgactgcctgtagtttgtatttaagtgatcttattttattattactctctcagtccctaaatatttgatgtcgttgacttttttaagcatgcttgaccgttcgtcttattcaaaaacttttatgaaatatataaaactatatgcatacataaaagtatatttaacaatgaatcaaatgatatgaaaaaaattaataattatttaaattttttgaataagacaaacggtcaaacatgtttgaaaaagttaacggcgtcaaatatttaagtacggaaaaagtatatcacattatcacatatcatcgtcggtaagggactgtttagatccatttggaatggcaaatggcaaatggtaaaagttttggtggcaaaagttttgacattgcaaaagtactagttggtgtttagatgcatgttaaatttttgtcattctaacactaaagtgtgagagagaaagagagatggagtggtcccaaagcactttttggcacaatttgctactatggcgtagcaaatgccaaatgccaaattgtcaacttttgctactagtgtttagatccaaaatgacaaaaagtgctacaaaatggtaaaacttttaccattttggaggatctaaacagggcctaatataattgtacaaaatgaaaatctcatccgtgacggagaggaaattggaccaagcagacgcggcaggggcgcaagacagaatacgagtcaagcaggcaggagccatatatcatttggtgcacccaaacgagagcccgtggtcgtctactcgtccatgagattgcgtcaaaccgacctattcggtggttgcgtcacccgttcgatgacttcaatctacccgtatccgatgggctacgcaattagccgatctgatacggccgatttttgttgataaaattttggactttgttagggattcctgtgcccgataattttctctatgtacaattgcttatttgatgaagcataactatcaattttattttcatttttagtttgtttatttgaccctatattttaaaatcgaagttttcgtctgaccctgttttcactccactattagatcctccattagatcgtctgaccctaagacatcatttagaaaaagtaaaaaaaaatcactaccctgatgtgactaaaatactccattactagtcaaccctatccccgtcccaacccccacggcccacctcatacattcccgactcccatcgctggcggcggaggttagccagggtcgagggagtggtggcagtggccgtgtgccgagggagggagaggtggtggcgacgacggtgtgtggaggaagggagtggtggcatcggcgcgcatagggacggagcggcgacggcggttgctgcgttcggagaggaggaagggagcggcgtcagctgctatcgtgctcagagcggatggagggagcgacggctgctgctgcgctcggagcagaggaagggagcggcatcggcggctgttgctgcgcttgactgcatcacggcggcgctgggtcgcatcctgacccatcattgatatcatctctttgaccgctaccgtgtttttgtttcattgtatgtaatttgggatggacaaaataggacaaacgctatgtcaattctttaaaaattaagtcaaatttgtcaaaatgaagctaattaaattatgaaaatgaagccaaatctataaaatctatatcaaattctttacaaatattttaaaggtccaaacaaacaaaatgttttcatacaatagggtgaaataagcaaggacagaaaaaacaaatcattactcagttaacatcgttatcttacctagacggaataaagtcaacctttatcttcaattttaaaaaacagggttaaatgagtaaacctgaaaaaaatgatcacattagtagttaaattttagaacatgatcaaataagcatgcaattaccccttttctctatgtatagttcgaatttagatttgcatttgttttgaagagatttatatcactataaactatcttctcaggtttttataaattatttggagaacaatcatgaacgtgtaaaaaatgctttatgctggaggtctagttttgtccacatatatgcgactatgcaagaggattgaccggttgagaagagtaacaacaaaataaggttcagagatggagggggataatatatgtaggtatctgaaggatgttattatctagctgatcagctcagtgattactcagtagcagcgaggcagtgacttgacagagttctgaaagtaggtctataggtgtaacagagagtatacaaatatacaatacgccaagctagctagagatgatggcatgatgcagctactcttcttctccttcctctttttgctgctagctcgtgaaacctccgccgtcgccgccgatgggtgtagccgccggtgcggcggcttggtcgtcccctaccctttcggcttctccggcagctgccccatcatgctgtcctgcaacgtcgacggcggcagcaactccaccgcggcgctgatcctccaaggcaacgacgctacgacgacggatcgatcgtacaccgtcgtcgacggctcgttcaactcgaccgcctccaccttcaccgtctccgtcccgccgtcgtgcaaccgcaccgtctccgacgccaggcggtggctctccggcgccaactacggcgtgtcgtcgcgcaccggcctgttcctccgcggctgccggaacgcgacgagcagcgactgcagcgtccccgtcgaaaccatgcttcgcacgacgaggtgcagcggtggaggaggcaacgaaaccgcgtcctcctccctgacgtgcatcgcctcgctctcgccggcgacgccggcggagaggggtttgggcggcctgttcgcgcagtgggagaaggtggaggagcctaggtgcgagaacctgctcacatccgtgtatggcgatacacgggaaggggtgttctcgctggagttcgcggcggcggagatggggtggtgggtcaacgggagctgcggcggcggcgtcgacgacctcgggcggtgcgcggcgaacgccacgtgcatccctatgcagaccccgagcggcaactggggccaccggtgcgagtgcctgccatggatggccggcgacgggttcgccgccggcgagggatgctatgctggtatcaattgtgaatttttaatctctccaattcttttattttccctttaaaatgttcgatacaaaaaggtcaagattgagacatcaaggtgcgtacgaccacgtagactagcatagtcacccaacttccatttagtgaataagaactttgattgaaattgcgctgcaaaacttgcttgaatttactagtttgttaggaatcagttcatgataaaaagttactttacatttaggagaaaattctttttcaacttcagtccaccatgtgcagttatcccttgcatattatgtaaaggggctagctatatttaagacaccatattccatgtattctaataaaaactagtgaaaatgtcttcacattataaattaaactatgtttataatatagctatctataaatttttaaacttataatataattatgctgtaaatttcaataattacactataatgtttctcctttttcgagaaacacggtacaaaagcgggcgttcacaaacgcgcgcacactcatccctatgaatacacacatacctacactaaaagaaaatagccgtaaatacgagcaactgtgctaagtctagaacttgatttcaggtgagttggttccaccacaagaaacctaaccaatttagctatactcacttcacacattataatatttatatatacaccttgtaagaaaaatataataaagagtaaattacactagcggtccttaaacttgtaacgaggtttcatttaggtccatgaacttgcaaaacgcacatcgagatccttaaacttggtttaatacatcatcccggtctaaagtctcgttttaccgtggttttgcttacgtggcatgcactggatgatggcacgtatcatcccggtctgacgaggcaatcggtgagcttcttggcgccgtcgacctccacggcgaggagaccctgcaggaagccgcacgcgccgacggccaccatctgcttccggcaccgccgagacggcgagcagcacgaacactgggaaccgctcgtcgacgctgccgcggagggtgctcgggttcgcctggctgaactgcacggcgtggcgcggcgacggcgatgggaaatggtgcggcgccgcgacgccgtaggagtccacgccctgctcacggtggccgtgctgctcggcggctgcgtactgctgccggccgtcgaatccaaactgccgctgcagacatctcagaccattagcatctagcatctcgacgggaagaacacgatggcagggacggggaggtcggaagcgaggcgaacctgcttcatggtggaggcggcggcggcgccgtcgaaggcgtcaccgggcgagacaggcgcggcggtgggcggaaccccaagagggagaagcggtcgaacaccgccgcctccttggaatcctcctccctcgccgccgccaacgacgacgatgacctgaaggacatgaacgcttaccttggacgccggaaactgccactgcatcgctgccgacgggcctcctcctcctccgaggtaatctgcatcacgagaaactacgaattcactcacaaatcacgacgcacagaaaaaaaaaacaatctgaaatcgatatcatcccaaatccatagctgcacgcatccatctctgctctggcagataacatgcccaaaatccgagctcgcacacacccccgcatgagagagagagagattaaaaacaccggtaggatctcgcccgagtcgagcatcacggccacggcggacaccgccgccgccgacagcggcgacccgacggagtcaacgagcgcgtccagcgccgtggcgcgggaatccgccgaccaaggcagagtcgcgggatcagcacatccgcccccgccacaaccccttcacccccaccgttccggggcgatacgagcagccgcgcgtcggcggcgagctaggacagctcggcagccgaggacgacaacagcgacacggtgtggagattcccggcgatggacatgagcgcggaggcgagggggcggaggaggagcagcgcggagtggtgggagagcgactgcgagagcaaggtgagcgacgccacgccaggtgaggaaggagagaaaagatggggagaaaaaaaaaagagaaaaagaaaatttagctatattatcgtccacgtagccaaaaccacggtaaaacgagactttggaccggaatgatacattaaaccaagtttaaggatcttgatacacgttttacaagtttatgaacttaagtgaaacctcgttataagtttaaagaccgctagtgtaaattactctataataaatggccagctgtgaaggatgttgactagttagtactccggcctgatatggttagagcaatgacttggactagtgagtcttccatgtgccgagtactacaacaagtttggtgttatagaaatcgctaaaaaattttctataaatctagtttaatttttttttctataaatctagttaaacttaaaagaagtttgacttaaaaaattcaaaactgacttataatatgaaacacaggggtagtgtattatcaattaatacatcagttttgataaccattcagattttcaatcgctcgaattatttaatatatcattgaaaaaaataaatctgttcaatgcaaaaagggacaagactgagacattgctaacgactacgtagtcttttccacagccgcctaccttgctccaatatataagaacttgaaatataaaagcaagatttgtatgtgaaatatgattgtttgtactttcagataagagaattgctctggtccttctttttgtaccgcaaggtactagtaccgcgaggtactgaaatcccaaccgttgatgatgacagatcgaatggtcaggattagttggtacctcggggtaccgacttggtcgtggtgtggcctgcgcgattgagcaagggtggaagggtagaatcgtagtttcgcgtttggaatgaagtttggatcggtggatggtttggggaagtgcggcatatccttccagactagcatatccttcctgactagcaaaaccctaccctttcacccgatctgaacggcgcggcggcggcggccacgctgaaggcacggcggcgacggccacgctgaaggcacgacggcgacggtggcccctgcacgccggcggtgccggcggcgacggcggcccctgcacggcggcgacgacggcggcccctgcgcggcattcgagaagctttggcttgcgctggaccatgctagcacaacaaatccaaccaggcggcagtacgaatggtccagatagagcgaaagttgaggaagacaaaatgaaacttgaatttgaaatggccgccaagattttggcttgtaaagcaacatataagaaaaaaattacaaagctaaacaaagaggcagaccatgttaaaagttggttcatgggttccctacttgttattgcaattcttatgtacaagatcttggagtatatgtacgaactgtattgttatgaatgcaattttttttttctgaaatctcaaataaattagaaccatccggctgtcagtctcaagcatatcaagcaatattggctcaatgttaccaaatttgctagcacaacttcatactcacatacagtaaacaattcagcgcaccaaattgcaatacatcaaacatatcttcatttccagaacgcaccagcaccaaaacacataattttcagattcgcatacaccatgttcacatacagttaaacacatcaaaattcaaccatgcgagcacaactcaaaatagcagtacatccatcatactacaggaaagcacatcaaagattcattacagtccaatgtattcattacgaccaagagaatgacaaaactatgtaaagtgcatagcaaagggctgcttctacttcttatccatctcacacatcttcttctactttcctgaaattgtaggaatgacaaaacaactttgagacatgattgcaaaatgtaatagcctataacttgaagccgtcatcctcagtcttgaatctcatagcagtaatcgtacgatactcctcttcctcctcaagggtcctgaaattgtcagccatatcttcactcataaagagtttgcctataaagaaaatttcacaattcattctcagtactcaaatctggtcaaacaaaaatcggcacaattaaatcacaaccgtctacctctacgacagcgatgaaatcacaggagtcggcggcaggggcaacaagcacctgcaacggcggcgacgactccagcagcggccgcgacgggcgcggggggcggcgttggtgacgtgtccccacggcggcaggggcgacgtgctcctgcggcagcggttgactcctgcggcggcggcgacgactccagcggcggccgcggagggcggcgttggcgacgtgcccctactacggcggcggcgacgtccaccggcagtagcccgtgcacctgccgcggcggcacttccggtcaagcgggtgggtagcccttgctgcctgcttggtcgtggcctcgtgggatgggatggctatggcgcttcaggatgaggtcgcccaaaacctgagatggatagcgcacgcgatacagcctcatgcccatcgtacccctttagcaatggacggccggataaaaactggtacctcatggtaccagtaccgtgtggtaccgaaaggaggacgggagaaaatctcttcagataaacttgcgggggagatttatttttacaactggagtgcccatttccttctcatttctcaaacagtcaaatatcaatcaaatagttatatttttttttaaaaatgataatattgatacaacatgtatgcacaatcttgcacaattatatttcaggtcgacataagagatctacaaagcaaaaaaaattaaattcgatcattaatactattctctctatttcaaattacttgttgttctatatggtccaaagtcaaatattttaatctcaatcatcaacttttataaactcatagtaatatcataagatctatttttttagttatatcatgataaatactttcataatatataatattcacatgttattaaaccatacgattttttagaaattaatagttgagatagacatatttgacttaaaataaatataaaacaacaaataatttgaaatggaggaaatactaatattgtttaaagccaaatttgttttttttgaaatgaactgtacgatacagtgcgaggttgcacgtactatatgagtttagttcggtatgttcatgtagcgatatataggaaactattctaactatttagataacatgtaaggatgaacgccttcatatttaagttgtaaatagactaattcgtgcgcctttttgtttttttattgcaaaagtgtactattttctagaagtggattttttcccttgaggggacatcccctcgttttatacgtgtcgttcaaaaagttataaaaaattaaaaaaaattatcaagatagatcaatatatcttttctcaaacatgcgagctaaaaatcgatttatacaattcaaaacaaaaataaaaaatttgtcattttttttctacttgtataagttgaatttgaatttgtgtatttgtgaagtgacatatcacatatttatctgtcctacttttttttttcaattttttgatgattttttaagtaacatgtaaaaataaaggaatatcccttatgatttgagttttccctctcttctctcacgatcgactgtctcttcttcctcaatttccaatgcaggaaaacgtcgtcgaatgcgggtagtagagtttgccaccgccggttcggtggcgttcttgctctgcctcgctctctctgtttggtgcctcttacgccgccgacaatggcggcggaataatgccaagctcacggtgaagatggcgcggaaacatct

SEQ ID NO: 27931 - DNA, 4630 bp, Oryza sativa
ttctgtcatcaagtgccgcgcctaggatccttttacttgcagttgagtcactgatatatgggtcatagtaaagtgaaaccaacatgtcagtgactcagctacacgtacagttaagtcagaggatccgcttccaccgcgcctatatgcgcggcaaggccagctagattcgcatcttttcccgctcgccttcatcgaaccacccttcgtcgagcaccttgcgtgcatgcccatcgagctcgccatcgccatctgcctcgcccttcacctcgttcgccgacgagcacctcccgcctgtgcatgccatccccttgccgtgctcgccttcctctcgccctggagacctagcgcctagagtgccgagaccgccggccgaacacttggcgtgcgtacgcggcaactcatccagctgctgggcatggatcagccgctgactgggttcctatgccacgcgcgcgcgtcaaagccattgcttgcaagcaggcaacaacctcatctagttcgtcacatgctgagtcacgcacgcacgcacgctacactacgacagatccgggcgccactcgtggtgtattacctacgtgttcaggtattattcatacttcaatgcatcgagagaagcacaagaaccagaaggtcgtccaagtgcacgaggaaacacagagaagaaatcatgcatgtatgaccagagaaagtattctaaactattaaaagacctcgttcggttaatctctcccataaagaaatcgcggtggattcagagaagatttattctacatctattgtagtactgtgtaatataattattctctctcaatcccttccaatctctctctttgggattaaattaacatgctttaaaagggaatgtcctctcgtgtgctgcatattaccttaaaaaatgtttgtaagatagattaatatgtgatatatcattttataagcatacaagtttaaatatgtcttctacaagttataataaaaaaaatataactgtatatacgcatacaagtcaaaatttaatttaattttttacaacttgtagaagttgtatttgaatatgtttgtggagcgatataccatattttaaaatatatcttgctattttttcagttcttttacatctatttaaatggtaaaagggggcattcctattagaatcttttctgttcattagctggtcgatcgtagtgataatagagaggggggggggaactattttttgtccattaggggatattcttttgcatgccacttaagtatctattaaaaagtttgaaaaatatgggtatgataaatcaatataaaacatgtcatttcacaaacataaaacatactattcgctgtgaaatttgttatgttttctattcgtataaagtttaaatttgtatatttgtgaaataatatatcctactttgcataggttcaatacgtaagaattcacatttggccagtaaacccaagcatgtgcatgcatgcatgtccaagagggaaaaaaaattggtccaacacatgtgagtagctagaaacggcccaagtacgcgtaagagtagaattgtccccgcttaaaagagacgaactgcatatgcgtacgtccagtcatccacacaaactcaaatttgccatcaattctttcataagtctctgttataaaaccagccctaaaatcgacatcggtagctaaacgcgaagaaaacatcacaggagatccacacaaactctaacagtctccatccctaattcgtcatcgaaaaagccttcctgttcctaggaactagtggcgtcgctggctggccatggcctcggaccttgtcatcttcctcctcttcctcgccgtcgtcgtcggctcgctatgcgagacggcaatcggtcatcacaacctgaacctcccgtatcagccgtcgtgctcgaccaccggcaactacaccggcgacagccagtacaagaagaacctcgaccagctgttcaccagcctctccggcggcgccatcgccggggactggttcaacaccagctcggtcgggacgggcgccgaccaggtgttcggcctcatcatgtgctacgccgacagcaacgcgacggagtgccagaaatgcctcgccatggcgcccgctgtggtccagcatccgtgccgcggaagccggtcggtgaacgccaactacgacgcctgcctcctccgctactccgacgagcccttcttctccgagctcaccacctatggcggcaacaccaacgtttccttggacgtcgacgacacgaacctctacgtcgagaatatgaccgccatgaacgacacgcggtggcagctgatgagccagctcgccgagagggccggcgacaccaagctcaggctggacaacggcagcttgccgtacgtcgactcgaagctcggcacgtcggcgttgtacgggctggcgcagtgcacgagggacctggcggcgagcgagtgccggaggtgcctgagcggctatgtcaatgacctcagcaacaccttccccaacaacagcggcggcgccattaaggggtacagctgctacctcaggtaccagctttggccgatagacatcacgctgcccccgccgccgtcgccgcctccggcaccgcctgcacctcctcctccctcggtgtcgataggactcgtggccggattgaccgtcggcgccgtctcgttcgtggtggttcttggtgtctcaatctggctcctcttgcaccgccggcggaagcacgccggcctaacgatggagcaggagatggacgagggtgacttcttcgacgatgaggccggtgactttgagaaggggactggacccaaacggttccgctacggcgagctcgccatcgccaccgacgacttctccgacgagcacaagctcggggaaggcgggttcgggtcagtttacagagggttcttgaaagaattgaaccttgacgtcgccattaaaagagtgtccaagagctcgaagcaggggaggaaggagtacgcgtcggaggtgcggatcatcagccgcctccgccaccgcaacctggtgcagctcatcggctggtgccacggcggcggcgagctcctcctcgtctacgagctcatgcccaacgccagcctcgacacccacctatacagcgccaacgccggcgcgctcccatggccactcaggcacgagatcgtgctcgggatcggctcggcgctgctgtacctgcacgaggggtgggagcagtgtgtggtgcaccgcgacatcaagccgagcaacatcatgcttgacgccgccttcaacgccaagcttggcgacttcggcctcgcgaggctcgtcgaccatggccggggctcccacaccacggtgatcgccggcacgatggggtacatggatccggagtgcatgatcaccggtagggccaacactgagtccgacatatacagcttcggtatcgtcctcctcgagattgcctgcggccgaccgccggtaatggcaccggaacaccaagctgagaaaggacaagacatgatccaccttgttcaatgggtctgggatctgtacggcaaggggagaattcttgacgccgccgatcaccggctcgatggcgagttcaacggcgggagatggagcgtgtcatgatcgtcgggctctggtgcgcgcaccctgacaggagcgtgaggccggtgatcaggcaggccgtcagcgtactgcgaggtgaggcgccgccgcgagccctcccggcgagaatgccggtggcgacgttcctgccaccgattgatgctttcggctacacatcttcggttgtaacagggagcagcaccagcagcggcaacataggcgttcctaacactcagacatcgtccttgctaagatgacatatttgacatctcagcaatgcattttgtgtataagatcaactgcacattggattaatttttttattaatttttttagtgtatctttggttgaatgtggcccgttgaagatatgggatctaagggtgaaaattcgttgctactacacctctatactaggtgtagtagctagtgtagtagaagggtagttatgaaaagaattaatatttcttgtataattattaattttttttcctatcatttgattcagtgttaaatatacctactatattattaaaggaatagaaaaaggagcctccacgttcgctctcatggcctagaaattctcacattaatcggagaaaaagaaaaagcagagtccatatagaaatacaatttagaaatagctgaaattcgaaattaaaaaaataaggaatattagaagaggagactagagtccatatagaaatacaatttagaaatagttgaaattcggaattaaaaataaagaatattagaagaggatactggagtccatatagaaatacaattaggaaataactgaaattcggaattaaaaataaggaatattagaagtagagtatagggtccatatagaaatacaattaggaaacaactgaaattcggaattaaaaataagaaatattagaagtagagtatagagtccatatagaaataaaattaggaaacaactgaaattcagaattaaaaataaggaatattagaagtagagtatagagtccatatagaaatacatgaaataatataaatttggaattaaaaataagaaat

SEQ ID NO: 27932 - DNA, 649 bp, Oryza sativa
aatgagaaattgcgcgggcagttgcgaatttatgacttaaccaaagggcgtcaagtgggtagtcttctggctgaggtacaaattttacctgtcccagttcgttttctaaccattttcctgcgacaatatgtttttagatattttattattgatcatgctatgaatagtgagcttccatttggaaatgtagtttgctgctaatgttgctattgcaattagaaatataacaataatattgtgctgtagtatctgtggtaaggttttctattaaaacttacatcaatgtgttgtttgcttcgatttaaacagacccgtaaaccggaaatgattgttgcaagtagctctggtgaatttttgggtattacaaataagagaaagctccatgtatggaggataccaacaaaaaatttcaagcccgacaagataaggaagataaagcttagccacacaaaaaacttgaacacactggccttccatccaagtgagagaattggtgctagtggtgatgcaacggggcgaatactgatcttgagagttttggaaatgcaaaagtttcttgatcagatggcacaaaatctgaactagattaggaacagggtgatgtgaagggtaatggtgatgcacatacttgcacttcatggcattggca

SEQ ID NO: 27933 - DNA, 1234 bp, Oryza sativa
gctcacgagtttatgcaaattttaacattttaaaaggaaaaaaaatatgttttctatttaaaagatccaaaagtttgcacccgcaacaaaagattgcacaagttaaagaataggacaatcgctaccgtagcctgttggagtcacctaccgtctagaaggatgcttttttatgaagagaaaaacatgccgctcctcctcaaacccaatcggatccagaattgcagattcatgtgacaagcatcaatcatcatgcctgacgtctgatcttcacaatggtaaaaaaaatgttgaacaattatttggtcagtgggaggaccgactggacagtaaccttgggtaatctgaccatccgaaggataggcagtaaaagaaactccattatgttcagacactataagcaatagaaatgttccatgagatgatcgcgatcttccgtgaaatgcaattctgaaagtctcagattttcaatgtgttccgtttccagcaggctggtagatcagagaaccctatgactgtcactgattcactgattttcaatgtgttcttaaaccggtagaatggatatgtagcctgaaaacaggacagttaacaaatcaatccaatttgggagcttcggaagcgtgtacgtgataatccatagtctacaagaaaaggaacagggcctaaacaggggtaaaaatcaatccaattttgcaattgatctgatacataaaatgcatgtcaaattatcaatactcaatatgtcatcttagcaaggacgatgtctcagtgtgaggagcgccagtgctgccgctgctgctccctgtcacagccaaagatgacgtgtagccaaaagcatcaatcggtggcaggaacgtcgccaccggcatcctcgccgggaggctcggcggcggcgcctcacccctcagcacgctgatggcctgcctgatcaccggcctcacgctccggtcagggtgcgcgcaccagagcccgacaaccatgacacgctccatctcgccaccgtcgaactcgccggtgagccgccggtcagcagcgtcaagaatcctcccattgccgtacaaatcccagacccattgagcaaggtggatccggtcttcgtctacctcggattggtggtccgccattatcggtcgccggccacaggcgatctcaaggaggaggacgccaaagctgtacgcgtcggactcggcgttggccctgccggtgatcatgcacttcgggtccatgtacccca

SEQ ID NO: 27934 - DNA, 825 bp, Oryza sativa
agagaggaagagagcataagtagatgacaggtgggtcccacaaatttttttataatatagtgctgattggactgccacgcgcacgtcacgtggaccaaaaccaccgcggattggatcgaggggggtaatttgtccggtttacatagttgggggtgaagaatacccagttttgtggttcgggggtaattcggacaaccgcgatagttcgggaggggggtaattcgtactttttccaataataaatatggtcaattatcaactgattgagtgtcgttttttaaagagatgctatcgattccaactgttttcatcccttgggccgtagcaacaccgggctgaaattgtcacagcgaggggaaaaaatggaaaaagaaaaaaaagaggaaaaggagaggtcgacgtcgatgtcaattgtcaagctcgatttgcggcggtggccggcggcgaggaaacaacgggccggagatgttggtcgtcggcgccgatgagtggcacggcagctggattgattgggccggagcccactggatcattaattacgcgtgcggtttggcccgaaccaactgcagggttgggtgcacgtactaaaattcttactaaacctttagctttagtaacagtcatattatggtggtttcatgttgctgaattcggtggttgtctaatacacattttgtcctgtaataaaacaatctaataggatgaaacataactgagtacaataaatcctgatagcatctaatttgttttataaaacggagagataatatatgaatttatagtggacatgtcacatgtgtatagggtaccgagctcgaattcgcc

SEQ ID NO: 27935 - DNA, 897 bp, Oryza sativa
ctcagcatagagcgaaacaatccttgaatagattggggtgcatttgatgttgccgctttcatccttcattacaatgccagggcggacttcaatgttctggttcaccctcaaaactccctataaaagaagcatcacaatttaagtcatacctaataacccaaaagtagtgataaaaaatctaattacatgacacacgagggaatacatactctgaggatgctgccaccagctacaccacccctaatttcatcaacctctgaaccaggcttgttgacatcaaaggagcgaatgacaatcatgtttggaggggaagtgaagttcctttcaggaatggggattttcttcacaatgtattcacatatcacatcaatgttatacttaagctgagcagatattggcaccaccggagcaccttcagctatggtaccctatagagaaataaaataacccataaacaaatagacagacagatgtacccatctacaagataataatggacagtagcaacctggatgaatttctggatcgcttcatgttgattcattgctgcactttcctggataagatcaatcttgttctgaagaataatgatatgttggagacgcatgatttcaaccgcagcaagatgctcagatgtttggggttgtgggcagctttcattggctgctatcaaaagcaatgctccatccatgatagcagctccattaagcattgtagccatgagaatgtcatgcccctgttaagaagaaataggtatgtattacatatgtaatattttctcattattgacttcgagagatcaaaaaataaaaaacaatatgcagtgacccataaaaatatttgagatgacatcagtttatacttcttatcgggtaccgagctcgaattcgccctata

SEQ ID NO: 27936 - DNA, 1314 bp, Oryza sativa
agtgcttcttatccatataccctgttctccaaaccctagcccaaactccatccactccatccactgtgtcgccgccaccagcatccactccgccgtcaccaccgtccccttcctcctcctcccacccgccgctgcgggcgccgctgctcatcaccatctccttcaccttctctttccccaccctcacgccgccgcccaccacgccgtcgtcctcctcctcctcggtcgcgcttcgatccccatcgccatggccttgggtggcgtgtccatggccatcatcgccatggccttgggcggcggcggcggcggcggaggcgggagcgtgaaggggagggacatggcggggagcggatgggcggccgacgcctgctgcacggcggcgacctcctcgacgcggcgctcgaggcggccaatgcgcgcatcggcctcgtcgcggaggcggcgcacgccgtcgagcacgtggtagggtcgtggcgggacagccaccgcgcgatggcggtgtcggcggcctccatacggcgggccagctgggcggtgcgttacatgttccaccgccggcgccaacagccgagcggctagcagatcaggtggcgatggaaggccagcgccgccgccgccaggaggaaggcgatggagggcgcggaggtggaaggggagggcaaggggaagcactggatggaggatgacaaagtgggccacgtaagctattccccgagttctctcactaaacgccactctgctctttgctcttcctccaggaccccaaggccatcaagatacggcggcacgccttccatctccaccagtgcgtcgccgcctgccctcccctcctccgaattccttggctttgcttgcgagaatttgaatcggattgacgaatcgtgtgcttggttggtttctcctccaggtcggggtcaaccacgctttccgcgtcggcgctacgtactcctgccgccgggatcactggcggagtcgccgccgcttctcgatcgcatctgcttggctcacggccactcagggggagttgcgcttacctccgcgtcgctcgtcgagccgttcttggtcgaggagcagcacaatagccccagccaggttggatttagcttccgcaccagtgtgatttgaggtgtttctactttctaatgataatttttttttggttgcttgcaggatatgcaaccgaggttggtaccagaggctcatcttgatgtgctcgttgaggtgaggatagtaaactgatgcatatcttcgggagcattaagactcgatatcaatgtttgttaaattaaggatacataggatcatgtgtgtagg

SEQ ID NO: 27937 - DNA, 831 bp, Oryza sativa
tgcaagcttggttatgctaatgcgaaaatctacaaatgtgaagacgagaaatgcccacgaccaatgtgctacaagtatgcaataaaccactaaatggcatgatttgttctatgcaatgaacttccatttgtattaccatgttaaaaacacttatctatataaaattagttttccagttaatatctggtagaagttatgattaaaatctcatgattgattctccagaaaagtaacttataattatctgccattcacctacttaggactgctgctttgatgtcaagctaatgcatgtgagctctgcactatatgttgactttttttcctgttatataaagggcttatggaagtggaaaagaagatagccctcactgtgatgtgcctgggtttgaaaacactaggatgaagctactgagacatgtttcttttgttgattgtccggtatgatataaacctcttaccctttgttgcatatatgaatgttctttttctcaagacatttctctgagcatttattgtcttcctgaatgtttcatgatattactttatgtggcttttcactagcctgtatatttgttttaaaacattttgttccgtcaattatgatcatggggtttcacttgcattggtttttatatgcaaatattttttccactagaaggcacatggccatacaggagtgaaggatgtagataagaagtataaactgatgtcatctcaaatatttttatgggtcactgcatattgttttttattttttgatctctcgaagtcaataatgagaaaatattacatatgtaatacatacctatttcttcttaacaggggcat

SEQ ID NO: 27938 - DNA, 1408 bp, Oryza sativa
ctgagattgttgtgtgaatgtatttgattggatctgagattgttgtgtgatgtatttgatttgtgtgtgatgtgaatatgtgatgaattttgtagaagttgtgatgtaattttttttttaagattttgtgatgtatttgaatatttgagatgatcgatttgtggatttcaaggcaatttgaggatgattgatttgggattttggggatggaatggggtgaaatcaatatatttaaaaataatgaagaaaaaaaaataataaagaggaaccggaaagagcaaccggattagcctctttagtcccggttggtatgctttatctttagtcccggttggtgttaccaaccgggactaaaaatagatttttactcccgatttttttacccgggactaaagatagcgatctttagtcccggattcgtagttccggtttgaaaaccaggactataggggggttacgaaccggtagtaataaccctttcttcaccagtgctactagctttggatcagagtgtagatattggatccaacacaaaaggtaataagaattattacatcttgtgtcctgcctaattggtaattagtgtggcactcaacctaagcttagttggtaattatgaaaaccaagggtacgtagttcaggaggtttatgttctaagcaaccaaaattagttacactacactactcataccaatttccactcgctcgatcaagaacataacattctttgaattggaagtgtacacatcaacgacctgtccaggctagaaactgtagcaaattttataagtaggcctaccaatctagctagcagcttaattagttcacgcgtcataaaataaagtgagcatatagatcaccaagttgtcccctaagggtctctttgagaagcctaaattcccactttatttttgtagggtctcgtttgaaaaataaaaagcgacagcaaaaaactctaaattgcgaagtgagtatagttcaattggttagatttctcatggtgaaaacaacccacccaggtggacgggtttaagttctaaacttaacacggatgcttctatttacggctaatttttctttcaatggtaggcgtcgggtacgtactcatgacagcaagacgcccgtggtgacttcgttaattttaagataagttggcccagttttttttggagatgctcatatggttattttagtggtaggcacgagtgtccatcgatagcaaggtgtccatgatgactttgtcaatctcaagacatgtcgacccaatcttttaaaggtgctcgtaggagtgagtgtgcgtatgttgtgggtgtctacatttgtactgtgtgttttttataaaaaaaagacctctaattatttctaaaatttaaatttagctatggctggtgagagcctgatcatggtt

SEQ ID NO: 27939 - DNA, 1616 bp, Oryza sativa
cgagctcggtacccctctttggatgcaaacagaaaagacaggatagatggagaggcatcatcgctggtttatgtcaacggttctcatgagtatgttatatttgatccccgaagcaatgaagaattgcatattggcaagagtgcacacaaaaatattcaaactgaggagcctggtgagttatggtttgctgcatttattctaatcagcttctgtatacttgtatttttcattgtgttaacctgctcttctctacggctatatttgctggtggcaagattatatagtactccctccgttttaaaatgtttgacaccgttgactttttagtatgtgtttgaccatttgtcttattcaaaaaatttaagtaattatttattcttttcatatcatttgattcattgttaaatatactttcatgtacacatatagttttacatatttcacaaatttttttgaataagacgaacggtcaaacatgtaataaaaagtcaacagtgtcaaacattttgaaacggagggagtatatgaacatcatatcccaacattttctcatgctaaatgttttacgctccagaaaccattctcttttttaatgctagccttccagaaaccctttctgaatattgttgcattgtgcctggcaaaaccatttatttgcccctttttcttttgtactctaaaacatgttgaaaaaggctctgaagctcctttttgttattccaggaccaattggttatgcttctatttttggagaacttccgaaactggagtcaaagaaagatgttccagaaattctatttataccgtcagagagaccttgggagactatattcagtggatcaactcatgttcttccgcctctcacaaagttatgtcctgcattcttggcatcattgcttgagaagagaccagttgcaaatgagtgagaaagtgccgaagttttgtcccgtcatacaatgcaacaaggaaccctgctagttacaaatggcattgcacatgaaatccttatgactagtgctgcccgaagctcgtccaatactgctgaagctggttgtgggcattgattatctgtcagctcagctcacaagagaacacatgcgatgatggctacagcaacgctgttgggtgaatgagccaccctacctctttttgtaggtgatatctagtgatctatcttcagatcctagcaaattttgtttccataggctaatctgtaattctgatagcaaaaactagctctttttggtgaaaatgtaacgcgctaagatatccagtaacacggtgagtgaatgatgctgttttactgactctgaatgaagtgtgtgttgatctggtaaactgaaaactcgatgcttctttcagagtttcagttgtctgttgcttgcatacatgatggaatacttttttcttctagaactctataacaaccaggcaaataatttgtcttcctggaaaaaaggcaatcttgtcgattatgtactgatatctggcaggctaaacttagcaattgcattagatgccaaatattgccatataagtcttccagattcagaaattgatggctaagctgcactgacaagtacgaaatgcatgcaggcttgtgaacagtttcagtc

SEQ ID NO: 27940 - DNA, 2064 bp, Oryza sativa
gccctccgtcgccgtcgccagccaacgccgccaccgcgacagcctcgtcgccgtcaccagccgccgtgaccgccagcagccaccggacgccaagcactaggagctcccgctccagatccgcccacgggggggctggatccgcctccggcgtgcctggatccgcccacgagggggcccgacctacctccggcgcgcctggatccagtccgccgtcgccagcctcgccgccatctccatccccgccgccatcttcatccccgtcgccgacggcccatctccgacgccgtcgtcacccccgccgccgtcaccttccccgccgccagccgccaccccgccagatccggccggagcggcgtggatctggcgggctccaccgccgccgccttcagtcgctcgagaaccgccggtgccccagcgtgctccttgagagaggaaaaggaggccccgccgccaccgtccttgccgccgcgcggctttgccggcggctgctctggcggcggcgaggcgggagggaggaggaggaagctggctcgcggcacgtggtgtcgccgcccgtgtcgcctggggcgagcgacgcgggcggagttgtctcaacttatggaccaaggaattaattgtagggatcgaaatattaagtgatgtcctaatcgagtttgatatgaggataaagacaggagcagaccaagaagatgatcgacagctgattgatggtgtattagtcattggttgtgagacaccaacagatgtaacattgagaaaacgcatccatggcgattgcggtgcggtcgagataaaattttcacatctgcatcatgcagtggaggcgacggtacaggttgccgtattgaaagtgcagagtcatttcaatctgtctatctgttcttatgtgggttcgttacctgacgaaatgcagctattttgtggccacatagccgagccatgtggcctaaagaagtttgttcttgctgcaatgatgcgtaatttgctgcgattgaagttgaaggtaagccaagaagggtcttacgctgaacatttttgctcgttcgaaccaaatcaccatgggcattcatgtcagcagataaatactgagtttgcatccttcctggtgaagattacttggtcgactttggactttggaaatccacagaattatctgtaattcacaaccgaggctacggtaataagttagtgtattcaattatttttctcattgagttaattaagatgaggcctttctgagtatgactcaaatttaaaaaggatcctaatgtcactaattctttctaattcttcctaaacatgaggcatttttttagcctgcgagaaggtcaatataataatatgtttcgcatgtcacgagtcccttcttgttttttatatagttggaacccactgcaagcatgacatcactcgcctgttagctcgtgacatcactgagccaaccgtgaaataaagatggtaacatgaagaatttttaaaaaaggaatgtgaacgaggcctaagatgtaagatagcccacctccttacgggctcccagcctcctgcagtcctgcttctctcctggcccagtcctgcttctctcctggccctcctctatgaagtaagaagtaataagttcactttacatttctcaactatgagtcaaattctatttgcatcccttacccatgaaatcgggtataaaacgtcatctaattatcaaaaccagtgcaaatagagtcccttagcggtttagatggcaattttatcctacagttacccacgtggcatgttggcatgatctttattcctatgtggcgcttgcgcttatttgggattagaaaaaaaatagaaaaataaaaaaaaactcaatggacccatatgtcattaggaaaacaaagactcaaatgtggccccacctctccctctcctctgttcctctctctctctcacttagcgctggggtgcggttcaactgaggacggcatggcgccgacacagctcgtcgcacaacctcgcgcgcagaagccgatggcccgaacggcgattgggaggcccgcggtggccgatgctgcctccttcccg

SEQ ID NO: 27941 - DNA, 2363 bp, Oryza sativa
ttaacttgttcacgtacaggatcctagcatgtccctaattatatgggtttaacttattaacgtacgaactctcaatatataatagtgaacgagtgataggaagttaggaacacatatatcatttgcattacttttgacatgatccgaaatctaaggccaacaaattatggcacgcataattttctaaatcactattgtcggagaaaactgcaactttacaagttaaactgtcttccaatactcttcatcatgcatgatctcatcatgcactggaaaatactcaatttttcaccaaatattcagtgctgactggagtactggacacgcatatatagacctctgaattgtatcctggaccttgaatgaccatcagactttactagtactcgataggaacatcagaactaatatttcagcagtaatcaactgactctgtccaggctggtaacatcagaactaataattcagcagtaagcaattgactctatccaagctgatagtacatcatactcctatctaactaaacagcagacagaatctaggtacaacacttgtatggagtggagatctaatctttttataaaaaaaatgaggagaattttttttaaaaaaaaaatgtgcttctagcttccaacatgctgagttgctgactctgtgacgccaatattttttttgagaacaatgtgacgccaattcagagaggccatgttcagtccttgtcacaaaacatatggtcaactcaggcaaaacgcggcagagaccttttgtcacagtaattcgcacataaaaaatgaaagtatacaagataaatgcagagttgacagagtcacaggccacactcctacaccacaaaggcttccagaccaagaaaccttcctctcaatttactgaaaaaaatcaggggcaatttgtgcttctgatactcacgtatatttcatacacacgtgaatgcttttaatagaattcagagaattagagaatagaaagttgtcgttgactccatctctttaacatattttaggagcatgcttatagattcacacaagtatgaacacatatagtgatttgtatatgcgttctccacatgattcagaaaaaaaaaagaacaatgacaacttgatttcattgaatttattgtggcgcatttacagatatatagtgatggaagcagtttggtgcaagacaaaagtaggcaggcgaagttacatcatgtacacttttgacttggtcaaacgcaaattatatactgacagtgacaggacctaattacagcagtatagtattaattaattgttaaaagagagtttctaatcaattctacttgcaattctccaagaagatagcctttgccatcatctattgctctgatttagaattatatgtgaaaagagtctctctctattaggggagcgagaggagatgtctactcatatatttttcttccaaattcgattcaaatagttgtaaaaaattatagaaaaaaattgataatattgagtattgttatacctatctgtgcaaaaaaaaaatcaagttcaatgctgtatcagcgttgtcaattttttttagaatttttcataatcgtttcaatgctttttaaataaacaaggaaatatcatctcttgaggataacacacaattagattagacatgcttggactgatgacttagtcaaaagagaagtccgatcacttattaatttcttgtgcatgtgcatccaacaaccttcgtcagctagccaagaacaataagcaacttcatagtgtcctagcaacggcgtcaccggccatggcttccggccatctcgtcgccgtcgccgtcgtcatcggctcgctctgcgtcgcggcagtcggtcaggggaacaatatcgtgctcccgttcgcgccgtcgtgctcgaccgccggcaactacaccggcgacagccagtacaagaagaacctcgaccagctattcaccaccctctccgccggcgccatcgccggcgactggttcaacaccagctcggtcgggacgggcgccgaccaggtgttcggcctcatcatgtgctacgccgaccgcaactcgacgcagtgccaggaatgcctcgccggcgctccggccgggatcgtgcaggtgtgcccgggaagccgaacggcggacgccaactacgacgcctgcctcctccgctactccgacaagtccttcttctccgagctcacctacggcgccgaccccaccatcgcctggaacgtctacttcacccccttcgtcgacaacatgaccaccatgaacgacacgcggcggcggctgatgagccagctcgccgagagggccggcgacaccaagctcaggctggacaacggcagcttgccgtacgccgactc

SEQ ID NO: 27942 - DNA, 6986 bp, Oryza sativa
tatagggcgaattcgagctcggtacccgagatcgcctgcggccggcgaccgataatggcggaccaccaatccgaggtagacgaagaccggatccacattgctcagtgggtctgggatttatacggcaatgggaggattcttgacgccactgaccggcggctcaacggcgagttcgacggcggggagatggaggctgtcatggtcgtcgggctctggtgcgcgcaccctgaccggagcctgcggccaacgatcaggcaggccgtcggcgtgctgaggggcgaggcgccgccgccgagcctcccggcgaggatgccggtggcgacgttcctgccgccggttgatgctttcaaccacacatcatcttcagttgcgacaggaagcagcagcgccagcacagacactactcggtcgtccaggacgaccgagacatcttccttgctgaaatgacacttgagcaatgacgttttttatcagattaattaactgcaaaaatgaattgattttgacaggagcatcatacctgtttttgactagagtatgcagctgattttggactggtaatatgatgaacattagttacataacacaagaacacaatggcacaaacataaaagggatacagctattgacactttcagcataataattagtgttctcatttattattgccccaagccatcatataaaagggacttcagaaaggtagatcaacagctcataataattcacagtgtatgtctattttcaaaaccatttacaacgaaaaggccggtctaatggcgtcccttccccccaacctacgcccagccgacctctccaatctcctttgctttcttccttccattggaccattcacggtacaggggaagtataatcaagagttctccaatagattgtaactggtactaattaagcagcagtggcaactggagtgtcaggatgggctccccattcagtccatgatccatcatatacaggaacgtcggttttgccaaggcggtggaggccctaagaagaaagcataggttatgcgacgtaatgtaacaattgcaaagtaaatcttgtgaacttccaagtcacaggtagtcttaccagagctaatatacatgctgtcacaccagtaccacatgaggacaccaggggttgatcaagcgatatacctgacgaatatcacaacaaagtagtaaagttattgccaatattaccaaagatgttgccataattttatatttcataattcatacttgctaccacagatctacatcaaaataccacagaaaaatgatgctagtaacaaccactaccaataaacaaagcactgcaagaagtcatgcctggtcattacaatcatataagcgacaacacctggcactagttggttaattaactcaaccatcaacttatacaaaaatataaataagaggctcttaatgtttcaaaagacccagaaggccaaaacattaggttcatggttaagatataggcatgtttcagaatggggaataggattgcaaacatggctaagcagggcattgtcagcagacagaaagaatttgaaactttatctggataaaaatattaccttcttgttcaaatcgtttacggagctcttctggaggtaatagcttttgcgaactgtcaagcaactgcagaagaacaaacaaagattcagcaaaaagaattggtaatacacaaagattaaaaatacaaaaatatggtcacaaatgaacccgaataaataattaatccaatgagaccaaagacaaccaaagatcaggtaaaagtaattatccaaaatttatgtccaaaagagtacaagttgattggataattgcaagtctccacctgagggaaaggaacacatttgctcccaggcacatgcccacttcttattcctttccgtggctctggaactgcaccatcaaatctgaagtgaaagcttcatgttagtattcaagaccaatgaccaacattacaaagacacaacccaatgaagcttgaagcattcacatttttatgaggtaatatggcaaatctaccgcaattactgacacaaaaaaaaacaagtcagaagagtcgaaaagataaaacaccataagagtctggaatgcctactatgttggtgaggtgttacatggaatcatggttgaactggaaaaagattacttaaaaaggcaaaagccaaacagccgactttattggcaatgaagatcttgacagatactagtgagtctatggatatattatccaaatcaatgtactaggcctagggaggaacatggtctgtagccagtgacgacagggtctgctgccgtgtagaatttagttcattacttgaatatcgaatgattcctgcaaaattttgccattgtctccaaaattggaagtgccttttataaaatccaccataacccaatggatccttaagcataaaggtaaaggctttatatacatgtaatcgtgtatggtatataatctggacttttccagaattaaaatagcagatttacctaggctttcctcgagcatctataagttgatgtgtcttggcatcaatgttctcttttacctgagaaaaaaaatcatgaactagttataccaaacatgcgactgagtttaataaatggtgaagaaatgtatgggcaagattttcagcctgaagacctctaacctggtcaagattccaaataagatgaggctgcaactttgcttcaaatgtggagggaccaacctacaaagataataaaaagttatgtgtgactgaaggtcaagctaagcaccattcacagcagctactagcatgagtatcacgattcaggggttgacaagtacataacaggagtaaggtccaaatgttagaacaaacaaaatagaggtttaattcaacttaccaactgcccctgataaactttctcaattgcttcacgagcagcactggcttttaagatggcatcactagaggcacttgattcaacatcatacccagaagcacgccattggggcaaaccaccatccaacacccaaactttatcatgtccgaaaacacgaaacatcctgatatcaaggaagcaggcatcgcacatgaaatttaattcaattatcaaaattaacaacaaaggaacatattgcaaatgcactagtaagaacggcttatgatcatttaaggggaaaaaagattgtctgtcgtttctgcctgaattctactcttgatgtttactttggtttcaagaagaagcagcttaccaccaaacacgagcagcgctaaatagtccctttccatcataaactactatcccatctttgttgtatattccaagcgaagatacagcagcagaaaatgccttttcagatggcagcatgtgcggcaactgactcaaaagataatacattcaatgatatcaagcatgccgaaaaacaattaatcagctcaacaataaccaacacaaagaaatcaagaatgatgccatgttttgcaattcatattcctatcataataagggcattatgttgaattgttgatctacttaaccaaacaggattaaaaaaacatgttaatttattagtgttacttttttatcatgaagattgacagtagtagatgaaaaatacagtcaaggagaaagggaaagaaaatttaagtgccattacaccagctagtacaatataaaagcttgacgtgatctgaaagaaatcaaacttgagtaacttattatcactttttttacaccaatcaggggattgggacagaccaccagatcacaacacacacaaatgttatcaaccgtgttgtgatctgtcagtccctgttttacttcaccagcttcaaccttttaccttctggtgttgcctaaagctatttttgttgacctgtatgagtggaacttaaatgtattgacatactgaactaaatgctttcgcttcatgtatttaaggaattgggtttaccagcccctaaatttgcatagcacaagcccatattctggcaatttataatgttatattaataaaaaataacatcagaaaagcaggatgatgtggcacataaagaaagttcatatgattagctagtagtaaatgaaaaaacaagctagtgagttgaacttacgcttgatgttctgtctgatattccatcaacatcaaagaatagcgccccaggaatatgagccacctggaaacaagattaaaatgcatatgaaagcatcagaacttctgctactataatttcaaatgaactgataaaaacagaaaattaaggtaacaaggaaccagtgaaaataagagcatataaacaatcagataagaaaaatggcgtcacagcaggtggtaagaattccaaaactgcaaaacctcagtatggcatgtaatcgctacctggtactcctgaagaggattcctttgttcggcaggcatataccaagaggcatcaagtaccttgacagaaacaagaggatgattcaatgagatatagtggattcaaggaagacaaacatttttaacagggaaaagaaaactatccagtgactactgttatagtgttattattatactagactcatttatcctactgagagtatatcataatgcatatgaaaaagaactttaatacaaatgcagcttctgttgtaaaagcgaaagtagccaatggaaagccagtgccatcctgaatgtgctgtagtctgtagtacaaagacctcatgcttttcctcaaccatcaatccgcacagctaacgcgacaaactcagcaataataagtcactagccatcctcctacgatttatatctctcttccatcatcaatcaaactgccagcatggtagaacgccagcaactagcaattcactatcagtttattagctgtagcacggtatatgcaacaattcacaaaaattatcttccagtttattagttgtagcacagtatatgcaacaatttcacaggtcaaccgcagatcgctacagtcccatcactgcgcacactaccttacatcggggtccttgaggttggcgtgcagccactcggccgaaaccacgggctccgtcctcggcagcgcgttggtagcctccgaaacggccgacgacgaggtggcgttgcagcgcgccgcgatcccgaacgaaccgacgccccccagcgccgccggcaccgacgccctgcacccgaacccggcgccctcctcggcggcgcgcgcccatccgactcttcccccctgcacccgcacaaaacacacaaaccaccgtcaggccggagagatcagggagaaggcggagcggcgtcggagtacgaccgcgaggagcgaggcgatggtggtggcgaggaggatgaggaggggaggaggaaggagggtttccttggggagggaggaggacagtatgtggtgcgagcgggcgccgcggagggagacggcggcggcggcagcggcccgggagaggagggtggccgccatggatagggttttggggggttctagaaggttcgcgaaggggttggtggcggaagcgagaggaagaaggggaagaggtggatgggttggtactacttcgttgctcgacgagtgtttattaatccgcggggaaaggaaccaactggtttcgcgggaatccgcggcgcctacggttgggcagaagagccagtgtagcttcgcaggcctctcctgaaacgcacaaagtttatctagaaaatcagcagtgagtattcctgtaaaggctttttttttttcgagatgtaaaggtagaaaagtgtaaaaactaaattttttatcgtatcaaatctcgttgagattcatagcaaattattttttaatgatactagcaaaataaactaaaaatatttgtttttaaccgaagttattttcacactacttttgctcgctagaaaaagtcttaaatgatagagagaaatgtagtagctcataataaattattattcaagaataatttcaaaaaaaggagataaaaaagacaaagccggtttgatttccaactttacacggtgcgagtcaatatggactctgaagatataggcagatctacgaggtggcttagcaacacgatcgacctgtgaatcagcaagcaacctcagaccaatcgatggtcgattgacgaccgcagctgcgtctggccgtccgtttcccttccgcgacagtggtgaccatgactatgtgatgttattattttagtatttcttacttttaattctggatttttgttatttctaattatatttttatgtgaactctaaacttatttttcaatattctttattttttaattcagaattttagttatgtataagttataattctatatggattctagactcttttttcaatatattttttaaaattttaaaatttatttatttataaattgtatttctatatggactctaatctctacctttaatttttcttattttttaattctggattttaattagctctaaattgtatacctctagtttcatgcttgttaatgaaccatcaatttatagcatgtggattttgagcgacaactatactatatgttggtttttaagaaaccggtacctataatatagtgtcggttcttataaaaaaacaacaaaaaaaaccgtgctgagccaagccgaggcaacatccttatccagtccccctcccactctctctcgctctcctctagtcctctcactctctcactctcactctctctttcttggtcctcgatccgcggcggcggcggctccatccgccgcctctcttttccctcccgcggcggtggtggcgtcaacggcaggcggatctggcggcaggtgttcttggatgtgatgtgatgtatgttgttgttcttggatgattattttatgattttgtgatgattgtggttgatttttgggggtaaagagtggttgaattttattttttttatccgattctaagagcgattgggattcgggggagctgcaaaggtggccttcgtccatcttgtgacgaatggaaaattaccaatctttta

SEQ ID NO: 27943 - DNA, 2208 bp, Oryza sativa
ctccttcctcccctgctttgagctcttggacacccttttaatggcgacgtcaaggttcaactctttcaagaatcctctgtacactgatccgaacccgccttccccgagcttgtgctcgtcggagaagtcgtcggtggcgatggcgagctcgccaaagcggaatctcttcggccctgtccccttctcgaagtcgtcttccatggccgtctcatcatcgaagatgcccccctcttccatctcctgctccttcgtcaacccagcatgcttccgccgccggcgcaagacaaaccggactgagaaaccaagaaccaccaagaacgagatagcgctgacagtcaggcctgccacaagccccgctgacactgagggaggaggtactggcgtcgccggaatcggcggcggcggcgacgacgacaatggtgacggcgccggcggcagagtgatgttgaatggccaaaggtcgaacctcaggtagcagctgtaccccttaatgttgccagcgctttggttggtgtagtactggccgaggtcgtcaacgtacctcttcaggcacttctggcactcgctcccgctaggtccctcgtgcactgcgccagcccgtacaaccgcgacgtgccgagcttcgagtcgacgtacggcatgctgtcgttgaacagtctcagcttgttgtcaccggccctgtccgcgagtttgttcatcagctcccgcctcgtgtcgttcatggccgtcatgttctcgacgtaaagcccgttgaacgtgtaggtggagcgattgacttcgaccttgccgtaggtgagctcggagaaaaaggacgcatcggagtagcggaggaggcaggcgtcgtagttggccttgaccgtccggcttccggggcacacctgcttgatcccggcgggcgctccggcgaggcatttcttgcactccgtcgcgttgtagtcggcgtggcacatgataaggccgaatacctggtaggcagtacccgtcccgaccgagctggtgttaaaccaaccatcgtcggtggcggccgtggcgagcgtggagaggagctggtcgaggttcttctcgaactggttgcccacggtgtagttgccggtggtcgagcagtctggccagagcggctcttcgtagttgctccgagcaactgccgccgaggcaaccacggcgaggaggaagaggatgatgacaaggcgaggagccatagctggcgacgccttgaatttgctaggaacatgaatgctttggtcccaatttatcttggatgacaattgaagggacggggttcatgtgcagttttttcaaagagaactagtgttcgattacgcgttggatcatatagtatacactactggttggccacttggccagatcactgtttggtgtttgcaccgtatatatgtaccgtgaccgagtctgtctcgcggttaactaaaaggggtcgttagctgattggaatgaatgggtctatctctctagtaaggggtaatttttttggacaccattggcgataatgcataggaaccagtcagctttgcaattgcatagtaaggattacgtacgaaaatgattcggtccaccgcaaaagaaaaaaagaagaagaagaagacgactcggtccgtgcgcccgatccaacgaaaagtaatcggctgtgtttccactgctggagtgctggtactgctccctgtcacagccgaagatgtgtagccgaaagcatcaatcggcgctaggaacgttccctactaccgaacacgcttttcgcatacagttgagcggactgcatgaaagaaacggaaaggctaaaaaactgtcgacacatttttctctagaaatatgtcgatttctgatccattagatcaactgtaggattcgggctattttggttgacgaaaataaaattgtactgtaaagaatcgaactaggatctccagtggcttgtccagcggccctgaccaactgatcgagcaaagattttggcttgaattaaaattacatactaattacacttaaattgcatattatttacatatgtaatttagagacttacattgtaaatacactaaaattacatatgtaatttatagacttacatatgtaattttagcacttacattgtaaatatactaagattacatatgtaatttatgaacttacaatgtatgtacataccgactattttttttgtgaaaaatatggcgctataaatatagctgc

SEQ ID NO: 27944 - DNA, 2831 bp, Oryza sativa
ctatgggcgaattcgagctcggtaccctattttttttgtgaaaaatatggcgctataaatatagctgcacccgaaagaaaatgtctacgaaaatcatgattttcacgtgcggctagcgcaaccgttgtgaaaacgaaaaatcacgaaaaaagataaaaattccaaaaatcaaaaaataaactgccgccacgtacggctcgctacggttgtctatcctcagcgtgttgtcaccggccctctccgctagcttgttcagaaactgccatcgcgtgttgttcatggtggtcacgttctggacgacgatttggtcaccggctaattttgtgtagctgatgttggtgctggcgtcgtaggcggagaaaaaaggcttgtcggagtagcggaggaggcaggcgtcgttgctggcggtcaccgcccggcttccggggcactcctgtctgaccccagcgggcgcccgggcaaggcattccttacacctcgtcgcatcgccggcgtcggcgtagcacatgatgaggccgaacgcctggtcgggacccgtcccgaccgagctggtgttgaaccagtcgccggcgatggcgccggcagagaggctggagaggagctggttgaggttcttctcgaactggctgcccctggtatagttaccggtggtcgagcagtctgtcctgaaccactgatctactatctcgttgctctgagcaactgccgccgaggcaaccatggcgaggaggaggaggatgacaagccgcgatcagaaagtattttctacacctaggtaccatggcacctaggtgtatgcatataatttaaataattatataaaaaatacataaaatttaataagatagtccatgataatataagacactatgcaaatatgtaagtctaaattcgatcgatatatgaagaaacaaaaataacaaattttatcggcactgtacgggtactattgactgtctgattttattatttttgtttctctagttgtagattaaatttagtcatgcatgtttgtatatagacttgtatcatcacaaacgatgttactaattttttttaattttttctataactatttgagtcgtatgcaaatgatacaagtcacgatgccatgcccatgaccggctagctggcgacgctcttgatttgctatgaacatgaaggggttgatcccaattagtcgtggattacaattgaagggatggagtgcatatgtatgcatgtttttttttaagacaactagtagcggtcaagcaccagttctcgatgatacgcgctggaccatgtctagttggacacttggcaagatactcctaattatttggtgtgtgtatcgtaccgtaccgtgaccgagtgggtgtgttcggatgccccttttctcatcccctcatcatcgctttccacgtgcacgctttttaaactgttaaatggtatgttttttaaaaaagtttttatacgaaagttgcttaaaaaaatcaaattaatctattttttaaaaaaattagctaatatttaattaatcacgcgctaatggactactctgtttgccgtgcgttaccgttccagctgggatatggagatcacctgtgttcgttacttctggataggagcgaatccctccagcacgaaaaatggggtgatccattaacacgtgattaattaagtattagcaaattattttttaaaaaatggatcaatataattttttaagcaattttcgtatagaaactttttataaaaaacacaccgtttagtagtttaaaaagcgtgcttatgaaatacaagagagagaggttaggaacctgggttgccgaacacatgaggtcgttacgtgattggaatgaatgggtctctctctctctggtggtaatttttttggacgccattggtaatattgcataggaaccagccagcttgcaattgcacgcctggctggatgagtcagtacttgaggattattgggctgtcccatcctatagatcgaataaagtgggtgaagtacggatattttgctgttttcgcatgccacggccttcctcattctctctcaactcactgtagtcaccgccctaagggcatccataatatacatctaaagtggatagtaaggaataaaataccactactacccggttgtatacattgtgagagcagtaagtagctaatactaagtaatatgcttactacctagtaataaggaataaacaaatgatttctctcatttttctctcatggctaatgattgtggggtccagcttactacccatttttgttctttcaccattgtggctacaacaacaactaatacccactgacacagggctcacccttattcacaaagtagggagtaaacattggtgatgccttaaccaacgagaccgtaacagtgagcatattggacttggaccaagatcagccccaaataattttaggccttcttcttttctagacacttttctaataagttatcgtgatatgctttttttttttaggaaaggcattgcgcccagctttcactagaaagcgtaagagttcattacaaaagctaaaagaaaacgaaagcaatatcatgctggggattccagctgactatgaaaggtcctgagcacgcaggggcattcaaaagccgctggcacaggcacaaccagccagagagaaaacactactgcaaacagagaactaatcagtgatcgaaggactgcagcgaagatctcctgtctcgtggaagctggcaagcaacaagccccttagcgtatccaagtctcccctcattttcaccggcgccaaacgtctccactgtaccagaaaagacacaatcttataagataata

SEQ ID NO: 27945 - DNA, 3840 bp, Oryza sativa
accggcttggcgcagagaagcgcagccgatggcaacggaggccggctcggcgcgagagacgcgggcggcagagatggaggccggcttggcgcgggaggcgcggccgatggagggaggccggattggcgcgagagacgcgtccggtagaggaggccggcttggcgcagagtggcgcggccggcagtggaggaggcgacctaggtgtgaggaggagctgctggtgggtgtggcgcggtcttcggcgcgcgaaggctggccggcgggggacgccggtgtaggggtcccacatgtcggcaaagcttgtgtggtggtggagcatcggtgcgtcagccgtggattcgcaggtggtgagtggcgggtgaaaacccagttcgaccttggtcggaccgacaacgatggttatcccccctcctgagggcgttgttgtgctgtctcacccctcaggcgatctcgtctgtgtccctttgttggtctagtggcggtcggtcacgcttagcggcggccggtccggtgttagccttctcctgggctagtgtgttggcgatgtcgccgtgtgggtggtggtattttttttcctttttcctggttataaccctccagggttgtaatcttgtaattttttcctgctctatcaatagaagttcgcaccgtctcgtgcgagtcgttaaaaaaaatatttcgatccctcgtttaggaccagatatttcgatgagggaaccctacagaaatattattatttattagctcatcaaagaaaataggacaacgaaatgggtcgttatgttatttttactatatatatatatatatatatattatataaagctgagtgaaaagtgaaacgaacattacacaaataataaagaacctagtatattaaacacatcaaacattgaatggctgccaagtgtataagattgacagagatagcaaaactaccagatagaataattcaattttatctagagttgtcaaatattaaattatggatgtttgtggacttattatgagtgaaaaaaatgatagtttgtgttgtgtatcttctattcctacaaattaatgaaaaaaatgtattatctgatagctactaaaggtccaaactattctgtttgattttctttgtaacacataaaacgtcatgcttaatttaattatataggtttatttgatagtataattaccacaaccaaaatcttggttagcattgtaatggcttacacaatcaactgtttctattctgctacttttgggtacgttgaccactttgaagcatgtttttgcagccataacaccgaaatattactataatagaaatattcacaaaaagtaaatatctaagcatttgtttctagccgaatgaggccacggacatttacctaattagaaaaatatagagttatgaaataggggataactggagatagcttttcatggccgtgctcccaaaaccacaataagttgtgctatgaagtaaaacactttataaatgtcacagcaacataaactaaccatatgtcttaaaatcaagaaaattgtgagtgcaaattgagcctatgtctaaacatcatgagcacagttattacaacatttccgttgattggatgatgtagaacagattaacttgcttttagaataccatcaaaattatctcctcttgttgtatgcatgtgatgatgacttcatattatgaaataaaacaaagtaatttaaaaaaaatgcagagtagggatgtgcaccttctccactatgatgggatcatccctgctagtatggaatatatagttgcgcaatggatccaaaaggtcccgtgctgctaagtatccatacagctctactgggccaccggtgacagcaatttcagccagttttagtgagaaaaagtgcaacataggacatggtccatgccttatacatgtttcaccatgcataacgcaatatttaggacctgataatatcatcgcctccaatcgagcttccccaatgatcacatgtcatattacaatcaatgcaacaattaatacggtcagcaaatacttggtacaaagaaagaaaactatacttttgcacatcaattgggttgcagaaaatcctgggtcaaaccgctttatattttttgagtaattctataaaaagaactacacatatttttgtcaaaattatcagtttgttgcaattttagttaggggtttcagaatactgcaacttgagcccaaacctgtaggtatttacagtagcaaatataatgattgatttatagcttgataaaatttgtaagaccaaaatagattttttttaaagaaaaacagtaaggatatctggatcacttactctcctcaagatctgcaatacgataagtccttttccactcgctattgcccttgtatatagaaccatcacggtgactgctatcttccaatataaacgcagtatttgcaattttagggggattgtaagaggagtcatcttcgctatcagatgacatccctgcctcttcttcactatccgatgcatcttcatcgctactggttgccatctcgggatattctatggtcttgtcgtgttcttcgctatctgttgtggtccttacattttctttacaatcacccaaatggtctttagttgccccatcatttttttcatcatctgtgggacgatcaacaccataacgatcatgatgactgctaatgcccatcttctgagatccaaaaaaaaaatctatcatcaaagggcatatttaaaagggctcgtcttagcatccatccatcacggttgaatcgtaattgtaatattgtccagtgactccagtctgaaatctatttttatatttcgttccaaaaaaaaagatgatcagaagaacttcaatttcaacaaacatcttaccttgttacacctccaaaaatcgatagaactgccagtcttctccaccatatagagaattaaaaagaaaagagaattggttacaatccagaactctaagactgtagctaaaggatatgctccctctgtaacaagtcaaacatttttaactttgactattaatagcaaaaaaaagatcaatcacgtaaaattgatgttactagatttatcgctgaacaaactatcataatatacaatttttttatttaaactattttaattttatagatattattggtcaaagtaacatctcgaagaccgtgtcggagtccaaaaatgtttatattttggaacggaggtagtattaactaacatgagaaggagaaaacacacacctgaggataggatggacaaatcgatcttgatcgggatcggtagaggacaatgctgctgccgtcagaagaatcgagcaaacattcagttggagatcagtctcaccggcggcggcgacggcggcggccgggggatctgccgatcttgggctcaaaattggctgcacttgcatggatcgatccaatctgcgtgattacctagtccgagggttggaaatttcggtaattttggtgaccctgatacgatattaattcggccgaaatttttgaatttttgaattttttcacaaatttggataatatttgttcaaattcaactaaatttctttgaaattttgggatttcggtgacccctgatagaaaaccctgaaccgatatagtgaacctctccgattggtatagcacggtacagttagttactgactcggaatcatgactaaccaaccttaacctcttcatgtcatatcttacgttgccacgcactaagccgtcaagcttgctagcccaagccgcgcgcgctttgcgtgatggacctatcgaccggcgccggctggtcgccggtgagctggtcggacatggtgttcgacctcct

SEQ ID NO: 27946 - DNA, 3449 bp, Oryza sativa
atatatataggacttatgaaatgacttagttaactgatttatcattttaaaaatgattgcaagactccaattaaaatcatggaacaaactgtttaaattggcaaattatgatctataggttctcattctctcttctagctaatcgctataacatgtatgatgtcgagttagtgatcatacatcaacgctacaatgtcactgttcaccgaaccttaagtgagttaccacgtctcgtagatggcaccccccgtctctaaatcctggcttcgccactgatcggacagcggcggcggcggcggctgcatcgttgtcctgctccaccggccaaagtaccagctctcgttcgcgcgggtgggcgtcgacgagcgctgggcttgggtcaacctgcccgactcggacttctacaccgacgtcgtctacaacgacgacgacggcatgttctacgctatcacgtacctggccgccatccacgcctacgacttctccggcgggccctccgccgtgcgccagacgatcgtcctagccgaccagttacacggcgtcatcgacagcgagaccaagtacctggtccgcgcccccgacggcgacgggtggcttcaggtgtggaggatgatgaagcccgtgcgcgcggccgcggcgcacgacgccggcggcgacacgacgcggacgacggcagtgtataggaagacgacgatctggatcaaggtgttccgcgtggacctcgccgcgcagaggctggaggagacggcgacgctgggcgacggcagcgacagcctcgcgctgttcatcgggtgcaacagccgttctgggtgccggccggtggcggcgacggcgagtgcccggcgggcggtgtgctgcccaaccacatctactacacggacaacgaggaggactacgcgctgctcttcccggagtcgcccagagacatcggcgtctacagcgtcgcagacggcagcttctcgccgttccggccaactcaaccatggctgacttggccattgccgacttggcttgttcccaatttcgaatactaccatcagtgttaagttaattaacacagagcagctaatttgtttgtttgattgattgattaatgttgcgtttcattgtttaaagctaggttttcttctctgatgtttttgttgttctataattctatttattgttcaatccacaatcgggctgaacgcgtagactaaaattaacagtttttttttcataaattttgtgctgatatgattagactttttttttacctgtatggatttgaccaatttagctacattttttaaagctagaatatttcttttaagggtccatgccattgaaaatgtggctattcagaaaaatgttattacaattcgtctattcatagccgtgctactccaattttataaaattagaaccatgctactgccgtcaccttttctatatatctatcctcttcctttccgtcttcttccttccttctccatcttcttcgcggccatcgcatgccgtcggcgtcgatgctggcgtcgagcacctcctagtccctctcgggaggcacagggagcgccacccgtgccagggctgcacctgacgacgacgacgactcccacgccgccgagggaggatcgatgtcaacggactgcaggaagcggagcgcacgggggaggtccctagagaaggcggaggagggggaggcgagaggagggaagggggcggtggtcgccattggcagaggtgggagagttgccacctgtggcggatttgcgctttctcaccgacgaggtcatcgacgaggtcacgagacgacaccggcagatttgcgctttctcactgccctccctctcctccgtctcctcggcgcagcacggtcgagtcatcctcccgagacacgccagccgcagtgccagtggccgctgccgacgcccaggtgtccgccacgccttcgctcgatccgagcctcgggatgtcggccatgggggccgtggagctcgagcgcgcgaggaggcttgcggcaggggggtggtagcaaggatcgcaagcaatgaacaagaaaaatcacggtagaccttccttctacaagatacgaaggctacaatggcaacagtacttcgccagcagtgtgcacgcaccatagtaaaaagagaaattttatagtccttgaaaaaataactggaggagtacctagtacccagaggtttgctaaacggataactcattgcatggtttgacatgatcaagccctgtcttttgttcaacagatagtcagtaagagtgtaataatttacttaatcaaaatttgctgctcgataaaccagattagccagagttaacttggcggtagtaaccaaagctaggaacaagccaagttggtactggccttgtcaaccatggttgcattggccggaatgacgagaagctgcagtctgcgacgctgtagacgccaatgtctctcggtgccgcggctctctggatcaaggtgttccgcgtggatctttccgcgcagaggctagaggagatggcgacactgggcgacggcggcgacagccacgcgctgttcatcgggtgcaaccagccgttctgggtgccggccggcggcgacggcgagtgctccagcggcattctgcccaaccacatctactacacggataaggaggatggcaacacggaggcgccgagaaacattggcgtctacagcatcgcagatggcagcttctcgccgtttcaggcaactcaaccatggctgacatggccattgccgacttggcttgctcccaatttcagttactatcgtcaagactaagctaggaagaactaaatcgacacggggcagctaagtttgtttggtgattactctctgtttcatattataagtcgattgatttctctttcactcaaaattgtttaagtttgaccaaatttataaaatgatatagtaaaattttcaacacaaaacaaatattttattagaatatattcaatattagatttaataaaactaatttgatattatatatgttgctaaacttttctataaaaagacgaacgacttatagtatgaaacgaaatgagtaattttacagtagttgagtaggtaccgtattttcttgtttgatccattgattagttgttgctgctttcattatttaaaactatatcttttgttttctcttattttttattgttctaatcatcgttcaatccaaatgttatctcttatttttgaatttttctaatcatcgttcaatccaaatgcaaggctgaccgcatagattaaaatagagtttttttcttctaaattttttttatgacgataagattggattttttttaacttatatggattgaccaatttaacgacatattttaaagctagaacatttttggttgaggaccctaggctgtgaattttgaacttcatatatatatgaaacaggggaggggctctgagagtactgaaa

SEQ ID NO: 27947 - DNA, 15007 bp, Oryza sativa
cgggacttgaatatgagtaggaaatttccaccacaaggaacctaaccagttgaactatgttcaattcaaaataatgttggatattaaaacaaccatttaaaccagtgaaaccattattttaatcgttagatctatcttatataagaaaaacaatcgtttattcatggtacatcacatttcaaaaatattattgtgcaattatattcacgttaggttgcgtagaacctcttacccactctacatgaaatgtttatagatggattgtctctcaaactatatcaatcatattatgctatataaaatttagtggagtttcatgtgccaccaaattcatcctctaataaaccatgataatatatatgcaataaaagaatgaaaaacacactacttttgctttacacttacttttactttcgttgaaatattatcatgatgtgatttgatgtttcaatagctgggcaggtcatacagtgtgggttggaatcccattttttaagaaccctgtttgcattggtgttgagcctgtctcggaacgctaaccacaaaaagatcctgcaagtgttggggatagccttgttccagataagtgttgccggctgccaaaggatgccatgataagtcaacaagttgtagtttgctgatgttgtgatatctgtggaaccaagcagcagtgttcttttgtcggggacattctgttgtatgtgttggtccaacaatatatccatgagggactgtaactcggtttgagcccgggaagagagaaccgggtgtagatcaattgtccaggtaccgttagtgtgttgggaggagactgtacagttgatatttgttgcgtacgaagctagtgtcggatatatgaggttgaatcgtcctactgctgtccagtggtctcgccaaaactgcactagctggccgttcccaatcgttaccttagtggaggcaataactggctcgataacggaacagactgtcttccaaatcggtgtttctgttggttttgctttaatagggatctcatttgccatgtgttgcgtgcgcaaccattgaaaacatggttctgatgagtctgataacaacttgcctcctatcttcataagtagagccatgttgtgagctctcaagtcacggattcccaatcctccttgttccttgttgagagtgatagttggccaggccactaaacattgacctccttttactttcttatcccctttccaaaggaatgccctccttaggcgatcaactgcttcgatggttttgtctggccacttgattctggacatgaaatagtttggtattgccgacatgactgagttgatcatgatgagtctttcaccccaactgagaaggcctgggatccatcctgctagccttcgatctattttgtcaatgactggtgcaagcaacttgtgtgagattttggacgtagagagtggaagacctagatagttacaaggaagcgggctgatggggcattgcaaaagctcagcgatggcccttgcctcgggttcattcatgtgtatgggtacaaaggtactcttgctgaaattgatctgtagccctgagaatgcagcaaattcctcaagaatgccgttaattatttcagcctgctcaagcgatccttttaaaataagtagggtatcatcagcgtattgcagcgtgggaggaggagagtgagaatccagtgggtggagtaactactcggagtggaaggcttgctgtatcatttgctgtaggacgtcagcgactaggatgaagagatatggggagagagggtcaccctgacggacccctctcctgtacttaaatgactcgcctgttgatccattgatcaatatgtgtgcttgtctagtttccaaaatctgtttgatccaattgatccatgtgtcgtcgaatcctctgcggtgtaggaccaagtataagcaatcccagttaactgtgtcaaaagcttttttggaagtcaagctttagaataatcgttggttttttccttttgattgcacattgaacaatgtcagaagctagtataaaattctccgtgattgatcttcctttgatgaatgcagattgcattggatcaattaactcatgaatttccccttgaacccggtttgctagcactttgctgataagctttggcagactgtgtagcaaggatattggcctgaaatctgttatgctgagaggggttacttttttcggaattaaagtgatgtaagagatgttaacccctgaaagatcggctgcattggcatggaaggaattgaacagtgcgatcaggtcaggcttaagagtagagatgaagcatttgtagaactcatttgtgtatccatcaggacccgagcttttatttggaggcgagtgcaggatggcgcttgagattatattgagagtggaaagagaaatttaaaaaggttaacaacaaatgttcctcaaatgaggataatcagaactaatgagacatattacaaaagcacaaaacaaagcccctccctgtgtatgtattactatacgatcagatgaagttaactgaagaaacgagttccattttttttttcgcttgaagaggtggtgaactagtgatgactagagaagttcggagcatttacaaaatattctagctttaaaaaaaatatagttaaattggtcaaatccatacaggtagagaaaaaaagaagtctagtcttatcagcacaaaatttaatttagaaggaaaaaagaaaagtcacactctatgcacagcccgacatttggattgaacgatgattaaaaaaaaatcagagacaataaaacgtagatttaaataatgaaagcaacaaaaaacaaccaatcaatgaatcaaacttagctgctctgtgttaatttagttcttcctaacttaaccttgacagtagtaaccgaaattgggaacaagccagatcggcaatggccaagtcagccatggtagagatggccggaacggcgagaagctgccgtcggcgacgctgtagacgccgatgtccctgggcgcctccgggtagagcagcgcgtagtcctcatcgttgtccgtgtagtagatgtggttgggcagcacgccgcccgccgggcactcgccgtcgccgccgccggccggcacccagaacggctggttgcacccgatgaacagcgcgtggctgtcgccgccgtcgcccagcgtcgccgtctcctgcagcctctgcgcggcgaggtccacgcgggacaccttgatccagatcgtcgtcttcctatacaccgccgtcgtcggcgtcgtgtccccgtgggtgtcggcagcgcggcgcacgggcttcagcatcctccacacctgcagccactcgccgccgtcgggggcgcggacaaggtacttggtctcgaggtcgatgacgccgtgcaactggtcggctaggacgatcgtccggcgcacggcgtgttggcccgccggacaagtcgtaggcgtggatggcggcctggtgcctgacagcgtagaacatgccgtcgccgtcgttgtagacgacgtcggtgtagaagtccgagtcgggcaggttgacccaagcccagcgctcgtcgacgcccacccgcgcgaacgagagctggtactttggccggtggagcaggacaacgatgcagccgccgccgccgctgtccgacgatggatcagacgacaggaacgcgcgcatgaggaggtactcggcgagctcaccggccttcgcctgggtcggtggccggtcgtcgcgctgctccatggtccagtcgtactggacgatctcgtagtcgtagtcatcttcgtcgtcgtcgtcggcggcggcggcgctctggctgcggtgcctgacgtgctcgatggtgtcgaccggcgggagcgagtcgatctgctggccggtgacggggttgacgaggcggagctcggcggagtcggcgtcggcggtgacgatccatccatgggagctgcccaaccatgacctgtcgcggatggggggctcagccggcagcgtgacctcgaacgtcctcccgccgccggcgaggggaaagatggtggcggcgcgggtgttgtcgtcgccgtcgcccgaggcagcagccgtgtagactaggcacggcggcggcgggcggcgggagaagagcgggtggcggtcgcggacggaggcggcggcggcgtgccaggagcagcagacggcggcgcagcgaaggaggtcggcggggtcgctgaaggtgtggaagacggtggcgaggaggtcgaacaccatgtccgaccagctcgccgttgccggcgacgtgaccatcgaggacgataggtctatcatgcgaagcgcacagctagctcgacgatgggtgactgtgatttgattgcgatttgcgtgcgtatgcgttagatatgcagttcggccggtcacgcacgattccaactcgatcggtaactgagtgtacggactatgtatatgcacgggatgaaaccggtattgaaaatcccaaccgcatccccttccgttttgtaccgacgacggtttcttccatgaccattgttgcggctggtatgctgttttggtacggaattcccgaacaaattaggagaatattttgtagcaggtgcccaatgcaaacaaaaataagagttaattgcactttagtccaaccttttttctttatattgcaatgttaaaaaaaatatatgtttcaataattaaaagaattgtgtttcatatgtgagaaagggaaagtagtttcaactcaactttgttgcacatttttaggccctgtttagttttcaaaacaaaaaatttaacaatgtcacatcgaatgtttggacatatacatggagtattaaatataggaaaaaaccaattacatatattgtgtgtaaattgcgagtcgaatttttaagactaattgcgtcatgatttgacaatgtggtgctacagtaaacatttgctaattgtcacgcagtttcctggcggaatctgcaatttgttttgttattagactacgtttaatactttaaatgtgtgtccgtatatccgatatgacgaccaaaacaaaaaatcttccccaactaaacaaggtcttagttttcttgttgtaatggatatttctttagtattgcacctggtattattcgaatgtttcgacaagtaatatcgtttgcaaatgttgcatatggtattttctcatgtcaagtccatgattcatggcgaccaccgcctccttcttccctcccctcacctccccctcctccgcctcctccagggacctccccgtgcgctccgcttcccgtagttcgtcgacatcgagcctctctcggcggcgtgggagtcgtcgtcgtcgtcaggtgcagccgtggcgtgggtggcgctccccgtgcctcccgggatggaatgggaggtgctggacgcctgcatcaacgccgatgacatgcgatggccgcgaagaagatggagaaggaaggaagaagacggaaaggaagaggatggatggaaaaggtgacggcagtggcatggttttaattttgtaaaattggagtgacatggttacgaatagacgaattgtaatagcatttttctgaatagccacattttcaatggcatggacccttaaaagaaatattctagctttaaaaaatgtagctaaattggtcaaatccatacaggtaaaaaaaaagtccaatcatatcagcacaaaatttatggaaaaaaaaactgtcaattttagtctacgcgttcagcccgattgtggattgaacaataaaaaactatgcatgccgttattttttggcctattctctgtcagccttacgaagatagatataattaattgactaattgactttgagttagacaatgtaaaaggtaatcttctttttgataatgatgtaaaaagtaatctaaacgatgtacatgctcctgtcactgtcagttaatgaaatcaactgtttgttcaaaattgttatgggttttcttacacagctttcattcaactctcttataatacactattagagaaacgataaaaggactagtaccatagatgccggaaatgtaataactgacacctacagtatttttttcgttcaagcgcgcgcctgtggggaaccattttcaagaaccgacacctatgtaatgacataagtgttggtttaaaaggaaccggtacctatgagtcttgccaaacataggtgtcggttcctattaaaaatcgacacttatatctaagtcatcggtactagttttttataaaatgattgttataattgagtcatcagtactggttttataaaaggtgcctatcgttagatggatgttgatgaatattttcttggattcgatccgatgcaacgagctggattttttttcattcctgaaacctcagtcctcctcattggtgccgcttaagggatgctggccgggaaaagtccggtacgtacccatatgggtttcctggccagctagcaccaaatccctttttaagtagtagcataaagttgggtgtgaagggtaaatgctcattatattgtccttactctgcatttgctttgataattctgcagccgaaatgtttctgatgcgcatttttagcgcagatgatcatgtcttggccagtgaaaacagattctacaacttattgtcctctgattttaaggggctggtatggggacccatatcgtgggctcatatataaatgacacaagtactttaaaaggagcttctttccttggccaatcgatcatctctttgtgcgatttgccggttcagacttcaaacttcaaagtcagcatgctactccttcgtacatccaggtccatttgtttaagaagagctatttagtcagaacatcgagagcttgttcggatcgacaccaatgtaaacttttggttaaagacgagatttggctactgtcaaaattttggcaaattaatctagtcaaaaggcaagagtatgtgattttttttttgaagcaatcaagtgtatgtgctttggttttcttgccgacgtttttggcaatgccaattcttttgcaaattgcaacaaacgaaacatatgtttacttccatttgcattactatttttggtatatggttgaatacggcaatgaattaaccaaacaggcctgttatggctgacgttgcttaaatttgtgctgagattatgtctagaccgtgtcaatcgattctctgtgaagaatgtacgtcctgccgtacatcgactttttcagcggctgtgtttagttccgaaaaaaagttgaaagttcggaaaaagttggaagcttagaaaaaaaagttagaagtttacgtgtgtaggaaagttttggatgtgatgtgatatgatggaaagttggaagtttggggtagttgagggtgaactaaacacggcctaaataaagtctaaggctgtaatctgttaattgatcttattggtgcagtttcgtaaccataccctaatcagattgatcttgtcagcttcgttatgactgtaggaaaggcttgctttatttatttatttttcctcaagagcaagcgacaagacaagatgggtgtttctcccttagagttcttagttatgcaaatagttattgttttttactgaaataattattagaaattttgagaacactatataaacattttagatcaatatataatatttcattctaaaaacggataagtttaaattcacaagaaatagcatactcatatatatgattgtgaacaaaacatgtaatatatcgttgatttctataggccctaagtcataggcaattcaataaatacatgtgtaagtggtttatcacccgcctgtaaaaaatagttgtgtagcagtgtccagacaacttggggggatattggttcaagtgttcaaccaagctcacttcaaaaaggttttggttcatgccctcttcagttcccaaagcaaaattttcacgatgtcacattgaatgtttggacatatgtatgaagtattagatataagcaaaaaaacaattacacagattacgtgtaaattgcaagacgaatcttttaagactaattgcgctattatttgataatgtggtgctacagtaaatatttgctaatgacggattgattaggcttaataaatttgtctcacagtttcctgacggaatatgtaatttgttttgttattagactacgtttaatattttaaatgtgtgtccatatattcgatgtgacaaccaaacccaaaaattttccccaactaaacaaggcctcagttcaatatgctagaacgtagggtaagctcatctttccgtaacggcgtgtttagcaatttaatggaaggggacgggaagtttagagggagatttggtgatggattggtcatgggagtttggtttttaatcctagtcccttgtttagctaaaaaaatagagtaataggaagttttgggaggaatcagattttaagtaatgatggatggcttagatctaattgtttgtacttgctacttagagaaggaactccctaagccatccatcattacttaaaatctaaagtatacacttagagggtgaaggtgagggtgactctgataccaccgccaccccagccattcatgcaagtattgtctatacagggagattggatggtggtatcagaaacaagagagttcaatctccctgtcccaatccatcaaaaacccccacaccaccatccaaagttccagacaaaggaactagagaagttttatggtttttgcgaggtacgtagaggtattgaaaggtgaatcaatgtggattattgattaagagaggggtaaggtatggaataaaattattgtagcttgtctattgtcgcctaaactgttgcatcattcttctatctaatctgctgttatttttatcctccgccttgtaaattagattaaaatctcccaagattaaccatgaaggtaggcttgttggagccacatcctgtaattcttgaaggaagagaagtttggcagcatcttcctatggaccataagcccctgttattgtccagtaggcatttgtttctctcatagtcaccttggctgttagggaaaacatacggagatcacaatgtgacaaggtaaaatagttctcatcagctgccaggattataccacccctagatccctctgcaggcaggaaaaagaaattgttctgaaaatttactccatttgtttcaattatgcaggccttatctacatcttgcagctttgtctcttgcaggcaaaccagagttgcattctgctgttgaaggagatttctgaccgcctccctttttgctggtgcattcagacctctaacattccagcttacaatcttgcaatgttattgaaacataaagctaagtttaaacactgcagataagtagaaccaagaaagaaaggaagaggccacatagaccgttgttttgctgcagcaaaagatagagcatcattcataaacataacctcctgagagttcttcagtgagttgtgcctagtttggtggaggtctaaagccacagagttcacagacaatacagcaaggcatccagcccgctttagcttagcatctcgataacttctgcagggaaccggcacccattttatttatgtaggcgccctccaggactccaacttgatgtcctttaagccggggtcacagctgcctttgctttggcagctttgagcttcagcttcttgcagccgcctttctccaccaaatcagcgatcatcttgagggagcgtggagtgagtttttttttgacattctcatcaaaagaatcaccttcactcataataccaatttttttggaaataatctcttgtgctataagctcaattttgcaaccattccttcttttcttttatagtctctcactgtgtcgttgagtagcgctaagcacaacttttggtttttttagtacgaatgcgaattgggggcgacatgaggggtggtctcaccggagttgtgagggaagcaatcaggtcagcagcactgttgttgttaacgtcttcggcctgcgttacaacagtccctcctgacagagggacatacacaggggagccctgcacgccatgttcgccctctggcgagaagctgatagccgcttcaacccttaggccatttacaatgcaaagacgtagcgttcagcctccacatgccagctcggagattcctctccacctaggcacttttcactccctcaccaggaacggggagccaaagtaagctccgagttctttctcacaattgcaggtctggcccacaacatcgattcccgcgtcatcaagaaacggagagagaacaagggaagacatcacagcgagctcgtcggatagttggctgcgccggcgacgcaacaaccatggatacggacgaagagaagggggggacggaggggagaagccgatgagcccgccatcgccgtgcgcagccgacgagcacgccgtcgccgtccacgccagatccggtgagcccaagctggatctggccgccccgctgccgctccgctcggcgccttccccgctgctccgcccggcttcggtggcctccccttctggccgccgctcgcgtcgccatctctctctctcctcccacccatggccgccgccgcccatcgacgccgccgcggcgcagccgcccgacgccatcgccgcggaggccagaagaggaagggggaggcgcggaggccgaaggaggaaggtggaagccggacgctgcttgccgctcgggccaagtcgtccgcccgccgctgccgcagtcatcgacgcccgccaccgcgcagctgcccgacgctgtcgcccgccgccgcgcacccgcccaacgccgtcgctgctcgggccacggcgcggaggccggacgccgctcgccgctcgcttttggtgagaggggcgccggatgggggagatgggcgatacggatggggagaatggagagagaagagagatgaaaagggaagagagagaggacgggtgggacccactatcatgtgcttgcgaaaataaaataagccacatgcactgtgaatcaagtgtcttctgtgttccttgcctagctggtacctcaggaacggcattttgcgacgacgcactgtgagtgcccttatggggtcctcttgctgttcctggtttccctggtccccgtgatggaaggaaaacaactcagctggagaagaagacagatcaatagcgagggatcccccccccctcttgggcttttgcttctgcgcggctgaaagtgaaattggggccctaacctcagtgtcgtccctagaacggcggatgtggtttatggtgatgtatgtgtctctgttgcgctggcatcccctcgtgtcttcattgtagaatccttgaccatctcccccacgctcactgctgtgggatctccccgtgatgcggccccacagtgacctggagcggctctggtagcgcggatgaggccgaccaccatccccatctgggtcttcatttggtccccgcaccgcactcggctctagcctgcacggaataggccgagagcccgaacgggaacgagatacaatcatcatagaccccgtaggaccactcgtattgcttgtacaacattggatgaggctggaggtcctccaaggtgtccaggtgaataatcaccggggacaaacatccatccttgggccccgacggtggggggttgtgcatggggtcgatgtcgggcatggggatgtcgacagggaccagctcatcatccggatttgccaaccccagccatgccattttggggatggcgccggggtcgtttgtctagatccgaaggtcgaaggtgcggttatagttgtggcgacgtgagtactcttcgatgaagttgatggcgcacctgggcccaatcagcttgactgcagtgacctcagtgcgcgcatgcgttggaatgccctcaatgcacagacgtgcccggaactggtaatgcataccaaatttgttatatgtttatctaaaaaaatgtgtctattccaggaaacaccattcatataatcaaaatagataactttaccaccacacacattagaagacggttttaacctgcttggtaccaatgttatccagagaagcagaagcacccaaatatcggccctattttttttttacatagagaaccacccaaatattgcccctattttttaacatatacttattcttctttgttggactatttgcaatcttctcccgtggtctattcctattgacgcgaaaaacacatactggcctgggagatctgcttagctcaagtgcaggaccaaaagttgatgagatgcaggcgtgccagtcagtttgactctgcaactgacaaggtatacaaatagcatatcaatgagccgatcggctgataagccgatagattaattctagccgatgtcaataccagccgataccgatagggttttgagctatcggctataattccgatgtagattctgacgcttgatgtaaataacaatataaaggcaatcggctgatgataatgtaggaaagcaacaatataatccattagaaaccaatcggctaacaatgatatgatagaacaagtgtccgaatgttaaagcatacatcggctggagatccgatgtcataaaatccacaaattagattaaatggtgaaatctttgttatcatcgactaaatccaacttacatgcaatccttgtaagccgatgcaacgtcgagatatctcatcacctgaaaccccgatgaaacccttattggcagtcaaaaagcaagctagggattatggttctaaacacggcttagtaaatcaaacttaactaatgcagcactaagtatgaaaagaaacacaatatctagacaatcaagctgttgactgatttttagggtggtagatgccttagctaatctaatcttagtaaaacaatttagccgataccggtagaaaccctaaagcgagagacaaccgatagagctaaattgagatactaagactagattaactaaacatatgataaatagccaggcaaatatatcaaccaaactagagcaatccaagaggtcgaatgtactgatatagccttgaatagcgccggcgtggacgatacaattgcctgagccggtgaaacattggacttacccattcatcggagatcgaaaaccaatgcagccccgagtcaagtgccaagccccaccgtcctaattaatagataacttgccatgccgcattctccttgaactcggtcacttctggataagtttcatttaatagattaatttttttaaccaaatatagcagaaatcctactataggcgatgtgataattctcttaggggcttaccaaatttcactgttaataattccaaatgccatcttcatcgaagactttgattatttgctacacgggtccattggaatatttctattttaccacttttaactgtcaacccatcaaatcgggaggtaaatgactatcttgtccttgtcttctttccactttctcatccctatctatggtggccttggacattggacagctcactcatctctcctgctgagttgctggcttgctgctcgatgctgaggatgagggcgcgacacggcgcgtgaatatgaggccgacgacgccaagaggctgcacgcagccggagctcgaaggccatacactgtatggacgttgattctaatgtgctaattaagctatggatgttcttgactatctcattggggggagctcaaaattaagcaaccggcttgaatcccttcatcaatgccactaattttgtgccggcacaaaatccgacaaccgccaaccggtacttgtggctatttctatcactgcaacaaatctggacttctatgacgattacctgatgacagaacacatatctgtcataaatagaggctgtttatgacgactgttcagaggatgacaactgtttatgaccaaaccgtgtatctgtcataaccatcgtcatagtatactctgcatgggctctgtgacgatagcacgatgacaataatggatcgtcataaaacacataactattatattttttaaaaaaaacaaaaaaaatcttgttatactacattgccactagaccataaatcatttgtcctaggtggactcttgttgtctacatcaattatagtctctcattttaggattttaggattttaggattgaagtcatctctagtctcattttatgaataaaaaaatcaaaattgtggcgttttattttatgattgaatgaaaaaacttaaaaaaacaaactaaaatggctataagttggtctaaattattctttgaaattttccgtgaattttcggagctcaataactaattttaataccacaaaattcatttaacctattaaaataaatgaaaaataaattaaaattcctctctctgtccttgggcctttttcggcccaagtattactctctccctccctcagcccgcggcctctctctccctcctcctctctcttcgggccgccggcccacccttttactcatccctcgctgacaagtccatttacctccctcctctcaaatcaaataactttccgggtagtaaataatttcaaataaaacaattgttaacaacaaagttgtatatcttaacaagatctacaacttttattttggtcatttttcaatatgactttgtttcaataatttgaatttgaattttaaattatgacaacttcaaacaatattttcaaatactaaatgatttgaaatgaaaaagtcatcaacaacaaagttgtataacttatcaatatctataatttttactttggtcatttttctatatgactttgtttcaataatttgaatttgaatttcaaattatgacaacttcaaacaacattttcaaatactaaatgatttgaactgaaaaaatcaacaaaaacaaagttgtataactcatcaatatctataacttttattttggtcgtttattcatctgacaaagtgatagtaacattgttcacaaaatttacatatctctcttatagtttataaaccatatggagatatgtaaaatttatgaacaatgttaaaatcactttgtcg

SEQ ID NO: 27948 - DNA, 4432 bp, Oryza sativa
cagctcgattacttgccatagtaagtatttctcctggttataattctgtcatatgcaggacaaatgtgccaaaaaccaactgaaccgtgaaaaagttcagtttcagcagcgtaccggatctcggtcttacattgcacatgcctatgtcgtggtaaggaaaaaatgatgatgtcatctagttggatgtagtttttgtgtttcctgatggaggtgtttagatccagtggagatatatatcttcatattgatagtggctctacataatgctatatgatttaaagctttagtaggctccctcttcatgtgagattatctgcagccctccctacatgtttttctgcagcagcgtgggttggccctctattcagcttttgctgcccttgttttgcattgtataggtatagcaatatgccattctgtagtggcatacctctacagtgcaaaacaaggacaacaagaggtggcaaagctctaacccctgctacagcaaaacatggagggagaatagcaggttatctcacactttgaccatgtaaaaatatgctcatgttttatccataaatttctatcagtttggtttgattgctcttgtcatgcttatgcttatttggggtgacatcaattaagtttatacatggcaaccactgtcaatgtttaacaaaaagaatcaatgtcaaccagaatgcttgttctggaggacatgtttttgtgttatctgtgtactttaacataaccattactcatgccatcatgtttctctcaacattgcagaagcaagaaaaatacaaagacagtgagcccactgcaattgatctctttaaggagttgcattgcagcaaaactaaaggttgcattgctgcttggtggaattttttttgctggctgctggcaagatatacgccgaaacttagtagtggctgctaggtggaattttttggtgcaggaacttggcactacctgtaggaactttgtagtcggctgggacttgtgtagttggatggtggatgaatcattttgtattcatgttttgtgcttttgtatggaaactgtattctggaacttgcttttgtatggggctggaaaattaattatagctagaatgtgattgtaatataattatagaaatggttgtggtttatattctatgattgctttttaattgggctggcccataatataggctagaattgtactattgggctataatgaaaaaaacgtaaaagcaaatttgtagctgggtcaaaaaaaaaaatatttgggccaattgggctgattgtaattgaaaataaaaaagcccatgctatatggcccgaatgtgaattgccacgtcatttgccacatcgcctgcccttgtcatttgcaacatcacatgtcatcatatacgtggcgctattcggttcaatttgttatgacgaatttgtctcgtcattcatcaatgacaggagaattatcgtcactgtatcaatgacgatgtcctctggtggtcacagaagctgattagtgacccaccttctgtgatgacagccatttcgtcactgcaggcagacagtgacaggaaataagctgttatcgtcgtaatgtaatcgtcatagaagcccagaattcctgtagtgtatagtagtgtgatgaacagcgtgggcgcgagatgtttggtgctgcgatgaagcggcagcttttcgttttctcttcgattgcaatatatagaagtaacaagaacaagggtagctaggcacgatgccatcaacctccactaagcataccacggtcaacagaccaaactagaaaacatgaaagataaaaagtaactacacatacatctccacgcatgatatacggattatcgaacttatcaagcaactgtcccagtcgtcctggatgactgagttgtgtttgtgctggtgctggtgttggtgttccctgtcacatatgaagatgtgtagttgaaagcatctactggggacaggaacgttgccaccggcatcctcgtcgggaggctcggcggcggcacctcgcctcgcagcacactgacagcctgcctaatcgttggcctcaggcttcggtcagggtgcgcgcaccagagcccgacaaccatgacagcctccatctcctcgccgttgaactcgccgcccagccggtggtcggcggcgtcaataatcctcccattgccgtacaaatcccagacccattgagcaatgtggatcatgtcctcttcttcatcagcttgccgttgcggcgccattatcggtcaccgaccacaagcgatctcgaggaggacgacaccgaagctgtatacatctgactcggcattcgccctgccagtgatcatgcactctggatccatgtaccccatcgtgccagctagcaccgttcgtgtgggagccccggtcgtggtcgacaagcctagctagcccgaagtcaccgagcttggcattgaaggcggtgtcgagcataatgttgctcggcttgatatcacggtgcgccacacactgttccgactcctcatgttagcacagaagcgctgatccggtcccaagcacgatctcgtgcctacaaattaatggagcaccgcttgttaattagaatgtcaaatatatgtttgatagattataatatagttagacaattaaagctataattgtagtgtgagattgagtccgcgcgtgttgggctatctaaatgtttttacagcaccttctgctgctagaggtagtagtgtagtttgtttagatctgaccattgattcttaaggctattttagacattagattaaagtattaattggagctattttaaccgaactaattctcgctgttctcgccgtcaaattcaatctctctcacggctagtgccaccagctaaacaccgcttgctatcattcttgcagcctgcattgcttaggacgaacatacacgaaacctggatagtgaagaactaatagtgttgatccattgattcagaattcagatcatacatataggtgcatgcaaatcctgtggacatatatatgtagaagcaagaaagctgaaactatttcatggatatagtcaatcatatatgcatgcacgaagaactcggttgatcctaattcctctcctaaaaagtaggcaagtaaactacacggaagaaacaatctttcaagagcattaccaatagattacctataatcttccccaaaaaaatgtttttaggtttctaaactgaaaataggtagtgaaaaaactcctccctccaacagatatcctaaattcaatccccaaaacttaaaaatgggcccttctgttaaactaccaacagaaatgttccgttttttttttctttcacagaaagatcgctatctcccatgcgcgggagccggaggagagaggcgggagtgtgagattgggagcgacgcgtccacatataaacggagcaaggaatcaggagaagggaactccaaaactcgggtaggagagtaggggatttgttggagctatttttttactaaaattcctcaaaatcagttttgggaatcagataaggtagactgttgttgttgctcaaagggaaccaaaaaaataagagatggttgccaaaattcaatcgggacggtcaatgaaatttgcaaaattatttacctgccatatgcatcttcttccaaatatatccctacacgaattctaccgtccatactacagggtatagtataaatgaatatgatccattgatctagatgaatggatggctcatattcatccaagggtactctaaaaaataatacgcctttaaatcggttagtgtgctatgatgattgggaaggaatgttcgatcactactgttagcaactttttgtgacaagttgataactacgatcgcagcacctaacgccttgcggtgattctagagtcgccaaccacctcaatctagcaaaaactagaccaagatgggttttgataactaaagcggctagcagagccgatttctagataactacccgtctcgtaggcaaaacgaaaggttttcaagacaaacctacgaagaggtgttgcactctcgcagctgcggcggacgatttacagcgcaaatagacaaaaatggacaaactaagagaaaactaaaagcaatatgaaaaacaattcgattgaatgattgtagattggttagttacaattgaaccggccatgtcccttatataggggttggtcttgccctctataggccctcctccacgtacaactcgggatagaatccaaaggaaacccgaaacatgccttcccgagcaaggaaacttcgagaccctgcgaaacagacccggactcggactctgccggtcagaccggccacacaccgccggtctgaccggccaacagatggcagtcagactggcccaattagagaaaaccggcagacttccaaactttggcaatttttcctattttatccctaggtacaaaat

SEQ ID NO: 27949 - DNA, 7098 bp, Oryza sativa
taaattaagcgccagaacatagtcccacacacctctttttaatcaaaacatttacttgaggtttttataagaaaaaggtgacaatttattcaattccattgtccaacaatttaccttaacatatctcgctggtaagaatcataatcccctccgcccctccgctttctccctcccctccccatcggcggtgacatccctctcccccctccccttcctgtctcgctagcatggcgtgacagctgtacatttcgtggtacggagtgacgacggtgagggtatagcatgaaagacgtttccttggcacggcgcaacgacaacggcgatatggcgcaacgacggcgtgggcacggccgaagctgtttcgtcgaggcggtgcagcgacggcgggggtacagcgttaggacaacgatgacagcatggcaacaacccatctccctctcccactcagcctcttcattttcaccgtcaaatgcgggagatgttggcggcagggaaatgggctcgaggacgacaatggtggatccaggaggatgatggcagtggtggtgtggttggcaagttcggctcgattcgagccagctttctttttttttttctcgtgcaaagctaaaggtgtttgttctattttcctcataggtgtcggttgctggtattaataccgataaattggtgccggattttcatcctacgatacaaatcggcacatatggcatcttctatagtcgtgttaggatgttaggtgacttctaatctaatccattcatcttctttaaaatccatgcggttttttcttaagcgcatttcacatagtaaaactatttttattcggcgaatagtaggagtacacacttacacaagattttttttttggcttttttgcccagtgaacaatactatgtattatacgtacgcgggatattttttttcccagtttgttaagtgttattttcctaatagatctcatctaatggtataaaataactggtctatcgatttaagtgaaaatcaagggtcggatgttttatatttttctcagaatatttaggatctcctattataattacatattttttatactaaagtgaatgattaaatatatgctcaaatatcaatagcataaaaaatcataggtgagaccaatatattgtagggtattcaatataaaactaaataaagaaaaggttaaatggagagtaaaaaaaagtggggcacatatacgttacatgcgtacgaatgggatgagggaggcgtacgtacacgcgggtgagatgagagggaggaatagcttcttttttattctaactaatggtctaaaataatggaaccacctatttaattaaaaatcgacggctaaattttgcctccatatagcggtataggagcatttttagaaatctcacatgacggtttaatagcgtttctaggaattttagtgaatttttaagtatattatagataagtatattgaaactatggttctaacatacatatgaattgaatttataatttaaaagctacaattgttgaaagattgtctattttttttgtaaaacccataaaggtcatgcagcccttgaagtgcacaatgagctgagcttagtctaaccgagttgaaaataagttgggattatatatcattttaattaccatacataaaaagtgagagttcgttagaaatgaaaaaaaaacacacagagagagagagagagagagaaaaggaaagggaggttgggtgtagatccgtacacgtacacgcagaacaaacgattggaaattgggattcgtttttaatttacagatagatctgatggttcaggatattagacccactaatttacttaaaatcaagggagcatgttttttatttttactaatttattgaaatgtcatgtatcaatttatgagtatttgtaggaatgccacgtggcgatacgggagcgtttataggtatttcagttttttcttcacctggcaaaatatatgcaataccgatcttgatgtatttatttaattacaaataaaaatagcacaaatgaatttaatgctttatataaattgagaatcatgattatttagctatttaaaattaaaactattttataatgagtttttagaaaataggagaaaaggggagggcatgtggaatacgttgcacatatgtacgtacttacgtacggtggcaagtactgcaggggaagggaaggttacaaattctgcgagatagatctagagggatctaataggcccataggttggtttgagtatctattcctttaaatcggtctaatggttaaaaataatgggtccactgatttaagtgaaaatcaatggtgagatgtttttcttttttctaggatttttttctaatttattagagcgccacgtggcgacttaggagcgtttgtagagcgctacgtggcggcttgagagcgtttataggaagtttaatggacttttagtatataataatagatagatagatagaagatagatagatagatagatagatagatagatatttgctgttacacgacaatacaaactatctaatcaataactagatatttttggttaatgtaggagctcacttaaatgtgcctgactaactaatattgccgtcacatgccacggacaaaattagaatcttttggagatggttgtacctgagtggccacgggagcacgttggcgttggcgttgtagaggtgggtgtcgaggctggcgttgggcatgagctcgtagacgaggaggagctcgcttccgtcgtggcaccagccgatgagctgcaccagattgcggtggcggaggcgactaatgatacgcacctctgactcgtactccttcctcccctgcttcgagctctaggacacttttttaatggctacttcaagattcagatccttcaagaatcctttgtacactgacccgaacccgccttccccgagcttgcagtcgtcggagaagaagtctgtggcgacggagagctcgtcgtagcggaatcgctttggtctggtccccttttcgaagtcatcttccatctcctgatgctccctcatcagccgggcgtgcttccggcggcggcgcaagaggagccagatcgagacgccaagaatgaccatgaaagagacggcgccggcgacagacaggccggcgacgaatcctgttgaccttgtggacgacggaggaggcacccggagacgatggcggaagagtgatgccaaacggcgagaggtcgtacctgaggtagcagctgtaccccttaatggcggcccagctgttgttggggaagattttgctgagttgcacaatgtagtcagacagacaggtgctgcactcgctcaccgccaggtccctcgtgcactgagccagaccgtacatcatcgatgttgatccgagccgcgtacttccggtgtccagcctgagcttggtttggccggccgtctccgcgagctggctcatcagctgccaccgcgtctcgttcatggcggccatgttctcgacgtaggatttggcgtacacgttgaaggcaacggtcttgtcggcgacggagaagaaggagacgtcggagtagcggaggaggcaggcgtcgtagttggcgttcaccgtccgacttcccgggcacacctgcgtgatccccgcgggtgcgccggcgaggcattccttgcattgcgtcggattgcggtcggcgtagcacatgatgaggccgaacacctggtcgtcgccacccgttccgaccgagctggtgttgaaccagccatcgtcggtggcggccgtggcaagtgtggagaggagctggtcgaggttcttcttgtactggctgtcgccggagtagtttccggtggttgagcaggatgggttaaacggaacgattttgttgccctgaccgatcgccgctacgcagagcgagacgaagatcgcgaggaggaggatgagatgttgggaagccatggcaagagagtctggccagccggcgacacccgttgctaccaagtttttttttttttgagagctctccactttgagtacaagctgtagtatctgaacatacgtgcaaacgcactccaccacgcacacacactccacctatcaactatacacacacgtgctaatgagatacacaaagccacctaaggaccttgtgcgtgacgaggacgtcactctactattgtggcgctggcacgggagagctggaaatttatttgggaataaatcccggtgagacgcgcgggtgacgatcccagggatcgaacccgcgcgggctgctcgctcaccagcgatgctagccaaccgagcacgctcggttctcccgttgctaccaagttgctacggttccttgctactagtacttgctgataaatattttagcactagaatatatattgtagtagaggttaaagaaaacacgatagtatattattgaacttgataaagtgagtggtagattgtagaagctagtgcgataaactcagtggtactgagtggattctctctatttaaaatatggagggaaagtgaattcctccctcgtttcatgcatatcacataaatagtcataaaaaaatatgaaaaaaaattggcaagataaattaatatgaaatactttttctgtttcacaatgtaagtcattctagcattttccacattaatattgatgttaatgaatctagacatatatatctatctagattcattaacgtcaacatgtatgtgagaaatgctagaatgacttacattgtgaaacggagggagtatatcactccacaaacatgcaagtttaaatttaacttctataagttgtaacaaaaataacaaatatagttgtgaatgcacgataactatttttagtttaatttattatttttgttgcaacttatagaagttaaatttaattttgcatgtttgtggaataatatatttcatattaatctatgttgttatttttttaaaaaaatttgataactatttagataacatacaaacaacgaggggatgtctccttaagagatgaaaattcacataattctcactaccatatgtacaattcagaaactagagtcagcatactgcaatttgtgtgagaattattgtgtcagagggtcttttttttccacgttttggctttcgctgaggtgtgtgataaggacggaacacgggtcctctctatgttggcgtcaaaagtcagcattctggatagagaacaacgtcatctttggcccggtttagttcccaaatttttttataggttgacacatcagatatatggacacatatttgaactattaaacatagtctaataacaaaacaaattatagatttcgccagaaaactacgagacaaatttattaaacctaattaatctgtcattagcaaatatttaatgtagcaccacattatcaaatcatgacgcaattagccttaaaagatttgtctcgtaatttacacgcaaactgtgtaatttgttttattttttatccacatttaggttgtgtttagttgagggaaaagtttggattttggttgaaattgaagatgatgtgactgaaaagttgtgtgtgtatgacaggttgatgtgatggaaaaggactgaagtttggatccaaattttggatctaaacacagccttgatagttcatacacatgtctaaacattcgatgtgatgggtgaaaagattttattttgtgaactagacagggtatttgtttaatgcttaggttatatttttatttattttctacttagattttgtatactttgtgcagattgatgcagtttggacacagtcaattgtttattattgaagtacctattggaatgttcctatcgagtaataaaaatctaccgttcgaagtccatgatacaattaattaagaggaaatacacgcgttttcagtcaaccaaaatatttggtaaatattttttgtaaaatgacagatactttagggaattgactcgtattaagaattaatgactccattagtacagcacgaataagaaaatcattttttgccttaaaggataagcagacaaatctcttctttctataaagctaatgtccactaacacctaaaacttaacatgtaaaagggcatctccaagagagggctaaacaggttcctaaaagataaattttacaattttgatgaaaaacaggcctccaacagattcccaaccatggtcccaaaatttacctccgaccaaaatcatggccaatctgagccaagacttgggagcgtggacgcgctcccaatcccactaatcgtgcaacattttctctgcccgcgccatttttttgtccttccgcgcccttttttattttattagtgtcggctattttttctccgtaacttcgatggtgtaatttttataaatgatgactagaaatattcgaaacttatttaaaacatgttcatatgaagtcccataaagtttctaaagaaatatcgctagtttgaggtgtattattgctaaatgttatagttagagaaatctgaatgctttcaagttgaaaatatgtcgcaagatatataaaattaatctcagttgcagtacaacatgcttcaaaacttttacaccgttgtttgagatataaaattgagaaacatagaagaaacaacaatataaaagttttcaaataatttgaaaaggaaactcacaaatagataaggtaatatcagacatctatgcatagttcaaggataatcttatgagatataaaattaagaaatatagaagaaaaatacaaaaacaagaatagtgttatttgttaattttatttcttattaacgaagttgagtttgttcatgtaacttggtacggttgtttatttataaaatatctacaattctacatatgtaattttttaagacttttttagaacttctataaaaaaagtttccaagttttcacctaagatgtggtttccactatatatttccggcatatagaagtgaggctcatcatgaataaatcaagtggttatatctgttataggaatgaaaacggagtggatacaaacaaatatgctcttatcatatttgttttcatttttatctagatatgaaaacggatgtgaataaatcaaatacaaaatcaaatatg

SEQ ID NO: 27950 - DNA, 1335 bp, Oryza sativa
cagccatgcaggtcagcaggtgctggttgagtggttgtgatactgatgatatgactagatgattaaactatttttgcccctggcttctcatctttttttttttttgcccctggtataagtcataacctttttttttcatctgttctcaggcacaacaccaaccaaaggcttgcctgaccaggcattcctattccatcaaaacctcagggaggtctcaggcactgctcaggccgtccacaaaacatgcccttaacaacatggactagtattactgggatgagacgtggattgaagctcaagttatgaagaaatgaggtatactctgcctttagcaaatatctgtattgcaatattttcaagatatccatattattactaagtgtgttggtcatgtttgttactttcggttgcaacacgtgaatgccatgcacaactgattctcagccatgcataactgattctcgctgagatgtgtaaagatgatcctgatccaaagggtagtaggtttctcgcctacttcaacatggcaaggaaaacgattttcccagcattcagaatgtaaacaaacttagtaatgtaggcaaacttcagtatcgaccgtaggtgaattcacgcaatgacatctcttccaaactcatttgttttctcctccatctcacgaaaatagtgcctaggagctctctgcccttccacatttccttctctcttacctcaaactgttggtagacttctgcctaaacaactgcacttcagagcggacacggtggaacttcgagcgtcgtgccagcctggatctggccccatccgatgagtcgccaatgcttctcaacacgacggctaagggcaaccttctcacctttgcttgtgcagacaggggcagtgagctgaagtttggcaagatcgttcttgacagcaaccacacgagcaccagtcgacatggatccgatgttaagcatgaggatttcacccttggtgagcttggagaccttcccagccttctcagtaccttttgtcctcacacccaacagcctccgaagaaggaagaagttgatctgcatgcatgaaagtccagatttaagcaatgaatgttttattctcactaaatcttgatgcaacgaagagttgacaaacctcaagctccacatagacatcaggaagtgatccaacttcacctagaacctgaccaaccagtctatcagcacgtgtcaaggttggatccatggttgttcccacaccaataagacctccaggcacagcaaattggagctcattctgctcagcatagagcgaaacaatccttgaatagattggggtgcatttgatgttgccgctttc

SEQ ID NO: 27951 - DNA, 648 bp, Oryza sativa
cggcgccgcgctgatgtacctgcaccacgaggcggagcagcgcgtcgtgcaccgcgacatcaagccgagcaacgtcatgctggacgcgtcgttcagcgccaggctcggcgacttcggcctcgcgaggctcatagacgacggccggcgctcgcgcacgacgggcatcgccggcacgatggggtacatcgacgcggagtgcttcctcctcgccgggagggcgagcgtcgagtccgacgtgtacagcttcggcgtcgtccttctcgaggtggcctgcggccggcggcccgcggtggtcatcaacggcggcgaggacgcgatccacctgacgcagtgggtctgggacacgcacggcggcgccgccgggggcggcatcctcgacgccgccgacacgcggctgaacggcgagttcgacgtcgcggagatggagcgcgtgctggccgtcgggctctggtgcgcgcaccccgaccgcggctgcggacgtccatcaggcaggccgtcagcgtgctgcggttcgaggcgccgctgccgagcctcccggtgaggatgccggtggcgacgtacggcccgccggtgtccacagcgtcggcgccccccatcaacgacacctccgcaggacggtaggaactatggtttccatggccgccggac

SEQ ID NO: 27952 - DNA, 825 bp, Oryza sativa
agcatattgaatcccagtttataaaattattttgatttaaattaatgcattatcgctttatttaaattcccgcgttatcactgttttatttagccatgcctatttacctttgttatgaccttattattattgctattgttattattaccttgttcaccctaggataaacaaaaccccaactagtgggtactctattcatggttccactagtatgaatttaggtagatgcttcgctgattaataggacaacattaggtggtttttataacttagactttgggaattttcatatcacttggatgctatggaatggatggcttttgttggaattggacacacacctccccctctattcaaaacccccaaaaatggttttaggctgggctcgaggtgcgtggttgggtttggttagtcgtacctcgggtactataaggattaagctcgggcctctgttgcaaagcactaccgtacttccacatgtctagtgggtaaggcttagtttgtggctcagtctggttataaacaaaagtacacggatggagatggacgaagtcgggggtcgatggacatctctaggacaaatgaaggctacacgagctgcggcccggtagtcgagatgtcatggcacagggccggtgtcctgctgctgggggctcagtcctgcctacctgtcccgggggttccggccgtaggtggggttgggtcggtactcttgtttatggctaggatgggttgggaactatgtcacgtcttccgtccgtataccgtggtggtatgtggcacgtggttacacgtgaggaagatgtgtcttgtgggtaaagatgt

SEQ ID NO: 27953 - DNA, 8123 bp, Oryza sativa
ttgtaattagacttagtatataattattgactagctagggtcctaatgtacgtcacttagacttggcatagttgactattacagttttaatacaatattatttgagttttcgtataagattattatagttttaatataagattattagatttgtaattagacttagcatatacgacaattagacttagaatatatgacttagcatatatgattgttagcatataagattgttaaagcaaaaatgtctcatgacttagcaactatttcttgtatgaacagacggctgatcgcgatgaggaacagatattgtatgatacaatcgcggagggaagcagccagtactggaacgaagaagaggggaacgaggatccaaaccagtacttgaacgaggaagggaacgtggagagggatgcggaggggaaccaagaggggcacgtggagagggatgtggaggggaatcaggaggaggaggctagtggaagtcaaccctccgctggacggaagagggcacgcgggcaacgaggtgccgcgaagaagcttgagggtcggcacatcataacggaagtggacgaagacggccgacctattgccccggtggaagcagccaagaactacatacgtcacagcggttgggttgtgcgggataacgtgcctgtcagtacggtgtactggcgcagaacaagggcacgcggagatcatgagagctttgtcccagatttggagaaagagatgctgtggaccacaatgctcgagacattcacccttcccgtggatacagaggacaaagtgaaaaggtggactctaaagaaaatggcataacagtttcagagattcaagggaaatctgtaccagaaatatatcctgaaggggcagacaccgaacttcgacacattcccaaagctaagggatcactgggacgagtttgttgcatataagacaggtcaacaaggacaggcgatgatggaaagaaacaaagaaaatgcctccaagaagaagtaccatcaccacttggggtcagacggctatagcgtcgcgatgccgaagtgggaggagatggaggcaagcttgcttgagaggggtatcgaaccggccaccgctaattggccggatcgatcgaagttctggtattatgctcacggtggaacgctcaacccagctgatggctccctggtcttcagcgatcagatacgcgaggctgcacgtcgactaacggacgcagtggaagcctcttctcagggcacgttccgacccgacagagagaaggacgagctgtcactcgccctgtagactccagagcatccaggatgaacacgagggaaaggggtgattccttggaagattgggttcaagaaggacatccacacgtacaggagtcggatgaggagcaagagagataccgaggcaaagattgcagatcttgagtacagggtatcaagctacgagctcagcatgcaagaggaggtggcaaggaaggttgatgaacgcatggccgcacatcggtcccatgatccccagccgaccattcctcctgcaatggtgagcccttcaggaaatcgtagcagctgcgccttaacggggcaggtaggatcacagtgcatggacgccatgcaaacccaggacaaaaccacctgccccgttgatgacatcactcagcggacaccatgtgagctgcatattcccttcaagaacttatcaataaaggtaagcttgtagtttatagattttagatttgtccattctgtaagttgctgcttatatatgttcattacaaataaataacctctcaccacgtgaaggtggcgtcaggcatggccatcccaacagacccttcaggtacttaccactacaggtcgattctagcaggatactccaaggtcgaagttgagttggtcgaaggtgcgtacgaggacctcgagttggattaccctggaggagatggtgagacgcatctacgagacacaagccacgccattatactatggcgcaagtggtacatcatcctccctgggcgacaagcggcatctcgtgcaccatctcctccggctctgccatctcctcctcaggctcttgcaccgtctcttcctcatgctccagcaccgtctccacctcaggctcctgcactgactcctcctcaggctcctgtaccaactcctcctcaggctcctacactgactcctccgcaagctcctcgtccggcaccttccaagtcaagggccccccaagctccaccgcctgcccccacaagggcaacgaagaaggcgaaagttgacgccgccaagaacaaggacccggggtacgattgcacgcaagaggagcttgacgcttatgtggcatcagaagtcaggagacaattgaagcctcgaagcccagaaaagaagattcctatagacccgagtgtcaagaacttcttcaggggtatgtctgcacctgccaaggaggccataaagctatcggactgtgagcgaacactcaagaaaacatcttctggaaagtccaaaccagtctctcagcttggagagcaaccaaaccaggagatcaagccgttggtgaccggtgaagattttggaatacaagaatttattaatgacactggctaactacggatcaattgctacgaggcgcaccaatcgaaaaggcggaagtgaaatacatgtacgaactcggtaaaccgcttgtcaagcatgagcagctgcagtccctacctacagaaatgtacaagttccatcaactgtacatggagatgagcgccaccggtagagagatgatcggagcgaggatcagggacacggacttcttgcaaggagatgacattctctggatcaatttcaagggtatctactaactataccagctggacgagttgctggattttgtaagtatcgttcagttagatttcttattacgtttcctttaattagttaggtccttgtatataagtacactatatataatatatactcccttttatcgttatagaatggagattcaaagggctcgacggcggggggttttcgatactggattaattgaccctcggaaagtaaacgttgcaatgctcgaccagtatccgcaagccacagaggacaatctcgtccatctcctgaaggcgcagcattacaagacgttcatactgttgccgtacaacacagagttagtttaattttactgtctttctataccaaatttcattctcgtacgaacatgctaagtgtttcatatgtaatgtatcccacgcacattacagattccactgggtgcttttactcttcgacctggaggcctgcaccgtcaacgtatatgactcaatggataaaaaagacctacgtttgacaaggttttcgaacttatagataggtactgtcataagttcctatgttaattaagaatcttgttatagttaattgctactacgaatcatagctttaaactccatgtagggcttggtatcggttccgtcatttggtccgtggcaaatggagagaaagacttaggcggaagttcaattttcctgtgagtacatgtcacgaccggaaataacccaacgggcgttccttacgtgcgtgcattattccttgtcccaggagacaaggtacaccaaaagttgatacgattcagagtttaacaagcggaagcgtaattaattaatctattacatgggtggcgaagacccagcacacaagaagacaaacgaaaaacagcggaagactagggcgacgaccacaggcgcttgacggcaggcacgagctagacaccaaagccttcatcttccaggaactcctcttctgagtttgggaaaaattgagcaagactgagtacaaccaccgtactcaacaagacacacccacaagtgcagaatacatgcaagggagtacaagggggttatagtataaagggttagggtttgcagtaaacagcattaaaagacacttagttgctcaaagttattttgtaaacacgattctatagctatataatattattaatcaaggccgtgaacccacacgagcctgccttaacccaaggcatacgatgattcagaccgaactggcaacccgaccctgagtcccagctcgtcccaagccaacccaggccagccattccacattttaattgttaagtaggttttaagaattaaaaacactaacttgggtacattgctcggcttgcccataaccgagggcgcggctattcaaataggttatactctgatcagaggtgtacatctttacccacaagacacatcttcctcacgtgtaaccacgtgccacataccaccacggtatacggacggaagacgtgacatagtttccaacccatcctagccatagacaagagtaccgacccaaccccacctagggccagaacccccgggacaggtaggcaggactgaacccgtagcagtaggacaccggccctgtgccatgacatctcgactaccgggccgcagctcgtgtagccttcatttgccctagagatgtccatcgacccccgacttcgtccatctccatccgtgtacttttgtttataaccagactgagccacaaactaagccttacccactagacatgtggaagtacggtagtgctttgcaacagaggcctgaagaccggtccttatatggctgaggtgctactatcaaaaccatgcaccccgagcccagcctaaaaccattttgagagttttgaatagagggtgaggtgtgaatccaattccacaataatccatccattccatagtgtccaggtgatgagaatattcccaaagtctagagttgtaaaaccacataatgttgcctaattaaccagcgaagcatctacctaaaatcatactagtggtaccatgagtagagtgtccactagttggggttttatttattctagggtgaacaggggaataataacaataacaataataaggtcataacaaaagtaaataggcatggctagacaaaacagtgataacgtgagaatttaaataaagcgataatgcaataatttaaatcaaaataattttataaactgggattcaatgtgttcgaggatgatgtgacttgccttgctcgctttcccaaacgtcggcttcaacctccacgaagagcggatcttccgaagctgcagcgtctacacgaccaacggaaaagaaaaggcttttactctaataaactccatataacccacaagaacaaagcacaaaaatgggttcttgacttcttaaggaaaaattaaagacttgaacggtccaattccgagttcaaatggccaagttatggccatttgaagtttatatgctctttaaatgaatatttacgaatttcttcatttaaattttaatttaaaaatggtttattgcgtcagccgagggggaggggcatgcggaccgggtccacgggagtggggcccacgcggcagcctcacggtccacggtggaccgggtgcacccgggctcacaccgatcggcgccgtgggccccacacgtcagccgcacccgagggcgcgggcggctgacggccgggccccacgcggcagccactcggcgcacccaagggcggccaagccggcgcggacggcgggaggcggcgccccgcgccccgatggtcgccgccggcgaccaccggcgcggcggagcggcggccgagagaggggagggaagggggaaaggaggcgacggtccacggctcacctcggggcgacggcggcgatgagggaggcggccgaagcggagggaggcggtgtcgcggctcgggtcgacggggtcggcggcgctccggcggtcggcgaccgaaacggagaggtggacgaggtcggcgaggatgcggcgaacccgaaggaggcggcgccgaggtgggaggcggtccggggcgacgacggcggcggaccggagctcggcggcgatggcggagagagagagcgacgtcgcgagctcgaatccggcgaggaggaagggcggcgagaggcggaaacggacagaggaggtgcggggagggtttaaatagggttggaagggggagagagcggccggggaggaaggaaaccggcgcgggaggtccggccgccatcaatggcgccggcgagatttgcgggggcaaatccgcccgtttgaacgcgagagagagagggaaaaatgggaggaaaggaagaggggatcacggggagtatttccccccactttattgcacgcggggacggcgggatgcggcggatttggcggcggcggcggcgcttggcgcagggggagcggcgggagcggcgggaggtcagggatgatgggtgggccccacccgtcagcgagggtgccgggcgggcccgcccgtcagcggcgcgcgcgcggggagaggctgagtgggccgcggggagaggagagagagggggagggagatggaccgaattcggcccattagagagaaggagggattttagggtttttctttttataaaacctttttaactttgtttatttcttaacaattattatttgtgctctgaaaattcaactaaaatttatttacgtattttaggcttttaggaaatatataaaaatcctctaagccttatttgacttttaaccttgcacattttaattgttggaggctttcacatggtttttaatgattctatgcataatttagaggatgtattttagagtcgttttgggacgcgacaaacctaccccccttaaacggaatctcgaccccgagattcggaagaactggcgaagagatcaggatgggctgccttcaactcgtcttcatgctcccaagtagcttcttcctcggcgtgggtgctccattggaccttgcaaaaacggattacccggttcctggtcctgcgctccatggtgtccaggattttcactggtctctctacgtaggtcaagtcttcgcgaacttcaatctgctctgagtcggcctgctcggacggcactcgaaggcatttcttgagttgcgacacatggaacacatcatgcacgttgcccaaggatgcgggcagctccaactggtaagcgacttctccgcgtcgagcaatgatacggaaaggacccacgaaccgaggtgcgagcttccctttcgtctgaaacttgtgtacgccccgcaatggcgtgaccctaaggtacacaaagtcatccactgcaaattctaggttacggcgtcggttatctgcatagctcttctgccgagactgtgccacctttagattatcccgaatagttctgaccttcgcttcagcttctctcaggatatcagtcccgaacacttggctttccccaacttggtcccacaatagcggtgtccggcatttgcggccatacaacgcttcatagggtgccatttgtatgctggcttggtagctgttattgtaggagaactcggcgtaggggagactcttatcctaggtcttcctgaaatctagaacacaggcacggagcatatcttccaggatctgatttagacgctcggtctgtccatctgtctgcgggtgatacgcggtgctgaaatttaaccgggtacccaactcttcttggagcttcttctagaagtgagaggtgaattggcttcccctatcagatacaattttcttaggaacgccatggagactcacgatcctagcgaacaagcttgggcctagaggtactcttgtgggtggtgatcttcaggctacggcagacgcggcggcgcttggggcgacagacctctccctgggcgatcttgagctgacacagctgcgcctccactgcgtctaggtccttcttcagctgtagattctcctaacgcagctccaggatcttcatgttgttctcgaccaacccacgacacaccatatgatggaagtcgatacgggccgcgtcgtatgcctccaccatgcgtgccaggtgcatgatggtagcgtcatcctccgagctagcatccctgaaggtggcgcagtcgcgggctcctccacgacgagggtggtagcggtagggcgagtgctgcaacccgtccgggtatcactggtgaagagtgccgatggcgaggagagcggcgttctggcaagccgcggagaaagaatctccacccgcggtaactgccaacgaagtcctctcgggtgagccagtgaggaaataacccaacgggcgttccttacgtgcgt

SEQ ID NO: 27954 - DNA, 9245 bp, Oryza sativa
acaggtgggccccacccgtcaactagggtgcggggcgggccgccccgtcaacggcgcgcgcgcgggaaaaagccgattggcccgcgggaagagaaaatagaggggaagggagatggaccgaattcggcccattagagagaaggagggattttagggtttttctttttataaaacctttttaactttgtttatttcttaacaattattatttgtgctctgaaaattcaactaaaatttatttacgtattttaggcttttaggaaatatataaaaatcctctaagccttatttgacttttaaccttgcacattttaattgttggaggctttcacacggtttttaatgattctaggcataatttagaggatgtattttagagtcgttttggggcgtgataggcacgagctcgaggaggaaggctaccctgttgtcgactacgagtcagagcgtcagaccgccatatcgacaacagttagataggctaccccaaacattgtactggtatgattatggtgaataaagagcaactccggcttcggccaacaggacgtagggttattacctgacaattcaggggtcccaacctgtataaaaatccctgtctccatctcttttacctcagtctcgcgtatatcctagtaccgacgatccccatactatgcaaatactagaattgcgacatcaaacatcgacagtagtagtgtagtaggaaccaaatctaaccattgatcctgatggatactttagaattttacttttacaccgtggaagggtattttcgttatttcaggtgctcccacgaaggctagtgattcgctcgttcccgttcgttgcgcacgacggccttcgcccgtcctcgtgcgcccgacgtctaccttcgcctttcgcgaggcctcccgttcttttcgcgcgaacccacggccacggcggcaccgcccctcaccttaatgcgcggccgccgcccgccgcccctccttgcgtagtcgcgtgaacccacggccacgtacgacggcgccatccctccaccccctgtggccctgtgcaccgcagcaccgcttcattcttgggatatgatggtgtacctgctctagggaaggtcgctttgttgaaatgtgttcttgaatcgctcaattgctatactgcaaaactaattactgaatcactgatgtttagctgatgatgtataatttaatcattttcgcattagcatcaggcaaatgagctaatgccgaagctcgtttatctgcagcagaactgagacggaccaagtactgagttctagactgaactgaaataaggttaaaaaagaaagctcaacgactcgcggttgcaagcacactctcactctattagcgtcattctaatcagttatccgaatctacaatttgactgacaaaaataactacaatcagatatgagctaaaactgtgttagtgtcttcttaatcagctatttcaatctgcaatttgaccgacaaaaacaacaattgacaagaaattgatcaacatcagcatggctacgacgatcttgaacccttcatcggtttgattaccttccggccttgccttagattctgatatggatcatcccacttcaattaggtgttgctaaaccttgacgctacggttgaaacaggtgtactagcagagtccctttttttttttgcgagagtactagcagagtcctttgacaggatctcatcatcagtatcaaattgacggcactgccaaacgcgtaaagtgcggcggcctccgtcgcgcacagcagcactgcaggtctgcagcatctcgcctcgcctccgttctccctctcgcatctcatttctcgacaaaacgactctcgtcgccatccccgcgtgctgcagttgtgaaccgattgagcatattgacccgtggactagattacgaacttacccctatgccaattgcaaattcatcacaatgccatctattacatttccaacattacccctccatgaattatactacggggctgtttgttttggtgccacacattgccacaccacatgttaggcatgccacagattgttagcttagcgtttggttgcttgtttcagttgtggcaagccacactttcttgtttcatgggcctacatgtcatatactcattttctagctaaacattgccacacttgtggccaacaaattgttggccacactttgtttgccatgccacatctatggcaaattgagttatggcaatgttaggcaacaaccaaacagaccctacatctactaccaggtgtagtaggattgaatctaatccattagatcgaatcaaatggacgtctcacattcattttgaggtactttaaaaaaatcctaaattaaaattctaaaccacatatatatcacaattggactgaaagaaatatgatcaaattaaaatcctaaaagatatatcacaactggacggaaggaaatataatcacagaaataacaacatgaacctacaaataactttgtcccaaactataattcaaatttgttaataatttttaatacaatagtttttaatggatcaaatagtgctaaaattaataatgtaaatggaaaaacaacttagaggagttaggcagggtgatcctctttctcctcttttgtttgcccttggtgctgatcttctgcaatctgtaattaacaaagcacatcaaaggggggtgttgtctttgccaatcctggtcagtaacgatgataactttcatgtgatacaatatgctgatgatacctttttttttttaagcttcctccactcagttatttgctttaaaggctctgttgaactcctttgctgtctcttctggcctaagagtgaattttgcaaagtcctgtatgatccctctgaatatctctgaagaaaaatcacagctgttggctgctacttttggctgttccattggatcattgcctttcacatatgtaggtctgccactgggaaaaaaacgatcgagaatggttgatttctctccttcaacagacagaattgaaagaaggttaacagccactcactttggtaaaggtgtgtagaccaaaagacaagggggggggattgggtgtcattgatctcagagtacaaaacaaggctcttctccctaagcatctacataagttttacaacaagttggacatcccttgggtcaattttgcttggtcttcttactactctctggaggcccctcaagttgccagaagccatggctctttctggtgaaaagatgtttttcaatatgatgtcctcttcaggggtattgcaaagcccatgcaacggacgagcacttcttttagtagctaaaaaaaataaaaacatttacatcgttcgtcttttcaattccacactcacctctacctcagtgatatttcctcaaagcaccgcttggcctttgtttgtcccctctcgcgtgagtgcaaaggcatttcaccttttcgagagaacgggcagggagctcctgcaatttcactatagaagaagagagttaatccagtttataaggaaaaccggacccaaaaaccttacaacaatatgttaatttatggaaaccaatgaaaaccccggcattgataaactaaacctaagaatagcagtccaacaagggaaaaactcctaaaacgaagcctccaagaaagatacgccgacaaaacggcgacatcgcccgatccaaacaaatctaaggttttcacccttgatgtggagttgaatgagggatccaatagcaaagtcttcaagaaggtaaacggtgcccgagggtgtcgcccttgctagcattgacaagccgaggaaggctttcacctcgaagtccccttcaaccatagtgtcctcaacggaacccaccaaatgccacgtgtacaccgaaggtacctgcacaattcacaccacctgcacaacgaccaaaacaggcgccgttgacgacctgctctaccacctagccagatcggcagagcttcactgagccgcggagccagaccgtcgatgccaccgaatggccacataggtcgctgaagctccaccaagcgacctcgtcgttgccactgccactgggggtccggccttgcccgactccaactgggatgtgccagatctggctgtccccctcgctgccatcaccaccaccgacaatgtggccgcgactggggatctggcctctcgtgctggagagacgctcagatcccattggagtggttccagatctggacctagggtagctaggtccgatcatccccctcgctgccttcaccgccgctgctagctagtactcaatttttagaaatttgttgtaatataaatgaaaattaaaaacaagtacacatgttataggttttatgtcatttagaagtagatattttttatttcctttcaatggcaaaaacttcatatagtttagtgacataattatataattatgtgactagattctttgcagatttttgttgctcacatgtagtcaaaaattcataaatatttcgtttactatagggatgcacgaaaagttcatttatttactcttttttggaaaatatttagatggattataaatttacatcatatttcaatagtatttacatagcaagttacagtggtattatactataattgcaagtgtaattatatgtatatataaatgtaaatattcaatactaatccccaatttgcacaattctcataggaactgggtaataatgtatgtatatgaaatcttatctggtacggtcgttattttcctctttgctgattctgtagctgattttgatcctttcgatattgggagcgtatcctatacacacaggccctcgcgtgtacacaccgtgtacaccaactaaaatttatcacaaaaagttctagaaatattcatacatatactttcaatagtattacatctgcttgcaaaatcgcatcttcaaattcattctacatagagagtaaaaaaagataaaattctgacaaaattacaatattaaaactgtcagattttttgtttttttcttacagctaaaatataataaatttgaggttaagattttaaccctaggtataatactattgaaagtacatatatgaatttttctagattttttggtgacatttgttagttagtgtgtacgtatgtacacttgagagcttgtgtgcatgggatatgttactttcgatattttcgaggctttttgcactttactgatttcagaagatcctgcatttgtataaaaagatatatatatattagaaatacacacatgatgacatagtgcttgcaaatttatgtaaattatatatgtgagcacttacataacaatcgaaccatatttacacgctatttacatcaccaatatactaaactaacatatgtaatttcaattatattgcagtgtagcttttagttattatccatccaatgtgataacattgaaccattttgaagtgaatatattgtactgatgcagctaatttgagcttttggatcatgtagagagaagtaagctaatttgagtacctgtttttttttatagatgtccccaggtaatttccattatcaactatactgcagattttgatcacagtttgtgattatgagatgtataaacttcaaatttcatcagaccaaagaggttgagatgttgtacaaatcaagattcagaggttagaggaattgcacctttcaaattcatctgatttatgcattcttctgtaagatttccttttgatttgtggggttgatttaattctgtatctttgatttgatctatagcgtatcacctgagttcttctccctcaatttctctctacttctccatgggttttgttcaggttgttgagttctggatctgggaagaatatcacgtgtgtgctgttgcttcaggctgtgagcttttttaactctcaagttggcgttgtgcttgctttaagatttgtgctttttggtatctgcacatccaatatttgggttttttttttaaggaataagttcatccgaggtcccttgactttacaccgaatccgattttcgtccttgaaccccaaaaccagatacaatacgtccctaaactgtcaaaaccggtacaaattaggtccctcagcgttttggaaggtggttttggctgacgtggcgcttacgtggttggtttgactagatcttcgtcccacgtggcattgatgtggcgcttacgtggcaattctatcccgaaaaaataataaaaaccatgggcccacatattagttaaaaaatataattttaaaaaggtggggcccacatgggccccatatgtcagcctcactcccttctctccttccatctccttctcggggagcggacgggcaggtggggggcggagcgcacgggcggctccttcgacggcgtggccgctgcgtcacgggcgactgcgccagcgtgctgtcctgctccgtctccggcgagccgccacgctgcccgagtacacggctacacgctcggctcctgacccggcgccggcgacgacttcctcgacctgtcgcttgtcgacgggttaacgtgccggtaagcttccagacgaccaacggcggcggcgccaggtgcagcaaggggcgcgggccgagctgcgccgtggacatcatggcgaggtacgtgcctccccgagctccgtgtcccaggcggctgcgccagtgcgtgcggcaagttcggcgcggcgacacctactgctaccggggccagtttgaggcttcgagcacgtctgccctgttggcgttgacagacacggtagctagctggatgaacaaaagaagacttgctacatgcacaaaactaactaaccggtagacttgctccactagctcatgcaggacatgcaagtactagcatagcacaaagccatagctaactactagctgatttggcgatccttgcaagccactaacatgaacatatcacatttggtagcaccagcatgcaaccaggtctaacacatgatgtgatccaaaaactaaacaagtacttaaggatcctatgcaacaagattagtgctaacatgcccgccgacgagctactccatgttcttaaggggctatgccccgacgcctacagctacgccaaggacgaccagaccagcaccttcacctgccccgccggcaccaaccaccgcgtggacttctgcccgccgacgagcggcgtgacggctggcgacgacgacggtgtgcgtggccaccgcctcccgcagctgagctgccggatttgtgcagccgcggcggtggtcctcctcccgccgcaggccacggcctcccgcggctgagctgccagatttgtgttccgtgtgcatccgcggcgatggtcatggtcctcctcccgccgccagccacggcctcccgccgtgagctgccgaattttcgtggcttcggcgtcggtcttcctcccacctcggccacggtgaagaccggtattgagctgccggattgtgcagccgcagcaacagtcctcctcccgccgccgttcacggcctcaagaggagcatcctggtggaggtgtatgccgcggcgcacgccgagctgccgccgccggagctcggacagcccgcctcgctcgcctgctccgccgtccacccgcccgtccgctcccgggaaggagagagagaggggagagggaagagggaagaagagaggagtgagagggtaggagtgaggctgacatgtggggctcacgtgggccccgtcatttttaaattattttttcatgaaccagacgtgtaggcccacagtttttattattttttcgaggtagaattgccacgtaagcgccacatcaatgccacatggaatgaagacttagtcaagccagccacgtaagcgccacgtcagccaaaaccacctaccaaaccgccgagggacctcgtttgtactggttttgatagtttagggactggttatatctggttttagggttcaaggacgaaatccgaattcggtgtaaagttaagggatctcagatgaacttattccttttttatatctttattgcaatagctgggcctttcaattcgtcatattgttgattgggttttcgaatgggcttagtaaataatttgggcttttgcgttttagtgcattaatttgggttggaaaaagtatactttgactccctcaactatcacccgagtatgattcatgtcctccaaccacaaaactgggtatatcgactcctccaactaccaaaaccggtgcaaacaatgcccctaggtggttttggaggtggttttggatgacgacctacgtggcgcccttgatggagtcgttgtcctacgtggcgcttacattgcattagaataaaacaaaaaataaaaagaaatatgtgggacctatatatcattcacacaaataaagtattgtgggacccacatgtcatcctccctctccttcccttcttcctcctccctccctctctctcccttatctctcttctcctccggcctttcccttcttcgctggccgcgagctgctactctggctcctcctgccgcgctcggtggatggcgtccttttcaactacgtcgaccaccgtcgcccgcacctcttctctcacccccaccccgcctcttcgccatcagtgccggcgtcgtgcggcggcggcacggtcgacggcgacctcacctccgtgtcggccggtgaccgggcgtggtggaccgtcgttgaccaccacgacgaccttgtcctctacgacgtctactggggtagccgcctcttcgtctgcaacccagcaacgcggcggtgggcaatgctgccgccgccgtggccagaaccggagcacgagcccagcgcgtacgccgccgcacaccgacgatggccgcgaagaagggaaaggccgggggagagggagagataagggagagagagaaagaggaggaggaagaagggaaggatagggaggatgacatgtgggtcccacaatactttatttgtgtgaatgatatgcacgtttcacatacttctatttactgcattttttattcacatcccacgtaagcgccatgtaggataaaaaattggtctagatggttaggtaggcgccgcgtcatccaaaaccacccaggggcattgtttgcaccggttttaatagttaaggagtcgatatatccggttttatagttggatgacatgaatcatactcggactcggacgatagttgagtgagtcaaagtatactttttccatttgggtttgccgatttatgggcatgtttccattattttgggcctgtttgttttatttaggac

SEQ ID NO: 27955 - DNA, 7717 bp, Oryza sativa
aaaaaatctgttaaatgatgtgtaggcagtactgtaatttaatggcaagagatgatagaggcaaaatagacttgttccttggtacgggtgaaaacgggacgggtatttctcgcccgcttgcccaaccgtattaatctaggataaattcgggtacctattttatgccggatatgatatcgggttcagtagggtggtatccgacggatatggagtacctgttaaattgtgcgggtattaccgataaactacccgtatattatccggactgctaccaccaccactccaccaggccaacaacccaacaacccaaaaggcccaccaaacactaaccctagccacttaggctgggtttggaatcagccgttcccaacttacacagtgcgcatgaaaaatagagcagtctattagtgcgcgattaattaagtattagtttttttttcttcaaaaatgaatcaatatgatttttttaagcaactttcgtatagaaacttttaaaaacacacatcgtttagcagtttaaaaagcgtgcacgtagaatacgatggagaggggataggaaccccgtaattttgacaaattgacccttctataaaacttattttcaaaataagccatgtcaaaaactaattttaaaactaggccgtgacctcagcgccaaccccgatggcgctgaactaaaacgttcgcagcgccagcattgttggcactaaggtcatatctgacatggaacatattagccataattgaggttcagcgccaaataagttggcgctgacctcttagaacgtttaaaagtagtgtggacaataactaacacaagtttcattcaatttaaatgtttttatcgttccttggtaagaactgagaacctaaatcatacaacataaaattcaaaattcaaaattataataattgaactaagtattttattgagattaacattttaattaatgttttcaaatttgtttattccagattgaacataaaataaataatccccataaaaagtaaaataaaaataaatctacaaacaaaatatgtgattgtttggaaaaaaaaatcaatagaacaagaatcatgcaacataaaattgaaaatacaaaattataataattgagctaagtattttgttgagattaacattttaattaatgttttcaaatttgtttattccagattgaacataaaataaataatccccttaaaaagtaacataaaaagaaatctacaaacaaaatatgtgattgtttggaaaaataaatcaaagggggataagtaagaaagaacctgaaaaggggcttccccagttcgaactggcaacctgagagcaggtgcagaacagcagaagggctgacaactgagctagcttctgcattatgtgtggtgtttgtatctcatgaagataaagattaagtgtttcacgcaaaacgaggtggtaataatatgtgattaattaagttttaattattataaacttaaaaaatggactaatctggtattttagaacaacttttatatacaaagtttttttttacgaaacgcatcgtttagcagtttgaaaagcgtaccacgataatataaaattttatcctccactagtagaagaaacgaacagcggcagcacacatatgcttttaaaccacacaaatatcagcgccaacacacatagcgctgagctcctcttttgtcgctaatccgtgccacgttggacgtaatattagcgccagccgctaattagggtggcgatgggacgtattatgtcagcgccattagggttgacgctgaggtcatggcctagttttaaaattagtttttgacacggtttattttgaaaataagttttatagaagggtccatttgtcaaaattacggtagtaaccttggtttcaaacacagcctaaattatgtcaggcagccaggcaggagccacacgcacttatgtcaccgagggagccacacgcacgtacgtcaccaggagagagtcgtgggacgatattcacacgtatcagggacgtacaatacgtatcggacaagtatcggtaattcttttatttgcttgaaaaccgagaaaatgtcggatacgtacggtatatgtacgtatctgtatccgtcgacgtatcggggattcggggtaacgtagctcgccagcgcccaacaccgccatcgtatgttgcgttgccgcggcgctggctgctagtggctacgctgccgtgtgcccgcgtccgccagccaccgtgtcgtacgtcgccgcgtgggactttgatactaatgtagtagtaccgttacttacggagttattgatacatgacatatatttgtccatatttgttgtattagaatatatcatatttaattatagatttgtttttttatggggtatatggtatatatatatatatatatatatatatatatatatatatatatatatatatatatatatatatataattgttgctttgatttgatatccgaataaatattcgcaaccaatagtatttgtgtccatcttggtaagtattcattctgtatttatcccccgatattatccgggcctatattctatccgataatatccgtctccgacccaattcaaattataaaatatgggttagatatgggttctttaaatcaaactattaccgggtgttgatttctgaaggggggaaaataatctctctatttattgtttgcgtgacttgtttagtgtgtgttctggattccagataaggttttaaaaagttattattaactaatactcaagaggttcagtttgccatgtagtttccattaaatctgaatgcatcaatgcatcaatcaatgtaaggccaagcatttatgtaaaatgtgttgttagttgtagctaaaacaatatcaagatatactgaattatgtttacagtagactgttaacatcaggggcaaagctaggatatgatatgacattggggggtgggggagaagggaatggggggagctgcaagaacaaatggccaaagtccatatataataatcacagcttctacattggttgggctaggattttcaattgcaacagaaaagtcctaggaacaactagcttatagaatcaatcaatcgtcttcctcttcatcttggctgaagttatgatgggaaatcccaaaattcagaactcacaaactgactgatgtctacatgactacattgtctatgtgtctaaatcagggactagtgaatactggacttgtaaaagaaaggagaacaattgttattttgttgtgttgggggagaaaaggagaatgaactcacctctggactacggctcgcagcgtgctggactgtgcttgacggcgagatgcaccgcacgcgattgctgtcgctgatgaagggtgaagtcgcggagaagctcgctgccgtctgctgacaccgcatgctgcgtttttgggtcgccgatggctgctgctctcgctactgtgcgtgaacttgcgaagctgaagcgatgggcactcgataaaaaaggcagacagtttttactaatgggcttaccagcgagggagaatttggttttttttttttttgagggggggggggcgcaaatctggtagggaggtgttggcactggttaacatcctctttatagggcctgttcagccagcaccaacagttacgtgcacgcacaaggaagtgcagcagctgcagtcctggctgccgaacagagccatagatctctcatagagcatctgagttcacctcaaatatatactccctccgtttcatataataagaatttatagtattgcctacatttatatagttgttaatgaatctagacacatgtgcatctatatgaatgtgtgtgggcaatgctagaagttcttacattgtgagacggaggaagtagtcagctagatgtttcttgctttgttcagtatttgatattgtggaatcgtcgctggtccatggaatgtatatcaagtttgctgatttataacttatatgcaagagttccttagcagtatattctatgcttcctacagaatgaatctgggcagatttttttatgatgtgctttactcactaagtcaacattgtgactataactcaacatgttctagttcaatagaaaaggttatatagaattagaggttatggatcgattatcatattgtatcctaaaaactgtagaatatgtgtatcttttttgtctttcagcaatttactttcttcatgcaggtgttgccggcttgccgtatgacaagctaatttggaacgactccggtggcataaattacaggcccagtcttctcacgggaccatctgagcaaaaaaaggcaacttactggagtattatatttttagaaggtcatttgaattgtatgacacgttcttaaggaaataggatggatctgtggatatccaacctgccctatagtcaattgcctgaattacctgagctatcagagctaagcattacaggctattgttataccattctattgctagtcgaagtaaaatagaaacagacaaatgctaaacaactggagtacttccagggttgtctttcagcggaaaaaaaaatctgatgagatgtcaacataaaatgtgactgcagtgtatcgagtagtacatacgactgtgtaatgctcaacagcaacgaacacaaagtatcacaaagtatcactaatcacgggacagacgcctcgtcacggacggggggagactgtctcgtgggtgtccgtccagctcggggggtcgcggaactgggtgctgaagctgggctctgagctcagtcgcttcggcatccactctgtcatacgaagcaaggtgggagaggactgtactgactatagaacggattgtctcccgattgggagactcggcctgtgccctggcacattcctcgactccccgaagaccttgaagcagctcctgaatcagttctttttccttcagtaaagacgagtaaaggctttgaagcttcttgttggtgggggacaggtcagcgtcagcttcggcgggaacaccagcagcagcacgagccggggcctcagcgccgccatcgttcagagcggcacgccgcgcgttcctctcacgcctgatgcgacgacggcctggctgcgcacacatcaaacataccaacaattaatttgctaggcatgttaatttgctaagaattaaacgcaattcagtcattcagtgtactcgaacctctcggccgacagcgccgccacctatagctggtgggcgtggggcatctgctgcgcccgccacggcagcgtcttgatcaccaccgcctcctctagctggtgggcgtggggcatgtgctgcggccgccacggcctcgccctcatcgccaccgtggaagaacagctaaaacattgcaaacactcgtgtcaaaatgaagaaacctcaaaataaaattacacttaagctcgctggagctaacctggcggcggatgagagtgagacggtgtctaagatgtacgggcaacatggagagctggtgctctccgcgctgcccggctcccaggtcgatctcgtcgccgcgcatgtaactatgtaagcgagactagctcctgggaggtcatctcccaacacgcgccgcgagctccctgaaccatcccggcgcggccgcccagtcaacccacacgtctcccccaccgttgaggagagcctcgccgacgccgtgcacgacgtcgccggcaatgtagacaaactgatgcagcgtccgcccgtcgtggacaaagggcatccagaaacgtacgtcgaggtttgcgtttgcggttgtgagcaccggaacccaaacctcacggtgacggtccgcgcggggagggcgtcgtccgcctctcgcctggagctccaggtcgacgccgacgccgcgcgctcctgtcccgacgaacggaacagagtcctgatcgctcgccgaaggagggccacagcgctcgctccctcgagccgcgccatggcctccatcgttcggcgtgcccccgtctctcgcctggagccccaggtcgacgccgacgccgcgcgctcctcccccgacgaacagaggagagtcccatccccatctcccgcacccgcgcccaggggacgccgcgtggtcggcgaagcggctggcctggcctgcgacgcgcggcgaactggaattggcgtccccgccgcagcgcccgcgcccgcgagacgcggcgtgatcggcggagctggggctcgcttggccgcggccgcggtggtggtgctgttgcgtcgaaacattgccaccgcgacgcacgtcacgcacagcgtggtcggcgtggcctccgccgtgccgagatgaagcggaagtagcgtccccgctgcggcgcccgcggccgcgagacgcagcgtgatcggcggagttcgggcccgcttggccgcggccgcggaggtggtgccgcggcgaagcaggaccaccgtgccctccgccgcgatgccctcgcccgtggcccgcggcgattgcgatcggaccctcctggccgcgcccaccgcggccgtgtcctccagccggaggagcgtggcgggggaggcgcgcgtgtgcctcgggagctccccgagtctggcgatggccgccgcgccgctccctcatctttccttggtggggaaggcgaggcgcgcgcaacgtcggcggcggcgagggatggggatacgggcgcagtggcgggtggtggaggcgacggggaagaggtggggaatggagggggattcgaggggttggcggtggcggaggcggagttgatggttataaagccgtggggaggaggaggcgacgcgaagacgaaaggttctagaagcttagctcatcggcgagagacgcgaagaccatcttgttgcgcacgatttgcgaaggaaacagcggcgaggtgggcccgcgcgcgctcggcacagcagccgttgtccgttgcctcgcggagagcggagagaggagaggggagagagagatggaggggagttggggagagagaggaggaagaggagggggtgataatgacacgtgggacccctccatttttaaattaattttttgatctaactaacatatggcctcacaatttttattattttttaattaaaataccacgtaaacgtcacgtcactgtcaaattagccacgtaggcgtcacgtcagtgaaaaccgccgtctaaaccgccatgaaacttatattgcaatggttttgacagttgagggatccgttgtatctggttttccggttgaagaacgttaattagattcattggcaagtcaagggacctcagatgaacttattccattcgtgcaactatgtagtccgtttcctatttcgatcagtgggtttccttttgcgctttgggcttttcagttgggtttacatctgggcttctgtgggacccaattttttataaaattctttttttgaatttttgtggacccactggcactgtttgattttttgaaatccgcgctatcttttgttgcccagagagagagatctttctctcgttctcgtcgtctcaggcaacacggcgacgatttcgctcggcgatgcgaatgcggctgtttcttctagcacgagattctacaactccggcaatgactgctgtgacgcagcgctctgctcagctgcatcagaacttgacgcggtggcaaattttctggtaagtactttcctctttcttcatcctcttcattctatttcgacgatgcggacatgacgaggttgcttgcgatgtagttcgttgactcattcc

SEQ ID NO: 27956 - DNA, 15506 bp, Oryza sativa
aactttgtttatttcttaataattattatttgtgctctgaaaattccactaaaatttatttacgcattttaggcttttaggaaatatacaaaaatcctccaagccttatttgacttttaactttgcacattttaattgttggaggctttcacatggattttacttattctatgcataattttgaggatgtattttagagtcgttttgggacgcgacatgcaactaataatcaggctgagtatgaagcagttctcaagggtttataattgctaagggaggttgaagccgatgctgttgaaattatgggagattctttgttggtgatcagtcaattggcaggggaatatgaatgcaaaaatgatgtgttgatggtctacaacgagaagtgccgggaattgatggatggatttcggttggtgactcggttggtgactctaaagcatgtgtcccgggagctaatgacttggctcaaggggcatccggatataagccgatggtaaaagatattgaggttgaagttgccacagtagcagccgatgattggaggtatgatgtgtatcaatatttgcaaaatccatcacaatcggcttctcggaaattgcgctataaggctttgaagtacaccttgttggatgacgagctatattatcgaacgattgatggggtgttgcttaaatgtttgagtgccgataaggctaaagttgtgatgggagaggtgcatgaaggtatatgtggtactcatcaatcgtcacataagatgaagtggttgcttcggcgtgcagggtatttttggccgacaatattagaggattgcttccgatattacaagggatgtcaagattgtcagaagtttggagcaattcaaagagcaccagcgttggctctgaatcctatcatcaagccgtggccattcagaggatggggtatggatatgatcggtcagattaatcctccttcaagtaaggggcatagatttatattggtcgcgaccgattatttcaccaagtgggtagaagctattcctttgaaaaaggttgatttaggggatgctatacaatttgtcaaggaacatatcatctaccgatttggtatcccttggaccataacaacagatcaaggttcaatctttgtgtccgatgaatttgttcagtttgccaatggtatgggtatcaagttgttgaattcttctccatattacgcacaagctaatgggcaagccgaggcatctaataagagtttgatcaaattaattaagagaaaaagttctgattatcctcggcaatggcatacaagattagctaaagcattatggtcttatcggatggcttgccatggatcgattcaacttcctccttataagcttgtttatggacatgaggcagttttaccatgggagattaaaatcgactcaagaaggataagcttacaagatgagttgacagccgatgaatattataatctcatggccgatgaaacggaagacctagttcagtctaattgagagcccttgtgaaagttactaaggataaggaatgagttactcgtcattataacaaaaaagtggtacataagtccttttcagaaggagaattagtttggaaattgattctaccgattggaacacgtgataataaattcggcaagtggtcaccgaattggaaggaccgtttcaaatccataaagttgtatccaaaggagattatatgttacaaggacttgatggtgaagtttatggatgagcgcttaatggcaagtacttggtggtgaagtttatggacaagtgcttaatggattaattcatgatcggctgaggtttgccaatacatgcaaagccaatgtggttaacatcgcctttagatggccgatatatgttatatcgccctcagttgtttttaattatcataatcggttgtgttctgccgatgtatgatggttcataattgacatatcacccttagttcaaattataattttatcaatgtcttcaacattgcaaaattaggggggcagagatatagaaaacatggatttcaaaagcgaaatttaaaggcaggagattaacatggaattcattacagcccaaaagtttgcatgtttaaagttaattttacaagatatagctcatccagatatatttctttggatggctgatattgccctttgtctaatttgatccacttcatctatcatcttggcgtcggccgcatcagtgccagggatcggcttcagagattttgtcaacttagttaggtgtttgatagaagccttcaacttggacttttgatcttcaatggcttttggcaaatcggcaagctttgcttgttcgagagcaagttgtgcattgcattgctctagttcagccaggagctctatcatccgattgtttagctgatcaatgtttgtttgggttgcacttggactggcttccaattcatccagtttagctgtttcctcattgatagaagctctgtttgcttggatggttgcagttgcttcaagatctcttctttcatgtcgatcggcaattctattctaggctttttgaagcttaagccgatgttgctcaaggtatgctgctagagtaatggcttcgactagctcatctggaattttgtcatctatttcatggagcctatctctaatagggaccacctgcgattattccaggcggtctatttatgtggtccgcctatgaagctccatcttcgcaggcgcccattttttgccacctgcaaaattcattcacggcaacaccatttaccgcctataaaaatctggccgactatatagtcttcttcctccccgagctcctgttcatactcgatgattttctctctcttaaaggcaccaaaatataggggggaggttttgaacttcaaatcttcgagggatttttctactgtagttagatctatgcctttgcactctatatacataattttttttgtaatttaaacccccatttgactatggatctacgtatgcaaaatagtgaggggaaaagctagctcccatgattgttttttttttaatttgctttgatatgtgtgctagatttatgtgtgtttcttgatgctatggggttctctcatcttctagtgattttataatgtaatataatggactaaattatatactttgctcttatgtatttgcctagatctagataggagagagaaaacttcatgacatgaagaaaccaattattatgtttaatttcgtacattatgattttgttggatttatgtgtaatctttgatgtcatgtggtcgtcccatcctctagttggttaaatataatatgttaacttcaaaatgttacatttgatttcattatagttatattttgtagaaataagactagtatgttctcgaaaatttataggttccaattcgttgtttacaaatatatttgtaaaaaaaatttattaatataaattttgcagagatatggaaaggctcgaatggatgtatcattggccgatgtttttatcgctatatatggaacaagtgtctaaatttattgatattgccaaggagcacgctaaggagggtgttgacggtcgttatcgatcagttttgaccgtcaatattaccaaaataggagagaactagtgatgctagcaatgcatatgtttgctagaataataatattccactagtattaggtatactaacctttttgtagagaataacactaaagtggaggagaattgacatcaacatagacgataaatcaatcggacgatgtcgagaaccagacttatgtatgaatgggccaagaactcagaattgacacgatgaattgggccaaaattcacaagtctacaaagtgaagcaatagaggaggtcgccagccgaagatgggctggtttgggccagcccatggttcagccgaaccagggggttcggccgaaccccatctctaccgttgaggccagggtttggcatggatgtccaagattgcatcccaatgacggttggagggtactttggacaattccccttccaaaaccgtcataaccacctctatataaaggcttcactctcttcacttcaacacacacctcaagcaatatctaaactaccagatactactctaatatcatcgtcatgacgtagagtaattgcataagcaaacactatacccgcaccaaagcatctcccagataatctagccgtatattcagtataacaagaacataatgtaaagtaggtactcatatattcggagagtatttcaataccataaatgtatatagaagagtattctaataaaagtacaaatcttacaaaagagaagagataagctactagagccatacccgaactcttccgaaggcttcgaactttccatttttagctttaagtaatcgatgctgcgggaagtcgtcatatagaagaagaagaagaagaaggagaagaagaagaagaagtggtagcaccatctccggccatccctgtaagtttcaatcttcatcttctcaaatcatatcggctatcacatgactctaactgcccatattattttcagactttagccgatatgtttatggatgaagaagaagagaccacgagcacagctttggcacctttagccgatgatgtaaaagcaatcttgctagatatttcaaattggctagaaggttccttcactggtggagaaaccatctttcgtcggtcggccgaattccacaatagtcccggttgcaataaaaaccggggctaaaccctttttaaccgggactaaaaatcatctttagtcccggttcaaatgctgtcagggcctgtcaggcccccccgggatctttagtcccggttggtaacaccaaccaggactaaagatcgtaattttagtcccggttggtgttatgaaccgggactaaagatcccggggatctttatccccggttggtaacaccaaccgggactaaagtcccacccctatatatatgtcttcttcctcctccagctgcccgagcaagcttcaaaatttcttcaaaaaagaggggaggtcatgccaaaatttctagtgaatttattttggtgattatatacaaatcggaggtgcctaaaaggttagcaacttcatcctccaatgttttttttgtcatattacatttggtgctatgttttgcacacttttttgtctccaaaatttagttgtaagttgatgagagaaaaaatttgtatggggaagaaagaatatatagaaatttagtttatttgctaaagaaggttttataaaatagttgagaaggaaaatatagtgaaagttaatcttaaataatagaaaacaaactaaaatgaaaattaaaagaagtaaaacacattaatattagtttaaaactttagaaatagtaaataagaattatttggtgtaatattttataatttttgtatgaataatgatatgtcattattgtatgactgttgaaagagtttgtaattattttataattattgtatgactatcattattgtaagaataattatttgtgtatgattttttttatgtcatgtagatggattggtaatggttgtacgctgaccggcggtccaaagagtttattgacggcgtgcattattttttgagagtggccaaagctaacaggcataagggttttatttgttgtccatgcaataagtgtaagaatcagaaggagtattctgcatccaggactatttatttccacttgtttgagtcggggttcatgccaagctataattgttggacatcccacggagagcaaggtgttgaaatggaggaagatgaagtggaagagaacaatattccggactttgctcagtacgttggatttgaaggaaatcaaatgggcgaggaggaaagggatgctgatggtaacgacgctgcggatgatcttggtcatatgttgcaggacgccaaggaggactgcgaaagataaagggggcccataaattggacaagatgttagaggagcacagaatgtcgttgtacccaggttgcgagcaggggcacaaaaagttggataccactctggagttcttgcaatggaaggcaaaaaatggtgttagtgacaagacatttggcgatttattgaaactcgtcaaaaacattcttccggagggaaacaaattgcccgagacaacgtacgaggctaagaagatagtctgctctctaggactggaagttcagaatattcacgcatgtccgaatgattgtatcctatatcacggtgaggagtacgagaacctagaagcatgccctgtttgcaaagcactacgatacaagattagacgagacgatccagcagaagttgatgggcagctaacaaagaagagaattcctgctaaggtgatgtggtatttccctataataccacggctaaggcgtttgttcaggaacaaggggaatgctagaatgatgagatggcacgctgaagagcgtcaacaggacgggatgctgagacaccccgccgatggctcgcagtggcggaacatcgatagagaatttaaagactttggaaaggacgcacgaaacatacggtttggtttgagtacggatgtgtcgcgaccgagaaaaataccttttcccgaacgctagtgtattaatccccgtcccaggaaaagccggggtacaccaaacaaacatgatacaaaaggcacatctttattatatcgataatatatacattattacaaaggcgcttcaggcctgataaacaaaaataaacagcagcggaaaagcgggcctacggctccatcttcacaggcgctcaactggggtataagccaggactccacctaagacatcttctccgaagcttctcttactgaaggggggaaaagattgagcaagaatgagtacaaccacagtactcagtaagccacaccggcagatgcatgattaatgcaagggggtacaaggggtaataatataggggttaagttttgcagaaaacagcatttaaaagtcacttagttgcccaaagccattttataaagacgatcctagagttacacagtattattaatcaaggccgtgaaccctcacgaacctgccttaacccaaggcctacgatgattcagaccgaactagcaacccgacccttggtcccagctcgtcccaagccaacccaggccaaccattccacattttagttgttaagcaaattttaagaattaaaacactaacttgggtacattgctcggcttgcccataaccgagggcgcgactattcgaatagattatactctgatcagaggtgtacatctttacccacaagacacatcttcctcacgtgtaaccacgtgccacataccaccacggtatacggacggaagacgtgacatagttcccaacccatcctagccataaacaagagtaccgacccaaccccacctacggccggaacccccgggacaggtaggcaggactgagcccccagcagcaggacaccggccctgtgccatgacatctcgactaccgggccgcagctcgtgtagccttcatttgtcctagagatgtccatcgacccccgacttcgtccatgtcacgcccggaatttctatccaaaattccaaacgcttacatgtgtgttaaaccctcgtccaggaatcaaccgaggcacacaataacaaattgataatagagtacaaataaataactatttaatattcgcaaataataaattattagagaggtagatagttcctctcaaagaataacattctacgcagcggaaatataaaactataacaaactacggaacagctatggcgactccactccacaggcatcttaaccagaacaagctcaatccttcagatcatcaccttcgctgaaatactcctcttctgatgattgaatattgcaagaatgagcatatgacatactcaacaagccacacagcaaatatgcatgtgcacaggataacaaaggatggcataatagggtttcatttgcaaaaacagcatttagcaaacatttgagaatttaataaaacagttaagtaataaacaatattaatccaacgctatacaacataccctgttgaacaggcccaaccattctgaacaaccatcccggctacacagttctatctccaaaccaggaatataccattccaaaccaggagctaatcaaattattaccaattaaagcatcattcactatggtgagaagggtgagactaatcacgaaaaacattgctcaactcacccataaccgcgggtacggctattcgaatagattaaactctgatcagaggtgtaccactgtacccacaagacacaaccccacatcatgtcaccatgtgcctcaataccaccacggtacctcggaaaggagttgtgacaataccccttgcacaacataatccattacagcgcacctttcctggatcataatcacccccttataaacaaggcatggaatccccagcgacccccgtggacttctcgccacttcaaagtctggcgtactataatgaatcatgctatacaaaagataaagccgttgcccacgctggcttgtggttggcatgataaatgtttcacaacagtagctcgcgaaccggtccttaattatcatgagcacagccatcaaaaccatatgctcacaacccaccttagccaggttttaattatcaatcaattaattaacatcacacgattaaccatcgtgagctaccattgaatataaccatcattattaataatataatatattataatctatatttaacccctttagttagctaatgtttctaagcatggctaagcaaacatatatatagcatttagctgaaccaatccaatatataaggttcatgctaatcaaattataacccataggaaaataagatcatcttcggccaataattaattaggaaaggttcaccacccgatgacattcgaaaacaatgcatagttgaaataaaataatagctttaaatgggttcaacatgctcaaagggttgtttgggatctgtgtgacttgccttgggcttccgcaaacgcttcggaaccttcctcaacggaaacactctcctccggaacgtcggaaactaaagcaattaaacaaaaatcaacaaaacagtacaaaaacaagcttaaacagtacatgtggatatttttaacatgtagatcctgattttagaaaaatttagcaacttgaaccacctgaaacggatctacggttatttagttatgattttccgaagatttaatctattagaaaatcgggaaaaagaaaaaccgatgatgtcatgatgacgtcatcaaaggtggccggctcggattggcgacctcgccggagctagggtggtcggccgggattttggagaacacctacgcgtagaggacgacgagacgaacccaacggtactcaccaaagcgtccaacgacgagggacggcggccgacgacgagcttgtgcggcggcggcggttcggtcgacggcggcgacgggtctccggcgaccggcgacagcggggagagggcggccgaggttcctcacctccgtgcgcacctaacggcggcgaggggaagcggcggcgacggcggaatcgacggcgcggcgcggctgggcgtcggccggcgacggcggcggcttgctcggcgtggcggcggcgctacggagcacgagagaactcgggagatggggcaaacgaaagaggaggactagggggtcctatttatagccttggattgaagagatcggactcctcccgcaagaaatcgattcgggaaaaatctaaactcggttttggagataaactcgaaaacaaattcgattcggataaaatacccaatgatttgctccgattcttgaggtgaaagatagaggaggatgtggggataaaaacccctcaaacaatcggaagaaaaagggccggattgggtgctgattcggagcgggagacggcgtggcgcggccggcttgggctcggcttgcagccggcctgaggttagggaagggtccgacatgtgggccccacatgtcggtgacccgaggaggaggggcgggcggcgtcggctgggccggcttgggccggttcggccgcgcgggaaggaaaaggatgttgggccggattcggcccaacggcttagggaggggtttttggaactttttaattaaaataatttgtgaaatgttgtttcatttattaaaaatacttcccttgctcaaataattcccagaaaattctagaaaatagaggaacaagcaaagtatttaataaaattttatctagctcatttttatgttgaaaattttcctagataattagggtttagcttgtaggcttttaattttaatttctaaaaaaatgatttaaacaatgtatttttacattagacgatttttagggcgtgacagtccatctccatccgtgtacttttgtttataaccagactgagccacaaactaagccttacccactagacatgtggaagtacggtagtgctttacatcagaggcctgagcttaatccttatagtacccgaggtacgactaaccaaacccaaccacgcacctcgagcccagcctaaaaccatttttgggggttttgaatagagggggaggtgtgtgtccaattccaacaaaagccatccattccatagcatccaagtgatatgaaaattcccaaagtctaagttataaaaaccacctaatgttgtcctattaatcagcgaagcatctacctaaattcatactagtggaaccatgaatagagtacccactagttggggttttgtttatcctagggtgaacaaggtaataataacaatagcaataataataaggtcataacaaaggtaaataggcatggctaaataaaacagtgataacgcgggaatttaaataaagcgataatgcattaatttaaatcaaaataattttataaactgggattcaatatgctcaaggatgatgtgacttgccttgctcagagagaacggccttccgaaccttcggcgacggccgcgaaccacgcttcgggaacctccggaacgacagaagctacgcgaagcacacaagcaaagctacaagcctaaaaagaagcaataacaatacataaaaagaaagcacagggttctttaggttataacaaacattaggagacttgaacgggtcgattcagagttcgtatgaccaagatatgatcatccgaagtttaatgctgttatatggagatttgcggattattataattaagctttgcaactataaaacatgtgtaagcgctagcctggaaaagacaggaaggctgcgccgttgacatgcgcactccacatgtcaacctaagggaccaccgtagaccgagtacacagagacggtccacgggtcgacagaagtggaccccgtctgtcaaccgaggcgagtggccgacaaacgaactccactagacaccacgcgagctgcacacgtggaaaccacgcggctaccgagcgggcacactaacacggtcaccacacgcacaagcgaacgactaccgacaccggtacacgggtaccggggtcgacaaccgcacaacgggtacggggcgacaccgaaagaacgaggacggggcagcgagaggagagatccttaccaccacgcgacgaggcgtgggaacgacaacgacgaacgggcgcggcggagacagatgggcacaacggagacgaacggcgaggggacggcttcggcggcgatccttggacgaaggcgagacgcggccggcacgaggcttgacgacgcggagctgaggacgaagacgacgacggggctgcagcggcacacttgacgaacgcggacgacggacgagaacggctcgacggagggacgaacgccacgacgatgaggacgacggacgacgacgacgacgcccggggccggcgaggagacgacgagggcagccggcggcagctgcacggagacggggacgacgtggaacgcgccgctgcaaatccgatgacggaggcggcaccgcgagacgacgagccggcgaggatgaacgggacggccgaagggacgtcggcgacgatgaggatggaggccggcacgggcgacggcgttccggcgaaacagaggagcagctggaggtgaggacaacgctgcgacgtcgacggaggagatggcgacgtcgatcggcgcaccggcgacgtacaggagccgaccggagaccgggaggtactggacgccgacgaggaggccactccggcgagcttcgggcgaggaggaggtgacgccggggaaggagacgatgccgcggtgtcgaaggaggagacggcggcgtcgatcggcgcaccggcgacgaacagcagccggctggagggagtacagtggcaccaatgccactggttgccggcgggggcaccgttccggcgagtttccggcgaggagacggtgaggccggtgaaggggacggtgttgcagagccgagggaggcgacggcacagccggacggcgcacgggcgaggcgggaaaggcggctggaggcggccagcgcgggggaaagagaagggcgacggcgggaacgagcctccggcggtcaccgcgcgaaacggagggcaggccgtgggagaggaggcggctgcgaggccgagagaggtggtggcgcggccagccgacgcacaggcaaggagacagaggcggctggagacggccggcggcacgggagagaggggacgacggcggggaggtggctagggaccacgggagatcgcgggagggggctaaaacgatataacggagcgaggggattccgttttataggatgggggagggagccgggcatgggagtgggcggaacggcgacgggaaacacggccggcggccatggaaggtggccggagaagacgcggccgttccgggcgttagagggcacgaatcaagggggaaaatgggggaaatcaaagaggatggaaaggggattaaaagcccccacttaatttggaaataagggaattgatttgcgcggatttgagggaggaagaaactagggttcacgggagagagagagaagctgggcgggaggaggacgacgaccgggcggtgggacccacgcgcggcgcgcggtcagcgcgcggcaacggcgcgcacgcgcgcgcacttgcgcggcacgggcgggagggcgccgctcgggttgggcccggaggcggcccaggtgggagggggcggggaggcttgggccgagaggcggcccaggaggagaggagggcgaggaggcccgggagagagaggggaggggagggagctgggccgggagggggagggaaggcccaagagaaggagggagagaaggagagggagagaaagagagggaggaagagaggactttggccgcgggccgggagagagagagggaggactttgggccaaatttggcccaaaagaaaaggaggattatttttaggtttttctttttaataaactttgataattgtttttgttgcttaataattgtttccggtgctctgaaaattcaagtaaaatttgagggctccttttagaccaaggagaatttaacaaaaattctccgggccatattcaaatttttcttctacgtattttagtgtttgccaatttcttttcgaattttaattaattctattattccttttagcgaatgatttttaatttcgggatgaatttatcaggacgtgacaaatccacccccctttacaagaatctcgtccccgagattcgaggaggctagcatgaagataggttgggcggtcttctcttcttgtctgacttcttccgtcgcttcttctataacgaacttgcctagcaaaacttctccactctggactgcttgtctcgatctcctgttgcagatggaatcttctcttcacccgacttgtccctggttgcacctttaactgactcagactaggctgcggtagttgaggatggggtttcagttccagaacttcttatccttggtgtcaatcctcatacaagttacccacttcacgtcatgcgtcgacaccagcttgtcattactaggataccatgcttgtcatcatgagattaccatgcttgtcatttacttctaacttgccaccaactgcctcatatgagctttcctgctctccgggtgctagctacttctgctattcgatgcaagggtcgataactttgcctttgaattatgtttcttaacagaaccaacttatcccccttgacatgctttgacgtcttcccaaatggctttactgctggacttcttattgtctgatcgtgatcctgccaaatctgaagcttcgttgttagatgtgcttttaatctaacatctgtagattatctttgaacatatcacttggttcataactgggaatagctctcacgaacaagcaactcggattcactttctttacatttggttcacttcccactattctcttcatgttgtcctcagttagcattcaacgtattcctttacacctttgaccttgatgtgttctttcccgatttctcttatcaatcacctttcgacctacttctttgcctggtaataaacatctttttcgatatcttctatcaatcatcttttgacctttgtcaactaagtactcttcactccgagagttgtggatgcttctggtgacgatgtggtacttgagcctgctgcctttcagagcaaccttcaagtggttcgtcaaaagctagactggcggttgttgcctttgatccaaagaggacacatctgaaactctcagtccaaacaaaagtctctttggctttttaatccaacacagtttaattggtttttttttccatcaacaaggttggttattaactcgagattagaacatagttcctctggaatgagaccctaggtctcctttgacagtaaacaattatacgcatgatcccatatcagcatcttccaaaataatcctcatagaacttgtttttatcacacatgtctcccttattacatgaatacaaggccctaccttaaacaaaaagggaaggtgcttagcatcggtacattgtatcctcgacatgattcatccataaacataacaaactcattgtttataatcatgaatatatttatttattacatgactgctgaaactcccggttacagtgataagtagcgaactgaaaatcacaaacatggctactcattctagttctggagagatatagctggcattgttctagtgactgcatcatccttgattggttctgtgatgatgtgataggactgcatattgctatcattcacaggagaagcttccttctgattgctggttgaagcgaataacggtcttctgcttggtatcgccctcctgaggttgatttcccttcgctcggcctggagtaggtcggggagagaaacaacttcttccatcgacgacaataaaaataaaatatgagtaatattaatctagggtgaattcattagttgagataatacacatattgagtaaacttcatttatgcaagatttagaaactatagaatcaaattcatatagcaaataatctaaaatcgggagaattagaagaatacactattcattag

SEQ ID NO: 27957 - DNA, 3582 bp, Oryza sativa
gggccaaatttggcccaaaagaaaaggaggattatttttaggtttttctttttaataaactttgataattgtttttgttgcttaataattgtttccggtgctctgaaaattcaagtaaaatttgagggctccttttagaccaaggagaatttaacaaaaattctccgggccacattcgaatttttcttgtacgtattttagtgtttgccattttctttttgaattttaattaattctattattccttttagcgaatgatttttaatttcgggatgaatttatcaggacgtgacaggatggcatgaatccttttggagagatgagcagcggccatagcacttggcccgttacgatgtgtatccacaacctcccctctggctatgcatgaagaggaagtacataatgatgccgattattattcaaggccccaagcaacctggtaacgacagcgatgtgtacctaagaccactggtcgaagatcttaaactgttgtggaagaaggaaggtgtccccgtgtgggacgaggataaacaggaggagtttaacctacgagcgctgctgttcgtaaccatcaacgattggcctgcacttagcaatctatccggatagtccaacaaggggtacaaggcttgcactcactgtatggatgaaacagaaagtacgtatcttaagcactataggaaggttgtgtacatgggtcatcgtcgattccttgcagcaaaccacccgatacggaagaaaggcaagcactttgaacataaggtggaccaccgtatgaaacctaaatatcgcagcgggaaaacagtgtttgctatagttaaaaatcttaaagtagtgttcggaaaggggactagaaactagcctatagagagcgaagatggttacgcggcgatgtggaaaaagaactctatattttgggagttaccctattgggaattcttggacgtccgccacgcaatcgacgtgatgcacctcactaagaacctttgcgtaaaccttcttggcttcctaggtgtatatggaaagtcaaaagatacactggaagcacgtaatcatctgaagcatatggaacaacgcggcgaccttcacccggaaccaaaggagaaaggaagccattacttgagtccagccagctacactcttagtaaggcagagaaggaaagtatgtttgaatgcttggagagcataaaggtaccgtctggatactccatgaatatcaagcgaataataagcacgtaggagaagaagttcaaaaacctaaagtctcatgactgtcacgtgttcatgacacaactggtaccagttgtaataaggggtatccttccagacaatgtccgggcaacaataacaaagctatgtgcattcatgaacgcaattttgcagaaggtcatcgatccggatagattagaagcccttcagaatgatgtggtgcagtgtcttgtcagttttgagttgatatttccaccttcatttttcaatataatgacgcatctgctttgtcaacttgtcaaagagatcagtattctcgggcctgtgtacctccacaacatgtttcctttcgagagatacatgggcgttctgaagaagtatgttcgtaaccatgctcgtccagaggcaagcatcgccaaggggtatggaatagaggaggtcattgaattttgcgtagaatttattgaagaccttcgcccaatcggggtacctgaatcacgccatgaagggagactacggggaaagggaactctcggaaggaaagcaataatgacggtagacaacaatttattccgtaaagcccatttcacggttctgcaacaatcttcattggtagctccttacatcgaggagcacttggctctacttcgcaccagaaacatcggtaagtccgatgcatggattacacagcatcacattgatactttccccgtgtggctacgacaacatctcatgggtaacgagacgatcaacaaacaactggccttcctggtgaggggaccatctgggtcgatcgcgacattccagggatatgagatcaatgggtacacattctacatgagagcccaagacatgaacagcacgaaccaaaacagcgctgttcatatcgatgccatgggacgcgatggaacaactggcacgtattatggtgccatcgaggacatataggaacttgactatggtcctctcaaggttgactggtcgaggcgtaatgattgatgacagtgggatgacaacggttgaccttaacaaggttggatactcggacgaacattttgtccttgccaatgatgtaacgcaagtcttttacgtgaaggacatgtctagcaaaggaaagaagggcagagggcctaacgagtcgaagcgtcacgtggttctcccatgcaaaagaaaaatcatcggagtttaggacaagactgacgaggattacgatcagtttgatgggcaaccccctttcatggtgacgattgaccctagcatcctcctatcaaatgaagataccccttactcacgtagctatctcaaggagggaacaatagtgaggagaaagtacgtgcggtcaaccgtcaccgccgatgtattgccgtaattattgtgtatacgatgtaaactattttagatgtattgattatccatataaatcaatttttgtatggcatatgttaattacttatgattattagaggttttaacaattttaaatcatgtaattgctagttacatgcgataattagaatttttaaaagttttaagtcatgcatgtggcatttacatatgttacttagagtttttaacaattttaaatcatgtatatgctagttatgtgcgataattagaatttttaaaagttttaagtcatgcatgtggcatttacatatgttactcagagtttttaacaaattttaaatcatgcatatgctagttatatgcgataattaggatttttaaaagttttaaatcatgcttgtggcatttacatatgttaattagagtttttaacaattaatttaatatcattcatatgctaattatatatgattatttgaatttttattaattttaaatcatgcatgtcgtatgtatatacatatgttaattagagtttttaacaattaatttaatatcattcatatgctaagtatatatgattattagaatttttattaattttaaatcatatatttgcttattacgttttatccacttaatttactacaaacaacaataatttttcgaagtaattgtcattaatttttcgactttaaataattttaatgcattattttctattttagaaacacatatgtaatggatattaatattcagtgagcttatcagtagtcccggttcttaaccctaaccgggtttaaaaagaatttggaaataacgggaaaatatctttagtcccggttgatgagaacaaccgggagtaaagatatctttactaccgggactaaaaatctaggggtatatatattcccgatgcgcgccctcgtcttctccaccaacacttagaagttttttccccgatcgatctctctcggcttctccttcgccaccactgcctagggcatccccgcaccgatgctgccg

SEQ ID NO: 27958 - DNA, 899 bp, Oryza sativa
gcgcgtatgatgactctctgcaagtacctcatcaggttgggaagatattgaaattctaagattattgaatttttggcctaaaggaaaaggatttaattaaaccctttttggaaaagaaaaagaaaaggaaggagggaggaaatttagactttcctcgggcggctagggtgcggcccaagggatttggggcggctcggccgagcttaatgggccggccggcccaaaaggcggcccagagcgcgcgcgggaggggaggagagaggggaccggtggaccgggctcaccgcgcgcggtcccgggtgggacccgcttgtcagcggctcggctcaccgcgcggagggagcacgcggtgcacgcgcgcgggcggggaagggacgcggtgcatgcgcgcggtccgcggtggacgcaggtgcggcgggcccacgcgcagcctcacggctcgcggtggatcgcgcgcacgcggagggaccgaccggggtcggcccgacccggtctggctgagctggcaccgacgtggcgcctacgtggctgccacgtgggctggcgggaggtagacgacgatccgtccgcgaaaggacggcgggcggcggcggcggcgagcggcggagcgaaccacggtgatacgggcaaagcgagcacaccgggcggttgttcgtgacgaggggagacgaaccaacggctcggattcgccggaggttgctcgacggcggcggcaaccggcggcgggagaaggggaaaacggcgacgaagctacgaggggtcgattcccgcggtgagagcatctacgcggcgtcgggaactcgacgctagcgtcggattggacggaactatgccgagcgaggccggcgacaagcgggtgctacggagcttgggcggggaccggggcgaacacacggcgg

SEQ ID NO: 27959 - DNA, 32558 bp, Oryza sativa
  unsure (1)..(32558): unsure at all n locations
cctttaggatgagatctcttaactccttcttggccggtacacagatgcgtggaccgcaccaaactgtgccttggttgtctatggagaaattggtgtctttcttctcctgtattccttttattaattcttttatcccttcgtcgtctttctgagcctcccggatttgcgactctagggtaggctatactgtcaagctggcagggacacctgactgtaccacggtcagccttaacttctccaattctctgcacaggtgatcttggtcaggccgtatttgagctacattgtgataggccttgcgacttagcgcatcagcgaccacgttggctttaccagggtgatagtggattccaagatcgtaatccttgattagttccaaccatcttctctgtctcatatttaactcggtctgtgtgaagatatacttaagacttttgtgatcggtgtatacttcacatctgttcccgattaaatagtgcctccagatcttaagagcatgaaccacggctgccaactcgagatcatgggtgggataattgacttcatgaggcctgagctgcctggaggcataggccacaacctttcgttcttgcattaggacacatcctaagccttgtcttgatgcatcacagaagatctcgaaatcttttcggatatctggcaaggtgagaactggggcagtggtcaaccttttcttcatttcttggaagctgtcttcacaggctgcagaccattgaaatttcttttccttctttaacagctcggtcataggtctggctagcttagagaatcctttaatgaatcttcgataatatccagctaagccgaggaggctgcgaatctctaacacattcttgggcgggttccaagcaagtacagcttcaaccttgctgggatctacttcgacaccattggaggaaatcacgtgtccaagaaatgctactcggtctaaccagaattcgcatttcgagaattttgcgaatagttgacgatccctgagcttttccattatcaacctcaggtgttcagcatgttcttcctcgttcttggagtatatcaggatgtcatcgatgaataccacaacaaactggtccaggtattccatgaagattttgttcattaagttcatgaagaatgctggagcattggtgagtctgaaggacattactgtgaactcatatagaccataacgcgttgagaaagcggtctttgggatatcttcagatctgattttcagttggtggtaacctgacctcaagtcaatttttgagaaaactcttgctcctttaagttgatcgaataaatcgtcgatccgtggcaacgggtacttgttctttatagttacttcattcagggctctatagtcgattaccattctctcagagccatcctttttcttaaccagaagcactggggctccccaaggggatgagctaggtcgcacaaaacctttactttccagctcttcgatttgtcttttaacttctgctaactcattagctgccattcggtagggtctttttgcaattggtgcggtgcctggtgccagttctatggcgaactcaatctctcggtctggtggcattcttgttaattcttccggaaatacgtcgggatattcacaaactatgggcaccgactccaatgaggtgacttgtaaacaggttaagatagaccgacttgcggtaggagtgttaggggtaaagcggacttgctttcctccaggtccttgcaaggtgatggacttttcggcacaatctatctgtcctttgtacttagccaaccaatccatccctaggatgatgtccaagctttgcgagtctaggactatcggtttggctaggaagtcaacttcctcaattctaaggttaacttccgggcatatttgagttgcccttatattccttccaggggaatgtactatcattggtacacgcaaattttgggttttccaaccatttcttttcacaaaagcttgtgatatgaaagaatgggaagctcccgaatcaaccagaactattgcgggtatggagttgacagagaacatacccatcacaatgtctgaagcatcctgagcggtttcagcttgaatgtgattcacacggcctcgaccaaagtggttggaagcacgtgaaccttgtccacttgcctgagagctaggacgagactgagctgccgctgggtaggagttctggcagtgctgccattcgcatgccctgagctggtgttggtagggttctgagggcactgtctagcatagtgacccatctggttgcaccggaaacactgaactactgtcggtccctgtggtgacttgaacgaggtaacactgtttggcgcagtattgccactaggggcacgctgctgtggctgaggtgccggacggttcatctgaggacgaggggcgtaacctggctggcggttagcctgagtgaccgactggtggtattgcatgggttgtccgtagcgagggcgaggtgcgcctcgggaagaatttccctgatggttagacttgcgtttcttgtattcttcggtagcctcttttctagcatcctcgagtagaagtgccttgttgatcatatgttgaaaagtggggaaatcatgagcaatcaactggagtctcattccaactgcgattcctttcaagaatttcctgatcttcttctcgtcggtgtccacttcctcaggggcgtaccgagccaacttgttgaacatacttaggtactcattgacactgctgttgccttgcttaagtctgttgaattcttctttcttcatatcaatagcgctttcaggcacatgagctgtacggaaagccatagcaaactcatcccaagcaatgttagtgggttcagggtgtgcattgcagtaattctcccaccaatctgcagcaggtcctcttagctggtgagaggcgtagagcgtcttctcaaccggagtacactgcactaagttgagttttctatcaacatcttttagccaatcgtcagcctcgacgggctcgacggtatgagagaactctggcggacgagacctcagaaagtctgtcagcttggatctattgttgcccacgtgagggtggccatttccatgcgcattatgctgaaaactggctatggctgtggttaatccctgcaagatttgtgtctgaactgccattaagtgctgcatgttgttttccacatgaggtggggaaggaaggcgttcttctccagaattgtgactggcagtgcggtgagagcggtgagattgttccatctctgcattacggaaaactgtgcgatgcgagcggttgctgcggcggggttgctcaacctctgcgttgcgggaaacagtatggtgtgaacggttgctgtggtgagactgctcattagctgattcatgatttgcttctgcttcaactctaccatcttcaaaaccaaagcgggctggtgcacgagctgcacggcgggggcggctagccatctaaactcccagaaaagggcggggtaagagtcagataagcacttaggagggcaaggagcaatagcaactcagatagcacacactaggcataaactggatttttcaaatcataaaaacacctgatacaacgggtgtggacaagtcacagagctacaccgagcttgactgtgcgcacaccacctaggagaaccagactaccaaacaacacccacaacaaacacacgcacgcactacctcgccacgactccaaaagagttggcggcggaacaaaagggcctatcacacggacggctgctgaagactgcctcctctactcctcgtcggcctggctgcctcctgtagtcggctcctcagtcgaagaaacgtcgatcggctggcgcgaagggaccggcagaacctgtcgagggccggcagcagcacgggccgctggcggtgggggagctgggtggcggaaacggaacacggtggaagaaccaacaacacgcttccgcgcggtgcggataaagcgtgggccacggcgggaggaagcaactggggtgtgtccgggggtgtaggaagggctaactgggtgtgggtagggggagtacactggtgagtacggcgcacgcgagctgggggagcgcgggccgctgggggtgcgggcagagccgcgggagctgtgggaggacaggtggctggcgtggcagaggcgtcctgagtcccaagagatagtgtcaactgaggtgacaccctcctcggccagacgggcctccaaggcggcgtagcggcgggcaagggagcggtaagcctcaaggagtaggtcgtgctgagtggcctgagcctccgaaagctcaaccatgcgagtcagcactggctgagactcgctgtacggacaagggtacctggcgtcttagtggccagagggaaggcgtggaagctgccggaaggcggagcctccgagacggtggctgtagtcgtgggacaggcgacgaagcgccgtccaggagaggtcctggtacgcgatctggagagtgggcctggccacggtgaagtggtgtgggcgaaggccagctccgtgtatacctccacgggggtaatggtacacagagagctcacagtgagggggaacacggtccacggagtaccccgtgtactcgggacacgagaagccaaggaaacgggagaggtcacgccccgaactagtcccgaccggaactagcccgtgacactccaaattaacctgttaatcgataccagtcccaggaaacagtactggtatcacagggagacagaatatcacagcaacagaggtctctttattatagagtagttgtacagtcatgttgggctgcggacagatcccgagctcacaactgcattacaaaaggaaagcggaagccaggacttggaccaatcaacacaggcgcgacttgggaactaggccgaaaccctaaaacacatcgtagccggcttgctcctagaagaactcctcatcagcaggatccgcttcatcttcttcagcaactaggggggggggattatttatatagagcaagggtgagtacgggagtactcagcaagccaggggaaataagtgtttaatgcaggcttcaaggaaaggctgttgttttcgtaaatgattttatttgaactttttttctaaaaacatctaggtgagtgcttctcaaacgacatggttgagacagtgcgtcccgtccggtcggagtatgtgcaatgtatcagtctttagaatttaaacaaggttggcacccggccaacagctttttcaacggccacccgggccaacaactcttcaaacggccacccgggccaacaacttttcaaacggccacccgggcctagctgatcccatcagctgcagatttttcaaataccgaaccccttttcacacagcaatttcacaagcagtagtcaaaccaaactacgctaggaatcacctcacatccgcccatgaccgtgggcacggctgttcgaacagtttgttaatctctgcagagggggtacactttacccacacgacattactaacccggatcacccagcccgtggggatcagccacgtcgggagacctccaagctttcatgacaaggcatttccaaagctgacacaggcttaccatatgccgacgagaggggttctagaccaacaacaggttaggtcccagaccatactgtgccaggaagcccaggggggtcctctccgacaccaccccggcgaatccacatgtctctcggcatcatggctcccctgataagctagttactcagccaggggtgtcccattccacccatgtggtcgtacttgtcttatgttcggatgaaattccaaggaatcggtccttaagtgcgggagcgggaaaaccgtacacccggtacgttccccggtccgcggttttagaaatttatttagttcgcaagcaccgacccaggtgtcgggttttccaaatcttttgtaaaacccaagttttacccaagttgtttttcagattttaagtttgaaggcgaccgtcgatactcgcacagagtgcacgaatatcgaggcgcaactgggtggttacaaggggacatggtataacaattaacaatggaaggatcaaatgcaacaagttaggtaggtccgccaatctgccctgcaggcgggacaaacagattaagtgtgatcctatcaatgcataatatttttcaaacaacataattaaatttcaaatataggctcaagatgttcaaaggtggcttgccttgctcgagatctggagcttgatcctcgaaatcctcgcactgcgggtcttcgggctccggaactacacgcgaaacgggacaactcaacaaacggcgaaaataaagccctattaatgacctctaagcgtgccattagatagatctcgagatttggggaattttggaagttgaacggagtcaacggatttacggttgggaagatattgaaattctaagattattgaatttttggcctaaaggaaaaggatttaattaaaccctttttggaaaagaaaaagaaaaggaaggagggaggaaatttagactttcctcgggcggctagggtgcggcccaagggatttggggcggctcggccgagcttaatgggccggccggcccaaaaggcggcccagagcgcgcgcgggaggggaggagagaggggaccggtggaccgggctcaccgcgcgcggtcccgggtgggacccgcttgtcagcggctcggctcaccgcgcggagggagcacgcggtgcacgcgcgcgggcggggaagggacgcggtgcatgcgcgcggttcgcggtggacgcaggtgcggcgggcccacgcgcagcctcacggctcgcggtggatcgcgcgcacgcggagggaccgaccggggtcggcccgacccggtctgggctgagctggcgccgacgtggtgcctacgtggctgccacgtgggccggcgggaggtagacgacgatccggccgcgaaaggacggcggacggcggcggcgagcggcggagcgaaccacggtgatacgggcaaaagcgagcacaccgggcggttgttcgtgacgaggggagacgaaccaacggctcggattcgccggaggttgctcgacggcggcggattgcggcggcggcaactggcggcgggagaaggggaaaacggcgacgaagctacgaggggtcgattcccggcggtgagagcatctacgcggcgtcgggaactcgacgctagcgtcggattggacggaactacgccgagcgaggctggcgacgtgcgggtgctacggggctcgagcggcgacggcggcgagcacacggcgagcgaaggcaacggccggggcggcgccggctaactacggggaggctactcaagctactaccgaaagctaggggaaggagatggagcgaggaggaagaacgaagagaggcactaccgtgcgggacagggcgctgtgacgagaggccgacggcgcgggagtaatctctccggcctcgggccggggaagaggaaggagagggcgcggccggagtcctccttcctcttccgcgtccttgctcgtgccggctcctccgacacgcgcaacgacgatcggcgacggcgaaatagagggcggcaatggcgcggaggcgaaaatgagggagtttggagggggagggcttgggcttaaatggacggcaatgtcggtttgggagaggggaaccgacattggacggttaaggcgcgagctggcgctcggcgcttgcagccaaagcggcggcaggaggatgacgccggcgaggaggaaaaggggaaaaggagggggagaaaggggcttgcccctttgccgattcgggaaaaagagggggaggggaacgggagcatcgcggcagagggaggaggggcgcggctccatcccttggcggcttgcgcgcggaggggcgggggccgggcgatgacggcgggccggtttggagcggagcggcgacactggcgacaagcgcgtgcagaggctgccggcggcggcgatcgggcggtcggccaccacggcacgcgcgcgcgggaagcaacgggcggcgtccgcgcgggcgcgcacacgctggctcgcgaggacgagcggctgcgcggctgcaggcgcggcagagcgaggggaaagggagggggcgctcggcgcggcggctcacgcgcacgcgcgcgcggcgtgcgggcgaggctgagcggggagagaggcgctcggggcggctctcgcacgcgcgagcagcgtacgggcgaggccgagcggggggggagatgggagagcgagagagagagagagagagagagagagagagagagagagagagagagcgcccggggagaggggggccgggggagagatgggccgagcggaaatcggcccatcgaacccgggggaggcaaactagacttttgcggaggaatttggtttggagggattggattcggaattgaactcgacgatagatcggggattgagatcttgagatggcacggacactagacaacaagcaaggaaacaaatttcgcaattagggtttttaagagataattttcccgctaggcgccacgacggaacgggcgctacactaagctgccatcagctttcctcttcactttgtatacccacttacaatcaatgatatttttgccttgctgaggaggtacaaggtgccatgttttgtttctcattaatgcagtatactcaacatccattgcatttctccatctttcatcagttaaagcctcatctaaagtttgaggctcacctgtagcagcaaacccagtatatttatatggaatggttccatcagtatataccttaggtttgcggattcctccttgcaaccgtgttttcggtgttgtaggttctccccctgtctcaggcatcagtatcgtctgctcgacagtactatcatcaggagtactacttgcatctgcagcaggagcactggtgtcaataattatattattcaccggtgcatgcgtcagggagggagtgccaacagcttctccctctctttctgttgatgtggacgcgcccggttggtcagtaccgacgcaagtatgcgacggtgttgcagtgccgctatcacttccatctatctgcatggagctgtcgcttccatctggctgcatggagagttgttctgcttcctgcacaccatcacttgcacccagattttctgcattttcactaggagcattagtggtattaggaaaatcaagcacaggattatctatttgttctcccccttgatcatgtgcaactagagagggtgaaagtgatgtaatttctgcacgcaaccgtgcacctgcattgggcttgaggctagaaaaaggaaacacactttcatcaaatataacatctcgggaaacatatatccttccagatgagacatcaaggcatttaaaacctttatgctgtgtgctatagccaagaaaaacacattgcttcgaacggaactgtaatttttgagaattatatgggcgcaaatgtggccaacatgcacaaccgaaagtgcgaagagaggaatattcaggactttggtgaaacaatcgatcaagaggtgtctcaaaatcaataactttgttaggaattcgattaataaggtaggaggcagctaggaatgcctcatcccagaacttgagaggcatggaagcatgggctaaaagagagagaccaacttcaatgatatgtctatgctttctttcagctgacccattctgttgatgggtatgaggacatgagacctgatgggagatcccaatttggcgaaaaaagctatttagtttttcatattctccaccccaatcggtttgcatggagataatttttcgatcaaaacgtctctcaactagagcttggaattcatggaaaattttaaaaacatcggctttgaactttaaaagataaacccatgtatacttgctataatcatccacaaaactaacataatacttctttcctccaacagaagtgggtgcaggcccctaaacatcagagaaaatgagttccaaaggaaagttagagacactattagacttatgataaggtagctgatggctcttggccatttgacaagcatcacaaaccgactctctactttccacaccttgacatggcaatttatttttgctaatgactcgagacacgataggattagcaggatgtcctagacgaccatgccaccttgcaaaagacggcaccacagcatgagcttgttttgttggtgaagtggatgacgacgaagtgggcaggggggtagaggccttggcgacatctcccctcaagcattgtggtcctcatggctcgatccttaaccaagaaatatttaccatgaatttcaacaaaggcagagttatcggaagcaagttttgatgcggaaacaagattttttgtggcttgtggaacatgtaagacatttttcagatgtaaattgcgcatgggggtagaaacaaaagattgacctatgtgcttgacttccatacctgctccattggtggtgtgcacatgatcattacccttgtatttgtcgcggatggaaagtttgtcgagctcgctggtgatgtgatctgtggcaccggagtctatataccaattggagtcagctccataggcatatgagactgctgctgctacatgacgctcttccggcacatagttctgatcgaacctgtgccagcagtcagacgcagcatgtcctcgcttgaagcacacctggcacacaggccgggtgtcattgcggccaccgccaccagtccggccgccacggttggcgccagcgctcggagctccacggccgctgccgcgatttccacagccaccgcgactggagaagccaccgcggttgcctcgccctgctgcattggcagcgatttctgctctcctcatctcgagcctgttctcaaaacttaatagttgtgcatatgcatctgacagtgtaagtggttcaaccctagcaactagagccgaaacaataggatcatattcgtcatctagaccatttagtataaaagcaatcaattcttcatcatcaggtggttttccagacgctgcaagttcatctccatatgccttcatcttaccaagatattcagagattgtggatgaccccttctttgttgtgcagagtgatagccgcacgttcatggaccttgctcgagtcttcgtagtgaacataccttgaatcgcagcccatccttcaaccgccgtctgcaccgtggctacctgagacaagacgtctcgagataacgaggagaagatgaagccgaggacctgttggtccgcagcgaaccactcgtcgtacgccgggttcgccatcctgacgatcttgtcgccggtcttcttgtcatctgatggagtcttgtcgatctccttgggaggaacttcggtcttgccggtgatgtgtccctccagtcgtgccccacgaatcgtcgtgagcacttgagctgaccacagttggtagttctgcttgttgagtttttcggagacatgagatccgaatagaggattggtttgggaggtggaagaggaagaactggccatggtggatggatagattggatctaaacttcagagctcttataccatgaaggaaatcacgagaactggagtaacgtcgcccttcacgctagggtcaacggtgcgtgtttcacttagtgcacaaatcggcacaggtaagtacatatatatgcatagacttgtgaggctcggctggggttgtttacataacaaacttgatcttgtctaactatctaaaccaccggccaagcctcatcttgtctatgtttgttacatgggatagtatctctaacactcagtgcctctcctccccatccggcgccggaaacggattccccgagccccggagatgcttccgccgccctcaatcgatccctcgttaaccgccgccgtttcccctctttgctcgccgccggtatgcgccgccgcgattcgtcgccgccggcctccctccggtgaatccgggccggtggttcgctccttattgtccctcccgtcgctccggtgacctccctctcccttgaatccccgtgtgctgccccggcgaatgtcgccgccgtccgccgtccatccggccacggcctttctccctcctcccgctcgccagcgtggccgccacctcggctttgaccgagccaagtcggtcagccgcctcctccctcccccaccctcacgcgcgcggtccacggtgcgccaaccggctgcgcgtgggcccgccgcatccctagtccatccggtgcacgcgcgtgaaccgcgctcacccgaatcctagcgccacccttacgtgcgcccatccctccatgagtcgcgtcaccgacaagcgggtcccactcgggacaacgcgatatgagcccggtccaccggctccctctctcctcccctcccgcgcgccctaatgggccgtgtctccttaggccggccggcccgttagctcggccgagccgcgcctcttctctcgggccgcgccctagccgcccgagggaagtctaaatctcctccccatttcttttcctttttaaaaagggtttaaataaatccttttccccctattccgtaaatcaattctttattccaaaaattccatgaatcattttccttggttccgcacgtcagtgactgtcaataatattcttgagaatattatttctataaattccataaaccattcctctcattctagaaattccaaataaacttccgaaatccatatcttctcaaccgctcatccgattgactccgttcaacttccagtaattccgtaaaattaagaactatctaatggcactattaattagtctaaatagggtctttcttttgatcttttgtttaggtttttgattgtttgcgtatagttgcggttgcggattttcatcaatcaaggatttctcgaagattcgtgaagcttcgtgaagaccttgagcaaggcaagtcaccctttgaccaattgctcctataatcgaaaaaatcattattattttgtttgcaacttgcattattagaatcacccgtttaacttgcttggcctcggtttgcatgccaaaccgacagacctacctagtagtcgcactaattcctgtaggctatactaccctgactccttgtagctccacctttgtggtacctcggtatccatgttctttgagcgcgtataccaaatatcctacatacaccgttgtttgtcgaaaacttgggaaatgggtttgagaagccttgaaaacccaacatgtggtgtcggtgtgtttgaaaataaaataaattgtgaaaactcacgatgtgggggttgtgcctatgtggcactgtcccgtattcgcatataaggaccgattcctgtgggaaattcatccgagcatataacaagtgcgaccacatgggtgcaatgggacgcccctggctgagtaattagctaatcgggggagccatgatgccaagagacatgttgattcaacggggtggtgtcggggagaaccctcgggcttcttggcacagtatggtctgggacctaacctggtgttggtctgggacccctcttgttggcatatggtaaacttgtgtcggctttcgaaatgccttgtcatgaaagccttagggtctcccgacgtggctgatctcacgggctgggtgatccgggttagtaatgttgtgtgggtaaagtgtaccccctctgcagaggttaactaactgttcgaacagctgtgcccatggtcatgggcggatgtgaggtgtttcctgtagcgtagatttgtttgcttgtgctttgtgaaaagttgttgtggtgtgggaatcgttaccagaatcagcctatgtggcagatggatgacctgagtggtcaagaaacgaatctgtgtgattcgggatgtctacgggcatcatagactagacttctcgagcggaagcggattgttgtgctgctgggcagctggactctgggagtccgagaacatgaataaggctctgggagccgcttaatcaagtgaaatggctctgggagccgagaagtaatgatctgacctggggggtcggtacattaccaattgagttgttgaaaaacatctcttaaagtcgaatcgagacgcaagcctcttttcggcccaaacttagaaagaagtaaaccacttagtgatttcaaaatgatttcaaaacaaaagatttgcaaaacaaccttgcctctcttccaagcttgcattaaacacctaaattcccgtgacttgctgagtacgaaagtactcacccttgctctatataaatatatatagttcctccgtcctgaagttgaagatgaagtaaagtgaagattagggtttcgtcctggttcccagccgtcgcctgtggtgttgggtattagtccgttggttccgctgctgctgctgttggtgtttcctcgtccgtatcgtcggttgtattctcgggctgtcttgagctgcaacctaagttaaggtaaataagtcctctatttattttaaggattgcaatgattcatatttgtcaccgtgggtaccaacgctatgtcctaggattggtactgagatcgcggtttcgtaggaagcggttcgcgccgtttttcctactatacactcctgtcaggtgccgttgtacggtggtgccagattggggtgtgacacaatggaatgtgaggcaagatttatgatgtcatttcatttgcccttgtatgataaacacgactgcaaaaattccttacaataattgattgcggagcaataagaaatagccttaagcttaagactagcctttactagcttataactcatccataagaaataaaaaagtgttctttctcttacttcctttcatcatgtttatgtttgtgtctgcaagctttactattctggatatcttttttctcgtgggatccaccttatggctttacgtactattttgtttttattcatagaacaccatgaccagcgtgagatctcaattaagggtcgtatgacctccatacattgaggatgcccatagacgattatgctgctaagaagcatgcgaacgaaacaaaataggagcagcagttctgatataaatgcagccgaataagcaccgaatctgacgttcctgctcagctagcaccacgaacgtgaagaagccaagccgatcgaaggatggctgccgtgtcgtgtaatcgtgttcgtgtagaaccacgtgaagaggctgcataatttaagaagctgatcctgaaaatgtttgagaaattcacgaacttcgatccctcgagtcagttatgaaatcttcagagttccggctatggatgtatggaactcatcgagtcctctcgtttggcgtttggcgtttgtatgggcctaaaactcggcctgatgatatatatgggcctaaattttagttcgactttcttagcctatgccggatctggccgggattgatgagacccatccaaacaggtaagatcgtaacagatgtggaataggtccgttttgctttccctatctttgcattgagtttaaatcgcaactctgaatcactcaataatgagtattttttataatgtaagactttctagcatgcattgtccatgaatgtgagcaatgctagaaagttttacattgtgaaacgaaggaagtagaaatcttgagcacctaacttgtaaaacgggattaaattagatcctctgaaagtatagatgattggtttccctgataaaccgaatgatcaaacaagatagaagcacatgtcattactttgccatgtctcttgtcttattgatgtcaaaggtactagacaaagacggatagacggaggcacactataccacatttacatagaagaggaactccttttctatagagcattaactatatttagtactattcaatttcataagataataattagtacatgcttttgcccactgattgatacttgagcagatataggagtggggtacatgtagtaattctatactaaacttctctagacattaattaagtataagaaacagggtttatgattctgagatggtcttccattttgggctctagcgaaatgacggttttcgcgaaatctagtggaaagccggtagattccgaacaaattttataaagcaaaatttgaatacaaattccttgactttaccagttggctttgatgaaattctgagtgaaatcatcgaaatttcaattggtaactagaaaaagaggtgaactgaaagtgcttttcttttttttaattcgttattcttttctctcttaccgtaagttttagtaaatacacgaaatatattatttttttcgaaaatttatatcccaatatgttatatgaatatcatactatatataatattttatttgatattttccttttttatcaattcaaatttgaatttggatataattcattgaaatctcagacggtatctactttcgagccttatcgaaaccttgaaattttacggaatttgaccggtttttgtcggaattgtgaaccctattagtatcgaggcctttacaattatgcttaggccccattctaaactacaattccaaattattttttcgttagcgtgtccataactgctaaatggtacatttatttttaaaaaaattatataagagtttctaagagaagaattaaacaaatttattttaaagattataataattgatactcgaacacaaccttagttgagattacagtgtagtagtcatcaatcctatacatgtgagtaaaaaaagttataacatattttatgtatgccaaactaaacaattctcaagttataaaatgtacaagtgtacaaacacagctaattcgataggtaaattaaaacacaaacatgacttggatcataggcaaacagcagctcactacaaccaaaagacacatttacagttaatcatcactgtttatttctgcaatcctccacccatgaaattaaacacactacacctcttagcttccaggcgtaaacttcatgcagatcggtggcttaatcttagcgagagcaaggatagaagaagggaaggtccaaatgccatcgccacacatgagcccagacgcaacagcaggcaccatgaaggcagcctccttcttgttcatcttgttccaagcaaacagcaccaggctcccgacgcacatgtcgatggcgaagctcgcccctacgaggaacggcacggccatcgccgtcggcagcggcacgagcttcttgtacctcgccggcagggcgtccctcgccacgttcgtgagcacggcgaacgcgaagaacccgacggagagcgagaggcagtgcttgggcagcgccgagatgccctcgatcccgaggatcgccatgttgcggtagatcagcgcgtatggcgccttccagtagccatcggggttcccgatgtcaaacgccctgtagaacagcatgaacgtcagtggcgcgatgaagcagccaatgcctgtcccgatgagctctcccacgagcatggacctcggcgatgtcaaggtgagatgtcccgtcttgagatcgtgcatcagatcggcagagacgagcaccagctgcttcaccagggtgccaaccacaaggccggctatgacgccattgtccttgccagcccaagctgcaaagacgaagagagcgatcttgccgtagttgtaccccatgttgatgtccgtgagccctgctccgtaggaattggcgaatcctagcaccgggccgagcgcgtaggctatgatcacgtagtaccacttcacttgtcgaaacattatcggtatggtgattaccgcaatgatgcttagcaagaagtaaccactgtatgccatccaagaagggacagtacccctcttgaatacctcatcacgttgtagatcatctaatgaaaccatatcaccctcctctgatgctgcaattcatttcatttagccatcattaacagtgttatgagtatgtgaaaattaaggtgatggaagagtgtgagaggcattccatttccatgtagttgaatttgcaatggtttcattttctcacctgtgttgctaacgctttttcggttaaatctattatgtaaactcttagcagtgacaccggtaactttaacaaaatggtacaggccatcccccataatcagagcaatgcataaaaacgactgcaaaaggagcaatttacataagttatctgatggttttgtaagtagtatctgcttttacattaagcattgagaaaatatgagaccttgtaaccatacaaacttgtcatgctgctttcaggtatgtttgcagggtaccagtcccccttatgtttgctgataagtggccacattattccccatgaaatgaccgcaccaaggagggtagagaggttcacaaggtgtgagcaaatcatccccgcaccaacatatgtgaggctaaaatcaaagaagaatctgatatccaaacaaattcagacttagaaaatttgtcaccgcatgctacaatttatataaatctgtgatgaacaattaggaaattagcatataattcttacgattgtttccaggctttcagaccaaaagtagggaactgaacaaatccacaggcattgcctcccgtgtagaaccattggaagaagctccaaaataagctaagcccaaaatattttagaaacccatggagttgcaatctgtcatgaatgcagattgcagaattagttcatttagggtcaacgactgtctaacaagaataatgcaatgagcacaattaattgaggtgaaaacacgtatactttgcattcttatctccttgggctgtgtggaacccgttgataagaacagctgttgcagttccacttggataagttaatttgtagtctacgaccaaagcctgaaagcatttagtaccaattaatttagtaggaatagataattgagacctattttttatccttaaaaaatgttttgtgtcacatcactacttatataatgctactgtagtccatgaatgttcccatcctttgggctctgctttttttttttacattgctgccacgtaccaactgcatcttggatttgttatttccaaaggtttttttttacttgattgcattttcttactgagtttatgacagctttgtcaattgtcaaccaactggctttagaaattaggagagggtggcgcagtttgaaacagatcattattgagcggattattgctacgaataatctacttttatatgtatgtatatatatatatatatatatatatgtatgtatatatatatatgtgtgtgtgtgtgtgtgtatatatatatatatatatatatatatatatatatatatatgtgtgtgtgtgtgtgtgtgtgtgtgtgtgtgtgtgtgtgtgtgtgtgtgtgtgtgtgtgtgtgtatatatgtatgtatatatatatgtgtgtgtatatataaagaaaatattttaataaataaacttaacaaatctatactgctttaaaagattgtggtggtagtgttcagccaccaatccaccaccaacaactatcatgtaggggtccatggaaagtgagataacactttgattttttttagccacctcacacaagagagttatgataactgaatatcctttttaaggaaattttattaatctatgatatattagataatagggatgacttttctaaaggctctaaaaatatatacaatgaattattttttaaaagtgatccaaacagtacactagtagaaagttttatcagaaaacacaattttcaaacattaagtaaataatttgtttcaacaattctataaacaattaaaaagaactaaccgaagtggatcaaattaagggaagaaaggcacacctttcttaggggaatcaagctgaggttacccgcgaagctaatagccaggaggagccctaccatccagccaatcccaggctccttatagctccctggcacattgcctggtgagttcccggccagctcgtacgtcctcttgttcaggcccagcaatgtcgatccgaacccacctgcatgaaccactcacaccgatcgatcaatacagagcacagatcaacatctatgtgaggttcacattctcggtgtaaatttccaaaatttcaggttttacggtggtatcggtacaattttccaaaatttcactaagattggctctgcttaaaaaaaaattttgaaacataaggcggaatgaactttgttccacttttatatttagaagaagagaattgatacagtttataaggaaaaccggatccgaaaaccacacaattgcacggttaattataaggaaactggctgaaacccaccgctacacaactaacaacgacggtggagcccaaagcttaaaaaaaattcgcatatgtataaattagctaaaatatgtttcaaacttcaagaaagttattccaaatttttgaatttcggtccttttttttccattttgaaatataaaaccctgcttagagtcaagttattgaaattgaaaaacatttcaggagtactgatagaagcgaaattttagaaattgtgggaatctcaagatgttttggacgaaattaaatacttaaatttaaacaaaatttatttaaatttaaatgttttcttgaaaaatggccgaaagaatattctattggaggatcaaaatttcggaaattccgttccaaaaatggaaccctctgcctatatagtaataagagatcgacgcagaggctgcagcccggcgacgtaccgccgaaggctatggtgtagcaggcgacggcgcaggtctggacgacggtgttctcctgccgcgtgaagggccgcggcgagaagccgaggcgctccagcgcgcgcgtccagccgcggagcgcgaggaaggcgagcagcgcggcggagatgttgagcgtgggcaccagccccgtggtgagcgcgatcttcatcacgatgacgctgaacacgaacccgatcagcgccgccgccaccaccccgcgcgccgtcacctgctcccgccacggctgcagccgctccatctcccgcgcccgcgccgggtccgcctccgcgtcctcgtcgtgcaggctcccgatctcgggcgccacccgcgtgcggtccgcgtcggcgtgctccatggcggcggcggcggcgtcgatctcgcttagctgctcgatctgcaccacgaggacaagaaagaaacacggaattgattatctcctcttcagcgacgtcgaattccgacgagcattatttgggccaagatcgatgaacacggcaggatgcttcacctcaagttcgcactgctcgttcgatcagtgcgccaatggaacagttgctcactgctcaacgtgagctctgcagcttgcaagttcgagtgatgcaggggtgatgctaactgcgatcgatggcatgtatttatacccacgagctctggaaaaggtctacgatatacgtacaagattttttgtgtccaatttgtcacaaagaaattcccggattacttttcatgcgttggactagttttgcttcttctataaatgtttgctgcagtagagatgcacacacaaacgcattctatctgtgcttcctcccaaatcttatcgttctactatagatatcctaatcgcggttccatttgactgagcaccacttgtctaggaactttatattcttattgtgtatcactatatattacgtaatcagtggcggcacttttcttgccgtcatatcattgatgtggaattcacttcggcaatgctctactcatgattttgttgaatccgaagctgatgatatgtaccgaggaaaaatgctcactaatagtacggcaaagtcaaaaccccaatatggttagttcttgtttttcttaataagtgctctaataaggaagcggaatcattaaaccacaagtgtttcatggcagtgcaaaaaaaattaacgtggtcaacttcagtttatagtaagctcgtaaattaacctgaaagtaacttttggttgtacattaacctgctattttttaaaacttttttttaacgaattgacgatatttttttcatagcttgatttttacaaactttgaaccgggaaaaaagcatgaggaaattcagcaaaaaacattgcgatggagaatctggagacatgctagatttcgcactacaaaacttggcatgttttcctgttaagccggctctaggcctctacttatattaagtgatcaatattcatagagtaacagaatatatatactccctccgtttcaaaatatttgacaccgttgacttttagtacgtgtttgaccattcgtcttatttaaaaaaattaagaaattatttattcttttcatatcatttgattcattgttaaatatattttcatgtacacatatagttttacatatttcacaattttatttgaataagatgaacagtcaaacatgtgctaaaaaatcaacggtgtcaaatattttgaaacggagagagtaattaactatttttgtagaagactatataaaaataaccaaaaccacactgacggggttatttgatgaataaagcaagtaagcaactgcagctttcggaatgtcaaacgagagagaaaagatgcttatcacgcaacgccaaatgcactaattcaataagtccgcggagtcaaatgctatactatatgcatcatggttcatcatttcctggcataaaaaagagtagtagaacagtacgcccatttcatgccgctttgctcttagtcttagtggcctatgccccttgaaatgatgggttgaggtatcaagcaacaaatgcttttgtgctctctcttttgattttaaaccacgattcaaggatgaatgacaactaattgccctctttaagcgaacctggtttaagaacgtgtttggttttaaaactattttttgagatgaatggtacacatgtctgatgtttagaggacttgtttggctgaaaatcatacaaaattttggtagtgccggttggcaagttttagcactaccaaaaaattagtaaggtagattttaaaacccatttgaattgatgccaattagacacatgtatatgggtaatgccaaattgttttgtgaggtatcaaaaccaaacaggctagaatgtttcagtaatgccatagccttgcctgaatacttggtttcggcccaaactatgaataaagaaggaataagtttatctgaaatttgtcaacgaatctgattttcatccttcaacctgaaaaccagatacaacggatccctcgactgttaaaaccggtgcaaaataagtcccaatgcagtttgtatggcggttttagctagcgtggcgcctacgtcccaagaccgagttaaactagccacgtaggcggcacgtcagccaaatccgtcttgggacttatttcacaccggttttgacaggacccattatatctggttttcggattgaatgatgaaaatcaaattcgttggcaagttaaaaacctcagatgaacttagaccaataaagaagtgcggtgcggtgctgggctgggcggcctgcttgctgcccggcaagccacaggcccacaaacaccgaagccggcccgcctcgccgcagacgttcgcgccatcctccctcaacaaaaatggaaggcgctgcttccagctgtcctcaagccatcctccaccggctactcgacagcgcaacctagctaatcacctacacctactgcgcagcgcagctttactgcttaccatctccccttgccaattctgttttccgcttgcattgtcacgatggagaagagggaatgagggatggagggcgagagaggtcgggcgccatggacgggggcttactcaccaagggtcaaccggtcgacgtcgcgcttgacgccgcagtgggtggcgagccgaggagatctcaccgtgcatgcaatgcagcccctgtggtggctcgggaccgggaggaggggaagccccgggcgacgtgggccgaggcgctcgccagctgttcgatgcaatgcccacgcctgcctctggttcatgtgcctgtgggaggaatcgagggggtggagtagtcaagtgagatcacagacttccacagcttgtttcaggcaatgaggcaagtgttagtcatgattggcatagcttctttatctgaaagaggctatgaacttatcatggcatcttgtgactggtatgcagataacttgagagtatatgatctgaaaacttacatggcatacacctatatcataattcataacttacaagctcaaattgtcaagtgctgatctacagctagactctgaaatgctactgctcattatgtagtttcagtggcctggcttgctgaagtctgtgtacaatacactgactggtgtcagcccagagttaatttgcactatggacactcttctcctttgctggactagaactctggaagataataaccaagtcactgtgagctcatgttttgtgaacatcaagtgctatgggttgccaagattgggtcggatttcccagaaggacggaatattgattatgttgatcatttggtggccataatcgaaggtcagcagttcttctagttctattttcgtaaccaatgagttaagtcgttaagatattgatcgatactaagggcatgtttggttggttccccgtaattagccaaactttcaagccacatgttttgtatgatgcaattttggtggtggcaaaagagctcagtgccattgtggcaaagtttggctaagagatgagcctgttgtggctgtgtacatccttcgggatgtagaagtcgggttttatttaacccattatctaaaaacgagatgaacctgtggcatgtaaggattggggataggaaaaggtggcaagtattgggtgcaaccaaatgcttccaactgtacgtcaaacttgcctaaattgtgcgtgacaagtttggcaataaaccacaaacatgccctaaaattcatgtttactagctaaaaatgtttttctgccatcatgttccgttatgcactttacgatgttgcacggtggtaatttctaagtattcggtgtgctttgtgattagtgtttagtacatagtgttctcttctcaaaaaaaaaaaaggaagaagaagaagaaggaagtacgtagtgttctgtttttttccatgtgggcagagatccttttccaagccagtcaaaagaaatatatactacagcatagtaaggttgtgtttagttcacactaaaatttggaagtttggttgaaattggaactatgtgactgaaaagttgtgtgtatatgaaagatttgatgtgatggaaagttgaaagtttggaaaaaaactttggaactaaacagggcctaagcttaaaaaagagacacatgaaaattcttaatcctaactattcataattggaagcaaaattatgactcacatgttagattctcccatgagaaagggaactgttacagtcaaccaaatcacttattcatcactaataaagaaaatattaaaggggaaaaaggacaatttgttgaagaaaacacaggagatcagtttaagttttaccttacaaattacaagaaatcaagaatagagtgcaacatcatatttcatactaatggtagcaggcaacattatttcatactaactgcaagatttttagtccatgcaaatatcaaatcaatcacaatttttttcatacggaaacattttcagagtctacattcacaagttcagaactcgtaacaaaaaagagaaagcagaattacattttgtatttacaaagacaccacaaagaactcctcacagtattaactgtaagtctgatgtttgactgaacctacagaattgtgtattacaaatctacagtaagcaaaatgttggatctttttaaagtatttatagtgataaaaaagttgactaatggacctacctttacaagcacatcagaataatacagtcaagaacaccaactcttgcagaagtttatgttggagttggagcagcagctgccctcatgagcatgaatctcctcctcgcaatattgtttgcattttcacctagcgcagccaggtgaagcatccgccgccttgctgccgccacagcaacatcatctgcggttggcttcccaggaacctcatgaggtggtgagctctcccctgatgcctcgacgtcaccatccaattcgttgtgctgcatcacttgctttatgctctccaccacctctctcatagttgggcggtcttttgcatgttttgcaaggcagctgttggccaatttggcaatttctctagtgccctgcttagagtaattgtgcctgagtctgatatctataatcctgctgaacctcttagtctcaacaggatactgcctcacccattccaggagtttctgctcgttcttgggacgattcctttccattgaacggcgtccggtgaggatctcatataggacaactccaaagctccaaacatcactcttgtttgtgagatggcctgtctcaacatagtctggagctgcataaccataagtccccataacctgatagcagtaaagaaaattgttcttggtgagctatgaaatccatgttccattatctattttgataagaactggaatgtgcagaagctgcatagaggaattcctttactttgatcaatgaaaataaatcagtacttaccgctgtggacacatgagtgttatctgcagttggcccttcccttgctaatccgaagtctgaaagtttcggtctgaattcctcatcaagtagcacattggatgctttgaaatcacggtatatgacctataaaattttcaagtctgaaacaagaattttctgtgtttcctcaagcaaagtcaaaaccataattgacaggattgcatttttaaggatctcttaaaagccatttacaagctggaggtaacattcatcgttgggagaatagccactatggtccctgaagtttcgctctgagatcattttagtccctgacctttcaaattgtccaagcaagcccttaaactttatcatgtggacatatacagtccttggcccatcgaaaattgccacgtggacatgccatgtcatcttccaatgcaaatatatgatgacatacccaattttcccttacacatatcgtcatagggaaaaaagagagaaagaaaaggagaaaaataataataataaagaagtaggtgatcctgcatattaaatatccgttagagttttaacattgaaatgcaactacttacatgaaatttatttggcatgataattatatatttagtggttgtagctaatttaactttgtattagcataatccagtgaaaaaagtttgccatatatccagtcacattgaataaagtttgtaaattcttttcattattttttatggtacatggaagggtaaattggacattttaccatatattttgcatgagagcataacatggcatgctcatgtggcaatttaagtggaactaaggactatattagcccacatgacaaattataaggactcgtttggacaatataaaaggttagggaccaaattaatcatggagcaaaacttcaaggatcatgttggctattctcccttcatcgttcatggtaatcattttctttcaagtatgtcccattcaatcaatatgtcatatgactcaacggacattcaaaatacttgcaataaaaaggattgagtaatatgtccatccaagctatatgattagattcattccagatctccagtcatgaaatatatagttaactttaaaattcagaagtgttgcaaaaagatcaacataattgacttgcagacaaccattcttgcacagcatttgctaaatcacaacattaatatggtatggctcagggacaccaacaaactgtgaggcctttagcaatataactctattaaaagctgtcctatttcagactttaggggagaaaatgggtaatccgttatgattcagatgaataaaatgaatttcttgatggtgagttgccagcggtgttacctgaacttccaatccctcatggaggtacaacaacccctcagcagcacccaatgctatcttcaacctgatgtcccatgggaggacgggatatgctttattgaatagatgatcatccaaggtcttgttcgacatgaactcatataccagcaacctctgagggcctcgttcactctgagcggcacaatatccaatgagcttgacgagattcgggtgctcaacaacccctagaaattgaacttctgtcagccattgcttgtgaccctgatcagaattgggataggacagaaaaggataaggtaaaacactgaatggtttctaggctcttaaatataagcattgaaatgaacctacaattttaattacatagaaggcatgcatctatgtacaccattagaaactacagaacaaagaagtgagaagacaaaaacattgaaatgatacactaacgccatcacaaatcttattaccgtgttagcaaattccatattatctactagactatacatagttattcagaccatgctcagcttaggaagccaatatgccgcagagttgcataattcacatattagaactaccacaatagaagtcagaagtatgaatgtcaattggcaggtacttataaattgtaaagtactggctagtgatcagggattccaaaagtttgagcccaaattttttaattgaaaaacagctgcattttctttgtttaaaatttttgggtttaaacttcagtttgataatttttttctagtgattatatactagtaatatagttggattaacccggacaacaccgcccaattggacaattaaattgcagaggaaggatacctgtcggctgttgggattgagcttttttatggcgacctcggtgccaccggcgggccctccgggcagccgaacgacgcccttgtagacgctcccgaagccgccctcgccgatcttgagcaggcggctgaagtccctggtcgccgcctggagctcccggagcccgaactcctgcagggagctcgcgcccctctcctcgtacagctccgggatgctccgcgccgacgagaccgacccggacgacctgctccacccggcggcgggcctcgccgccgccgcgctcgagtcctcggtcgactggctcgtcgcgacggccgacgacgacaccgtggaggtggagtgggacgagccggcgagcgccgacggcggcggcggcggcggcgctggcccctcgtgcggcggcggcctcttcttccccttccgcttcttgatcatatccctcacgcggccgaagcagcccatctccgaggaacagtaagctggagagagggggattcgggtcagctcgtggtgctcttctccatggccttcacctcgtcagctcgaatcgtgaggagaaagggagcaacctttcggcgatagaaacggaagccttcttcttcttccttctccttgctgatcggatacaactacaagaactattttctcctggcctccacgaaacacgacaacaaacggagacgaacacgaacgaactcgcgtgagtcggtaaactgacgcagaatcgtttgacgcaagcaaggacgagggaaggatgacaccaatttgtgctgggtgaacaggaagttcgagtgtattttccttgttctttttcccctgggaggcgaagaattttgagccacgcttgctggacaagtacgggagtagtacttgaggaagcaaagaaagcagattaataaaagaggtggttgaagtacaaatctcgaatcgcgggggctcagaacaaatcgtaagaaaaccttgtagggggtcaaacgaaatgggctgaaagtgacaggagaggccgcggatgcaaaactgcaacaactactcaccccggtcgcagctcgacaggcccccacgagactcgtagggaccacctatacatttgtcgataaattttctattaaaaatttgacagatataattatagtacaatcgtagtgtaattacactgtaacttgtatgtaattacactgtaaattgcaagtaactacagtgtaacttgtatgtaagtttcatgtaattttgaatcgttagatctattacaagatttgttctggtgaggaagaaaaaaatcacagcacacacatatgtgaaaggatttgttcccacgacctctattttactgaaataatatgttaccgagagattcttgaaagttacatacaagttacattatagttacagtgtaattacatacaagttacagtataattacactacaattgtactgtaattatatctgacaaatattagggggagaaatttgatgacaaatatctagcaaaatcggactcgtttggtgtattttctattgtgcttagtctttgataaaatccaaccacgttacaaaaaattttgtaggtttaacactaattttgtttgaagtgttcaaacacgtgaacaatcaaccaccaccaaaaagattcacacatagacacgctatggttcgtccatgaaccccctttttttttggaacgataatgccgttgctaacgttttatatatagaagaagatgtctcactctaaggagaaaatgagaccaaaccttatagcgcacagttaattagaaataattggatgaaaaccacaactacaaacaactcataacaaacaaacctaaacaactaaactataagaacacgaaaactgacaaccaggcttactaagtagtgaacccctttttatgctcttgaatgcaagtttatacaagagaaaaactacaacaagatcgagaagtgtacatattgtaatcacgcacaaaatataattaaggtaagtgatatctatatggtattttgctaaaaaaggtttaacaaatcaatcaaactataaccgtcggatcgcaaaatggatggtccagattaatccttatctcctatataaagttcacttgccattcccaaaaccctagttctcttcctcccactccactggccgccttccgccgccagcatcaattgtccttctctccgctgcttgcctccctcgttcctcgtctttcatggcagcacaaccttcttcgttgcttgcttttctccttccttgactccgcagcaccactgccttctttactatctcttctatcttaccccttacttgtgagcaccgactaccaccctcgctcggcccggcgcgtcgccaccccttgccatccctcttgtccctttctactccaaccccaaatctaaacaagaaaatacataggagaggatggctcatcggacttataaacgacatcgaccgtggttagagcatggatttggacttctatcctaaggttaggatttctattgtaaaatcaaaagttatttttagttgagcacaaaagggatcagatgtaacatatgttagaagattggaatccgtttcaaaatggtgtggtatcaggtggtaccaaatctgatacctatgagtaccagatctgataccaaggtattggtacccacaggtaccagacctaatacctgtgtatcagatcttgtacctaagtattttacatgtaccagcaacaggttccatcctaatgggtcatgtgcaccattgcggagatcgggcacaaccggtgatgtgtctgtgctagtggccagaagcaggtcacaacgctagtgttcgccatggccgtctgcaccgagatcgttgttacggttgtgttgctagttgttattgttatagtgatcatgggggtcgatgttgtggaatcgtgcgggaactgtacaaaggagatcatgttgttgtcctcagcgccaccgttgcattcaatcatgaagcaaacgatggcgcagagggcccgcgagttgcttacgtaatggctatagtctgggttgagacgcgttggagagcaaggtggaggcacacagtggttgccagccagcgaccaccgcatgcgctgcatatcatcaacctgcatcacgtcgatttacagccacatcaccttattgccctggcaaacccgccccttgtcgtcattctcatggaagttgatgtcgcgtggaggactatgacggtggcacttgcagcgggaacacctagctaatactgtcgtgcgctgcgcacgtgatctcatgcactagcattttcaatattagaattcctatttccaattattttatggtcatattttgaacctatgaatccaaaacttcacgattctatcctatgctttcgtcgacatgatgatcaccctctctataatactcctggcatagtacttcctccatcatagaaaaaaggggattcctagttctccaaaacaagaagagtagtgagaagtaaatactaaaatgccactcattaataagaagatagaattggtggttggggtgaaggggtatggaaacttggaaatgatagaatttcgtgatggacccgggtagatgagaaggtataagttgatttatttttggataaagtttaaattttagaagttgttcgctctttttttttactgagggggtatgattgtgtccaatccactgaagggctctcccattttcttggcggaacagatcccctagcaagactttagcttagaaatatatttcctatccgtctagattcgtagtattagacggataggaaatatatttctaagctaaagtattgtgatgaggntgctgtaccatgagttgttctagtngcccac

SEQ ID NO: 27960 - DNA, 1413 bp, Oryza sativa
agaacgggcagtccataagctgccacaagctttcctcttcactttgtatacccacttccaaccaatgatatttttgccttgctaaggaggcacaaggtgccatgttttgtttctcattaatgcagtatactcaacatccattgcatttctccatctttcatcagttaaagcctcatctaaagtttgaggctcacctgtagcagcaaacccagtatatttatatggaatggttccatcagtatataccttaggtttgcggattcctccttgcaaccgtgttttcggtgttgtaggttctccccctgtctcaggcatcagtatcgtctgctcgacagtactatcatcaggagtactacttgcatctgcagcaggagccatcccctattagattgattctttttgggacgcagggagtaggtgggcataattaaataggcttatgtgtgattagttgggaagataaagtaggtggaaaattaaatgaggaatgttgtaattggttgataagagaaaaataggtgaagttaatatatttggcacaaaattcaactgctagaagttgttatatttttggacgaaggaagtagtacgagtgcttactggtatttagaatgattgagaaatttgatgaatatcgttaggcattcattcttttatgggcatgagccggatcgaatcctgaatgtggtggatacttgtcacgccccgagctagtcccgacttgaattagcccgtgacgctccaaattaacctgttaatcgataccagtcccaagaaacagtgctggtatcacaggaagatagaatatcacagcaacagaggtctctttattatagagtaggagtacagtcatgttgggctgcggacagatcccgagctcacaactgcattacaaaagggaaacggaagccgggacttggaccaaacaacacaggcgcgacttgggaactaggccgaaaccctaaaactcatcgtaaccggcttgctcctggaagaactcctcatcagcaggatccgcttcatcttcatcagcaactgggggggaatatttatatagagcaagggtgagtacgggagtactcagcaagccaggggaaataagtgtttaatgcaggcttcaaggaaaggctgttgttttcgtaattgattttatttgaactcttttctaaaaacatctaggtgagtgcttctcaaacgacacggttgagacagtgcgtctcgtccggtcggagtatgtgcaatgtatcaatctttagaatttaaacaagggtggcaccccggcaacagctttttcaacggccaccccggccaacaactttttaaacgggcaccccgggctagctgatccattagctgcagatttttcaaacaccggaacccttttaacacagcaatttcacagccggagtcaat

SEQ ID NO: 27961 - DNA, 967 bp, Oryza sativa
  unsure (1)..(967): unsure at all n locations
cggcgtaggatggacctatgagatggnacagnacctcatcagggcggcggagcgcgtgggggaggaggctccgcggggttctgggcggcgcgcggcgccggtggttgctacccggcggagacggagacggtcgcggtcgcggtcgcggagcccccgcgccgcccgcccgcgcgcggagtcctcgcggcggcctacggcccgccgtgcccgtgcccgtgcacgtagcccctcgctagagatcatcgacgtcgacagcgggagcgacaggggcgtggtgcgcgtcaaggaggagccgcgttccggaagcgactcggactacaatggtgcgagaggtcgtgcgcgtgcgcgggcgcgggcgccggtcgccgccaccgccgcgaagaagaagaagaggaaacgaggaaaggaagctccaagcagagcccaggagagccgggaggttgtccgcgtcaaggaggagccgaattccgacggtaatggtgcgggaggtcgtgcgcgtgcgcgctcgccggtcgccgccgccgcgaagcagaggaagcgaggaggaagagaagccccaagcagagcccaggagagccgtgtgcccgttcaaatcaaggaggagccgtattccgggagcgattccgacggcaatgtggccggtggccgtgcggtcgtgccggccgccgacgcgaagcaggggaaacggggaaagaaaaccccaagcagaggcaaagggcggcgggtggttgttcgcgagacttccacacccgctgctccgtccaatggtgctccctccgtcggcaggggaaaaggtagagggcgtgggagaggtcgccagagaagcaagggcgctgttcgtggtcgcgctactccggtgaaaagagtgagcacgggtgttggttgagaactcggtcacgcttgcagancaggggaagttttttccaaaanntnngngnggnccatgggacgtatcaccaagcgcgcg

SEQ ID NO: 27962 - DNA, 663 bp, Oryza sativa
  unsure (1)..(663): unsure at all n locations
gtggggagtgagacctaactnnnnnnnnnnnnnnnnnnnncattcgcgccgcccgttgtttcccgcgcgcgcgtgccgagtggccgaccgcccggtcgccgccgccgtcaccctctgccgcgccagcccgcgcctgtcgcccgtgtcgtcgcgccgctccaaaccgccccgccgtcatcgccgtcgtcatcgcccggcccccgccactccgcgcgctagcctccaaggggcggaggcagagagcccctctccctctgccgagtcgccccgctccctcctccttttcccgaatcggcaaaggggcgagcccctttctctccctccttttcctctttttctcccctttttcccctctcgccagcgtcacctcctgtcgccgctttggacgctagccggagcgccagctcgccggcttgaccgcccatgtcggttcccctctctcaaaccgacattgccacccttttaaacccgtcttccccctcccttcctttcctctcccattcgcctcctcaccgttgtcgccgctcccgtgctctgccttgcctccgccgtccatcgccaagcgccgggagagccggtgcgttcgtggacgcggaaagggactccgggggcgcccccttcttcctctttctcggcccgaggccggagagatcactcccgcgc

SEQ ID NO: 27963 - DNA, 10243 bp, Oryza sativa
  unsure (1)..(10243): unsure at all n locations
gttggggnattagagaccactggtagtacagcgccactttaatttgcttaacctgacctcggtgaagagccgagtgagctgctctggggataaaaaaaacatatggaaaattctactttagtctccacaattattcttttgttctttccattgtagttaatatgcgtcaaaatcataaaagggtcgcaatgtttcacccccacgttccttagttttttatctgttcctcctatgtaatctctctgtataattagtttggcatatatatcaggaagaagctgtatgcttttaccggttggaaatctaaaaggacgtcaagttagcgcttttaggatgtttcatgatcgcagcatcaatcctaactttatagtacgaaaaaaaaaaccttttaaataaatcaaaggggaaacagctcaatatctagctctatactcacccctaatttttcacatggcaaaagagctggaatgcttggaaatcttcgatctacgtcacattctattctctgcttcggtggtgatggtatcaggtatgcctctgcaagtcatctccgcttgcatctgagaatcgcctttttatttttgaaaccgatgaatcattgagggtcctctgtagtagtactgctcactaacatgtgggctggattgtgaatcatttgggtaggagaaaaaaaagttaaaaaatgtactgatgaactgaaagaaaaaacagcgtattgggttctctgcttctcccaaaaaacctaagacttgttcactttaatgttatttctaaccatatcttttttggtaaagttgccagaaaaatatatatgtttagtttgttgccaaatttgctcagtacataagaaattctgccattttgtcaatattgctatcttgctaaaattttagcattgccaaaatttgataaggtttattttgactacaatctaaacaggtccccaatgtccacttttctagacttcaggctagatgcccagcttgttgaaggcccaagcgtgcaactaggggtggcgatttcccttgtggggccggggacccacccctataggggcggtggtaggtggaaattctaacccgcgggtgcggcggggcggggccccgctcattttcaggggtgggagcggggttgaaaaattacccgctggttactcgtgggcccctaaagtacacaatgcatagaaggtggcccattaaaacaaataatctggaggtagcttagtttcggtggggaataagttcactttgactcccttaactaatggccgaatctgattcgtatctctaaaccacaataccggatatctcgacaccctcaactattaaaaccggtgcaatttgactctctcgatggttttggaggatggttttgctaacgtgacgcctatgtggcgttgttgaccgaagtatttgttctttgtagtgttgacgtggcgcttaggtggcattcaaataaaaatatatttgtgggacccattgacatgtgggcccatatgccatctctctcgtttccttcctcctctctctccctttctcttcggtcttcacgttggcccgtatgcagggagcgggcgccgaataggcggcgggggctggaggggcggcggcgtgcaggatgaggcagcgaccggcgacgactgcaggtactgcgccggcaccttgccggtgagcgtatcgtctgtacacgtcggcctcctgtgaggctgtgacagccgcttgttgtcctcctgctccggcgccatgtagcctccgaggcgggcagtggcgtgcgcgggctaaagagtgccaggtagaagctggcgacacaggcggcgccgtccttgtcgagcaggacgttggtggggcacggtgacgacggcaacggcggctacggcggcgtggcgccggtgccgccgacatcgaggcggtgggacgccgccgacccgaacacgatcctccgcgtgctctgccaccgcgacgacgaggtcgccagccagtttctgaagcgcacgttccagctcgccgagcgacgatgacgcaaaaagcttcgcgtcgtctcgtctccaagctcataatctctgaattaaaacctcataatctctctcgaacgaactgtgaacccaacacaagtatgaatatctaaaactttctggcacggatctaaaattttcaatcttgatgtcattcctatagttgcattcgaaagttttctactgaaaaagcttacgatacttttttagcaattccctataactcccgcacgctcctcatccccagtccccgccctctcgctccgcctcctctcacacgccgctgccgctccagcgcccgccgccgccgccgattcggcgcccgctccccgcatacgggccaatgtaaagaccgaagagaaggggggagagagaggaggaagaaatggagagagatgatatgtaggccccataaattttttttttgtctgaatgacaaatgggtcccgcacatatatgtttgtttgaatgacacctaagcgccacgtcagcgtcacgtggaacagataccaggtcaacaacgccacatagacgccacgtcaacaaaaccgttcttcaaaaccaccgaggaagtcaaattacagcgattttaatagttaggggtgttgagatacccagtattgtggttcagggatacgaatcagattcggccactagttaagagagtcaaagtgaacttattcctttcggtggacaccaagcccttcataaagaaggccacatctagctcagttgcagcccaattcgatggatgcgtacaacaaagaaaaccgtagatgaagtcacgagcagccagatgatttgatcgatccccaaattatctctcagcaagaggccgtgcgccgcgccgccgccaacgtcgccaccagcatgaggccgtgatccgccaaacacctttcccaggtcacgccctcgctccacaaccctttcccaggctcaacactagcagccgccgctaagccaccatgccgccctgatgcttcgtcgtttgcgccatgctgtctcgtctcctcgtcggtcctctcccaggtgtcgcccagcagtgacttgacggcagccgtcgtcgtcccatccatcgccgccgctagccagtgtcggtggcctgccttcgcctccccaagccgacaccatcctagccactgccgctcctagctggtgttgcattgtcgtcgtccatcgctagcgccggtggccagcccgccatcgtctcccctagccggcacctagctggcgtcggtggccagtcccaactccatcgtcaccgactcaccgtccacacctgtccctagcctgatgctgtgggtccccggctccccgctcacctggcgagtcccttgcagggcctagggcgggtggggttcttcacccgacaagcaatgcggggcggggggcaaatgcggggagcggggccggggccgttcttgcccaactcggtcccgtcccaccccgttgccatccctacgcacaatgcaagcagcatccgccattcaggaaccggagaaaggagaggacgaagccgcgaaactgccaaaggccgaacacctgagtgagtacgtcagtaacctgaccgtgccgcggccgcacgaacgcacgcgcgcacgcacgggaataatcaaatcatctagatttttagagtcaaacacgtacgatcaccagggcgcaaggcgcgagctcatcgctactctcaagtcttcaccgagctccaccgagcttttcttcttcttcttcttcttctgtgtgcttccagtgcatcatctctcggatgaccacgacgactgccacgcagtacgacaaggatcatcatattcagaagaagcatgccgcgccatgtgacccgaaatctgaaaatgtaagccgctctctggttgtgatgtgattgatatctatccatatccgctgttgattacactctgccatgcctatgcctatgtcctcgacacgtcggtggcacgcatggaaagaaggtaaggttgcctatggtgtttagtttacggtgaagttagaagttggttgaaaattgaaacgatatgattgaaagtttacgtgtgtatgacaggttaatgtgataggaaaaattaaaagtttgaatataaactttaaatctaaacacagcttatgtacacttgcttgcacggcgagcggccacgcctagcatttgcctcgcatcgcatgtgcatcgcgccacattcctatgcccttgatgactcagccgggagcaataatttacgccggccttgtcacggattttaggccaagaatcttttggagcacgaacccctaccgagatctaggtggtcagcatatgtgaccaaagtctctgcagattaatagtagtaatgccatgttacaactttgatgtttcatgctgtcgctgatcaagtagtaaattaaaggttttaggcgcacaatttcacatgattctccggtaaaatcggagcgttaggacttaggcgttagccattagggcagtgacaacaatcagttaaaagatcagacggtactttctttactttgttatatgaggatacacgtgcgaagtataccggaccggaggctctctgctccagagcagagggaagtgaaaggtgtagatatctgaaagaggatttgctcaattgttctagtagtacaagataatttagtgttgttatctgaaaaagatgtgttcattgttgagaatggcacaagaagtttatagatacgacttgattgattaggtgacggtgcttaattgccctgcatgttgatttgggttcgttagtgaaaagggcatcacagaaagggtaaatcaacattattagatcctacgtaggacggtaggagaccatcatatgaggattaagtaggagaactttaacaagctcgttattaatatttgacggcgccccttttgatgaacttatatcacacccacgctacctatgcatgatcattgtttaaagttctaaagtcaccattaaactatacttaaaggcaatagtcctcgcatgctcaagctacgtacttgagttattgttttcccttttggaaaagggaagtacctgagttgttgtatatcacacctaaacgatcgaaccaaaaccaaaagtccataagcgtggtgctaagctagcaatcaacaacgcacaagcaagcatcatctgttgaggtatatacgttgattgtggtccaaattatgatgagccatcatgttttccagctttctttgctaagtttacatgatcgtcatccaatgttctttttttgaacaaaaatggctgtaccagtacccaaaaaactgaattttctaattattttcaaaacccttttaatttttaatgttagataaacccttatataatttatttttaaaatttgaaccctatcatgccacaacatttttaaaattttataattttaaacccttataaaatttgttttatcccgcaacgctaattagaccggtgtggccaaataacattgtcacactagccagatcggtgaggtagtgttattttgccatgtcagcagattaattaacaatttaaaagattaaaaaaaaactagccaagttaaacaaacacggacataaacgtccatccaagcatgggccggccagcactaacacagattgacgcgaattcagcacggacactaacccttctacttatcgcgagacgcgagctacagctcttctagttatattccgttccaaaccacaaaacgctatcctgacttcctgagacgtcccagatgaccccgacaccgactacgtacgtgctacacccaccatgcaccgggccaacaacacacacatcacatccactcccgaccaccgtggcggcaggtgcagcgcacacagcgccggggtgcgcatccccccatccaaacccaatccactccactccaacaccaccacaccagcaaccggtttggtgtcccactcccacctcgcacgggacgggagagagccgcccacccgcgcgtcgccacggcgcgcacgcgacgccgcccgtccgaaccgcggaaatccatcgttttctggccgtctttttttctcctctccccgggggagaaaagacgcggccgcggaaagcggaggcaggccgagcccagcgaggcggtgtcgggccatgttttgccccacgcgcccgcccgcccgcccgccggccgcggccgatcgacccgactacccgagcgaccgccctctttttcccaccgggtcgcgcctaaccgtggactgggacgtctcaccacatcacatgccgcgacccctgttctctgagctgtaagcctgtaactgtacacttttctttctcttctctgtacccgttttttccagctttcaatcaatgcttacgataacctcgaacgctgatcatgttactgtaaccatttgtggagttggcatcgctgcaatggtaggacatgatccgttgtttacgtgcgttgtagattacagcagttcgtcacgtaccatccaaaatccaatccaccacgggggtaaagatggccacgaagcacggattcaaagcaagagaccagagtagatgagcgatgccggttgctgagaatcgatcgaggtgtttgttcggcgaccagagctgcctttccgatgaagaaaaggtggatggggttggaggacagtgggcagcgcgcgggcgcgacacagcgagcatatgattcgcgttttcgttcggtgcagatccactgaaccaaatattgaataatggaattcgaaaccaaactgtaacctcaaagctagcatgatgcaatggcgacagctgagtaagctgaagaggtacacacgtaggaaaaaaaagatctttattagcagattcagaaaatgacagctcaaatcgatcgaatggtaccgtctttttcccgccgatttaattacaaggagatccttgggtggttgaagtagacgacctatgaattggggacaatacattaataacgacacactagccatttgtatctttaatatatcaatccatgaacagggaaaaggtacaagatgcctgggtaaaccttcgactgtgctcgaatctatttgtcacattgagcttaaaaaccggttattttcaccttcaactttaaaaaccggaaaaaatagcaccctaaaccatcttacatggtagtttctgaacttgtgatgatgatagtggaactatgaacttcaatcatgtactaaatgacatctacatcatcaacaaaagcatgtataacaaaattagagtataacctagaaaaagaacaccttaatttcaaacaaaacattaaagaaaatggtgcaagatgctacctatccagttacgaagnnnnnnnnnnnnnnnnnnnnnnnngtacttcaggttggaaaatggacttcaggtaaaatttaagtgcaaaaatagacttaaactagcaataaaaatagcccatgttgagaaaacttgtacttgccctttccaagatgcagtcgacaatatattagtagtacttgtattgtctatgcacagcctccacacctaacagctcaaaagtacccgcccttaatctgccacatcaggacgaaatcatgcagatctgcatctctgtacagaaattccatcctctcaattaaaacgcatatgccccaaatcgaacaaaagaaaaaaaaaaaaagaaaagaagaggggagaggagagggagcggcgaatcgaagcgaagcaagcagcagcagcagcaactcgcgctgttcatttattcgcaccaaaccgaaaggcgagacgaggcgaggcgaggcgcggtggcagaggcagccaaaccaactgacggacgcgagcgaagcgaagaagttcttgaagttgaagcagccgcctcgctcgcctcgcggccctcgcttgcctaatcaggaggggggctatctctttctctctcttttttcctttcctttcctgcgtccttgggatccgcccgtgcgatctcgccgtgggtggagcgccgccgtccatccgtccccatggatccccgcagtcgcgcggatcgcggcgagtagggagggaggaggggaggggagggggaagcggtttccgggaggagaggcgtcctgctcgagcaaggagcttgtggggggaggtagatggacgcgaacgcgggctcattcgtcgccgtccgccggctcgccggctccgagcgcgccgcgggagcggccgccttccaccactcgtcttcgggtactctactactactactacctcccttctccgatttggctgtctccatgcccgaattgtggctcgtggtagcgcggaagctcaccatggttttgtgctgctgctgctgctgttgctgcttcgcgcgcgctcgtcggtgcagcgaagttcgtgacggggtcgacggcgtggatcggaaaggggctgtcttgcgtgtgcgcccagagaagggacaagcgacgcgcgcctctccttcgatttgacgccagttcaggtgatgatggcttttcccttctgtgtgatttgatccccacagttctgcttccatggtgctaataatactgtgttgagttctgggttctgttcacaaattttgaaagttgcttttggtcatcgccgaattcatctccgaattactatccttactctgattctcgcgttttatcaggcatgtcctgcctacattttccatgctcgcttaaatggcttcaattctatttttaacataagtattccaaatattagtttactgttccgtaccatacatgtgcgccacaagataatgagtttttgcatgtgttagttgaaaaaaaaagtggaacagtggaagtaacaattttcattttctgtcccaggaagagtgcctacagaggttacagaaccggttagaagttcagtatgatagttcaaacagtgatcatcaggtacttgtttttggctgatacacgacacctaactgttggtacataggacttttgatgttccatatttttctcttttgatgaagcgggggtgccacaactttatattaacgtccagaacaagatatgagttggaaacattctctaaagttgaataaccagaattgattcaactgaaaaagtatgattaaaaaaaaggtccgtacatatgtggaatttatgaggaaatattagatgttagtaactgaatatatttgatttcagatatttgtagaggcaatagattttcaggatgtagacagtcttttgaggttacaatgcaacaactttggtcgtttattttgtattttttatttaggcctcttattctcagtgtggcttatccctggagaactaaatccttaactcttttgtgaagttatgcatggcaatacagaactccagatcatgtgtgattctccagtattgttcatttcttcttggagatgacacttgaaaaatgttggaatagctactcgatgtgacacctcacatttcttcaatcaggaagcattgaaggacctctggcgtgcttcttttcctggagctgagcttcggggactaatatcagaacaatggaaagagatgggctggcaagggaaagatccatctacagattttaggtattggcttttctccttcattccacccttttgtcagtatttcgtggctaaaatagataagaagaaatgtattgtcattacagaggtggaggcttcatctccttggagaacttagtgtacttctccaagaacttcccagtaagtttgaatccttgattccaaagatacttgtaccagcactgatgatgactaacgagttgagattcttatgtaccccagtacttatgtttcagtataacagctataatctactagatccgtttctggttatagagcatttaatgcttacctgaaattaattttcaccatttctggctgtacagaatctccttactatgaaaaagaaatgaggaccgtttcatgcatctggttggccaaacataaataatccacagtacatccgacaaaacagagtgctgaaaatggttctgttaaatacttcctctgacccaaaataagtaaccaccttaccacttattgtctaaattatgaggggaggtaaatgacttagatgccccttattaattgagggatgtatgtgcgtgagagggtagttgggggtaaaatgggaagaaatttgaattagaagtaattaatgacataagtggtactccaaagtgatcacttaatttgggacaaattttgaatccaaagtggtcatttattttgggatggagagagtagtatatatcgggtgatattaaatgttat

SEQ ID NO: 27964 - DNA, 17479 bp, Oryza sativa
atcttcaatcaggtttgttgaccaaaagttctttgcttatcagctattggatgattggatctatttattagacaatactagttcctgcagagttgttgaaacgtgctagaaattcatgttgaattgacacttcacttcgatttcctctgcagttaaaccaaggtcgttcatcggagcagtttttctaaagctactttctggtaaagcctatgtttcataatcccttaggatctacaggagatgcttattgtttgtttcttttttgaacctaaactgagtcatgcatttgttcctttgcactccattagtgacctgtgatcaggctttagggtgtatgattgtacagatgttgcagctacaagaatttgtgtttcagtatatttttgttatataaaccagctctattgattttgcaaatagatgactattgtgttatgactattgatagtctacgtttgctaaattcactttaatggtctaaggtataccacactagtcatacttcttgaaacagacaacatatattagattggtgaaggatttagtaataattccctgaatatttgtttcatattatagtgctactaaaattgattccaaattatagtgctcctaaaatctatttcagtatagtgttcctaaaattgatttcaccaatttttggtccagaaaatgatcaggcttttgacattctctactgcataaccttcaagttgatggatcagcaatggcttgacatgcgtgccacttacatggacttcaatggacgttgtctttctatcccaattctagtagcgtcacacccttacccctattgacccccttttttttgtaccaaaatcttcagagacagacaatggttgatgaaatcacccatccgtcttgacttaaaatgtgctactaaaattgcagacggtcatgaagtccacacgacgtcagctagaaagggagctcttgcttgaaaatattcaacggattgaggacatgccctcatacaaacttttggcccgctagctagtaactgaaccataacatggctacgtgctgcaaggcttgagttgcataagggttgcaactagtgcccacaaacagtgtgaatttcaaaacgcagatgcacttgtttcctctcaagtttaggtactctgttaacctgtctccaaattacaagatagaggtctcttggccatagcacgccacgtagggtaactgaagtgtccgatcagctgccagggcagagtgtttgtaggttgggtgttttgttgcagtttggttgatgcccgtcataccacgaaatgaagtgcttctaggttttcctttttcctttataaacaagaggctcttgtgaaagctaatctgagtgtcttctgtagtgtaccatatttgcataattgatagtgttcagttctccgagtgtgcagaaatcatgctagctgtttctgctagctccgcaatgatgcaaatctgttgtttccttagttgtcctggggcatgaagtttgttcctatatagtgcagaccatttttgtggtacagcacgcctttcttgattgaatggattctgagtgctcatttgctgcttgctactgctggattgaactgctctcctcaaacaaatgaatgcagagcgaaaagataaaagataagggattccaacaacaggaagtggacaaaccatactaatcaacgaagaacaaacttgatatgtgacttaattctgttctcaggggtcaggatatgatatcatatgaccctgcataaagctggagcgtgcctgtgcttcctaggggtggtggtgcttgcctctgctgccgggctcagccgttcaggacttcaggggtggctactctttggtcggtccagactccagacactgcaggtaaagcaacaggtcccccagcatccatgtaattgttgtagcataatgtatgagcgacagaatgcgtatacactaaagctggcagctgctaatactagctcatcgttaaaaaaaaaaacactctgaaaatgacttaaagaagccgtatctgttgtctggatgttgcgtttttctactaaacaaaatgcatagttagaagaggaacgctataaagaaaactgaaccctcgatggaagaaaaagaaacacagaagtgatgatcaagcagcttatagttgcactggtaaccgtaaacgcgctactagtagctttgtgccggctatgcttctacgattcttccaaccaaacctcatacgagcagttaactaattcctagcctggatattcggttcgctgtagataatccgggaacatgttctgcaaaaacgaggacttgatccagaatagctccaacagttacgacagtttccatgcattcttgttagccattccaatttccaagagattttttttaggacttccaagcaaaaaaagatcacttctttggcactcatatgccctacagtacaggcaaaattcacgatgtaacctccgtcaaacaacgatatccaaatatgcataatgtctaatgaggctgaataatttttgcttacaatgtccaaacaagcttcgataaaatttcaaagaaacaaaacaatcttaaaattttaaaattctctcccctatggggatcaaagaaagccggccggccggccggtagtggtgctctctgtcgtgtgccatcttatggtggatttgacatgtgtgcagtcgcgaaagatcgcaagagatctggtcgcctccgttcgtcgccgggagccatcgatggcacgaaaggcatcatcatggcgaggaatctctggcgagcgttagatttctgccgtctcctcctcagctgatctctggtagtgataccgtttgcctcaaataatcgatcgattttttgagtcttaccaaccctacaacgttgaaagagctgggcccattgtcctacctcagctaccagtaactatacacaacaaatgttcatgtctcgtgatgtcgatatgtacagaactagagaaatgatattagctggccgtgtgcatttacattagtccagcatgggccaatttactgtagcaaactagctctagctagctagctgggctcgaactatttagctaagcagaaagcttcttttttacacttaaagatgtacttacttttcattcttgtggtaatcagttgaagtaaggtgtgcgtgtctgtgagttgagatgctacaaagctgcgtgatcacttgctgcaaacttgccactctaggtcattgagcacccagctcactcaaaccatgttccaataattttccacctaaacgttgatataatcccctcaaaaataaactttgatataatccgtgcacgcactccgagttatttttgtgaagcaaatgaactagcttgtggagctcctctcctcctatgcagggagctctataagcaaggtgaagcaccgtggaggtgacgattgatcagctatgaaagacttgagctgtcaagatgacaccacgcgcccagttccgggttatccttgggcaagttcggtaaggaggctggtggacagcaggacggaggaggcctcagccaacacgtggggaatttgcagcgggatagagggttaattttggcgacgaggtgcagtggaggtcctgctggtgacaggattaaaagtgggccgacagagagacgttggtccgatgtggcataggccgcgtgcagccaacgtttggatggtggtaactaagatggtgggtgacaaaccatatgtagatagggttacagcggttctaggcgaaagcctagcccagccattcactaggacgacagtgaatataccctcgggtgttataacccctctggagatgctatcgaggtatctccttcctcacctttcttgacgagaatcttcgggtaaaaaccacatctaagtttcttagacgggtgacaacgacgtccttagcatcacaacctccgtggaagcatcattttgaagactcggctctgtggttgtctgaacctaaactccaatagcagggagtcatgtagcccccccttttggatttggccaaggagcaaatggcggatgctaaatttgggccgcgcgagacaaagtgaggcaaaatgattatacaggtttgagccgctcagaggcgtaacaccctactcctattgagtttgtttttttagaaacacagtacaaacgcaggtgctcacaacgcgcacacacaccctacccctatgagcacctccggaaaactgggtcggcatgtcttgagattgacgaagtcaccacaggcgcctcgctgtcgacgggtacgtcgcctaccactgaaagaataattagccgtaaaagcgagcacccatgtcaaatctatgatttgaacctgggtgggttggttccaccacaaggaaccaaaccagttgagctacactcactttgccctattgaatttatttcgttgcttggggttcaaatcttaaaggaaagagacttagcaaactagggctactttggtttgatcccctacttctgtgatcttggtcctccctttatagtctaatccacaattgctagtcacttacaagtgagtcccatatacacaggagttaggtagggttagtcgtatcacgtgctgacaggtggggccttctattttcagtgtcccgtcggaggagctggcatgatagtggacaattgccttctagctcactgcaccctcagcgccgatgctgtggatgacatgacatgccatgcatggcccgagtttggtgacgagactgtggatgacacctaccaagctcacttctcgctttgatagacatgcgcgccaagtcatggtatggctagccaatcgatgggttaaggacccacgtctcctaacagtccacacccccggatttttaggagtgatgatatgtcgcccgtcacctgccacgtgcgaccgccggatttgtattcggcgcattgattaataatgcaagatcgggcagacgatgtgcaggaatgatgagtcaagtccagtcatattaatggcaccctaagtccttgagcagcccatggatggtcaagctcagggcatgctccgtgctcaagctctgcttcgtgcttggggaacctctgtgttcggggcctgctcttcgcatgcgtcctgagcacggggcgcaactagccaaaccatgggggccaggtccttggctccactcgcggttgatactgttgagcgatcttggaggcccttggtgccctgagcaactggaggtggggactcgggtttccactttttcatcattggtgttattgtaggcccgatgacaattggccatgcactacggtgccggtttggtgctaagccattcttagtgatatgtgtttgtatggttagctgtggttattggtcatgtgtgcttcagtatacaacaaatcttgaaagccttctgttgacaatagtgtttttggtaactttttccccctcaaactcaataatatttgaatgtcctcttcttgggtcatcccggtaaaaaataaattattcgcaagtagagtacgaaagggaaaagtcttttgtctctagagggggtgtttccatttcttacatgtcatttaaacaattatattttttaaaaaataaaaagatacattaatacgtgatatatcattatacataggcatgtaaattcaaatttaacctctacgattgtaaaaaaggttttctaacatggctctaaatacatgctgtgtaggagttagagtttatttttcttacaacatgtgaaagtaaactctaaattgttggttataaaataatatatcatatattaatccatcttctcattttttatgtcaaagaaataaggatatctatcctgtctacgaagaataggcccaatgtacacatcaccaaatgaatctgccccagcagagcgacctactacttgtgtgtgcgtatgtgtgcaactgctcacgtgtctgctacgtagtagtacaagcaacattaatttccaacccgtattcccggtcggtgcgtgcacgtcaaaagagaatcacaggtacacacctccgagagagagacctggtatctggccgatcgagcagcagattcgatcgtccatgtcatttaatttgactcggaatcggatcgaaacgaaacgagaagcaggtgcaggtgccgagatgacacacatccacgcgcgcgggcacatgcgcaccgcacgggctcgtttcctcgcggaaatgatgcggttttcctctctccgcgtcggtctgatcaggcggcagcgatacggggctaagggccggggtgtgagcgcgcgcgccgaaagcctgttgccactctgcactgcatgccgcgcgcggcaccgcgtcagttcagggtttgtgcttaaccgcgtgctggtcctccacgggagaaaaagtttacgggttcggcaggggtttcaaccatcgatcgccgcgtgccttgttgccggggacctgtacatggcgaaccgcgcggcgactcgatcgatcgtgcaacgcatccagccgtattgatgtattgtatcgtgtcacaacgacacgagcccgcgcgcagaatcgaatcatcgatgtgtacaggagaacacacatgcatgcgtatactgaagctcgtgctgatcagcgcacgcgtttgccgaaacaacacatcgcggtcgcgttctcagcttgatcccaacctggcttcatgcatgatcgaaaaaggtagtaatctgggccgaagggccaaattatcatcattattctcatgacagagagaaagagatcagtggtgttgagacttgagagtcatgatgtctctgatcactaggccggttgtgtgcgtggagaagcaagggcgcaaagaccaccattttggagggattcgagtggcccattgtaccactcaaaagcaggaactaaatgccatcgaattgaacaaaccaggaatgctaattcacgtatacacactagcagacgaaatcgtacgcgctgggttagggtttcgagggtcgggtgtggggggtggctatggggagggagagtggggagttggggttagagggatgacctatgaggtggcggaccagcggtgggcaatggataaggcggggtcagcagcaggcaaaggttcggggtgggggagggggggatgaggccggctagccagggtcatgctagcacattgatgactttcggcaccagcgtggtcgagacgatgacattgtgtgcacgtggggtgggggaggtggcggtggaggaagaggggcaattcaccagaaggaggaagaaagggctcgcaggagagttgtcatcgtcgccatcgcttgctccgctccgcttgcgtgcactaaggttgagaaagagagaggaatagataaggtggagaggggggagatagtaggaggtcattgtgtatgacttgtccatctctctcacgcgcatcgaatagaattcccttgaatgaactgcggtctaataccaacggatcaacccgccgtggacctctatatgctggtgggtgcatgtgtttatgtatgtaatacatgaatggattttacaattttggagaaggtactaggaagtactaagataactggaggtgctaaatttacatatagatgagagaagtattttcatccttagaccccttcattttttgtgcgccattcaaataattataaaaaatttaacatgatagatattgtgatatatcacttcgcaaaaatgaatgtttaaattcgacctacaaaacttataacaaaataaacaaacaaatatgttgttttttacaacttgtatgtcaaaatttaaacgttaagagatatattacatattattgtatcttattaatttttttcacgatgatagatggggaaccaacacatttagacttctgtgagccaaaaaaagagagtcgtgcttgacttgatgaatcgagccaattctagcatcaagctaaatcctttagatgcacagctcggtcgacacatccagaactatcaaatacaaaagaacacatccaatcaataatttcatgttcctcgaatcaacacatgaagaacaaacaataacccctagatccccatttcaatagatggacgacatatcccattcccaaaatcaacgcatgaacaagaacagcattcaataatcccccaagttctacatacacctagatctagaggcggagggatgcaggcggcaaggtcagaggctaacagggacctccaggcagctggatccggtgacccccaacctccatgctgctagatccgctgccctagtcactagggagaagaggaggtcaccagtggtccatgatgaagtcttgctagcacccgtcatcgttactgccgatctcgtgacggttagatctagttgccaccaagcttgtggcggcaaatccattggcctggccaccggagtccagagagaaggagagggagaaagtgaggggttgtggcagcagtggtggaggcgaggagaggcactgaggcagtggcggtggcaacgagggtgaggatgagagaggaagagagaagtgaggggagaaggagagagaggtggaggacttgaaaaaccaaaacgggctcgctcggctccaatcccaacattgtcggttttctttaaaaaatacgttgatatcagtactgatgtacttacaaaaatgtcacatatattattggtgttaaatttttaattgagcaaaacttacaaaggagtatatataaatactgatctttaattttagaccccgcgaaggaccagagaagagagcaaaattaatgccttatataccggcgccacagataatatgttccctgtcagggattctgtggtagaggaactagggtatgtgtctattgattccctgctcctagacacataaaacaaacggagaagacgagatgacgagagcttgggacaacgtatctgcagccttccttgtcgctgcaccctagatcaggcaaaaaccgatcacgcaatagtagttatgcctataccatgctatctcccagctgcaaaatgacataaccatttccccccatcaacgcgacaggccgccggagaggccggccggagctgcgaatgattccgattggcgatggcaacaacactagctagctagctgctagctagtacgtacgtgcacagacacacacgcacgcgcacagaatagtacgtgttgtccatcataccgttcgcgtttcatcgatatcgtctctcgtctcgctttcatacgcgtcgatctcctcttgtcccctagcttttgcccctcttctccgtgtatatctccgtcgtcgtgatctctctgcatatgcacagtgctactatacccatgcatgcatcagggattgatcagggcgccgccactttggggtttctattcttttctcgcacgccgctgcatccgctgatgatgttttgggacggcagtagtaggctcgcgcgcggctgcttctgctactacgacatactattctgctactacatctcgtgcatgcttctgctgttctctgcagcgctgtatagtacaagctctttgtgtctcaccgtttctagggcacaccatgcgagtccttggggattctgtgcaagtacagcagggaggagtagtagtagtagtagtggcgatcacatgtctctgcctgatcacgtcttcatggaccaactatttggatatattcacgcatgtgtcaattgtcatgtgtactcatgtgtgtgctatactcaatttgatcattgcatgtttatgtgcatgccttgcaattgcatattcttttttgaattggagatcgctgctatgatggcagatgaatagtagtggcccaattggaggcccctgaagaagaggcttttgcagcagggtgcaatgataggaattcccctccatttcgcctgctgcaatccccgtggctaaggccgtgtttagttcttcggctaaaacttttttaagtatacaaacacacatttaaagtattaaatataaacgaataataaaataaattacagatttcacctgtaaaccacgagacgaatttattaagcctaattaactgtcattagcaaatgtttactgtagcatcacattgtcaaatcatggcgcaattagactcaaaagattcgtctcgtaatttacatacaaactgtgcaattggtttcttttttcgtctacatttaatgctttatgaatgtgtctaaatatttgatgtgacatttttgaccaaaaatttttggatctaaacacacccttaatctggatacatcaatgtgagtgcctgcagcagctagctagcagcaatttgttcggtttgccaacatcttttgcaaccccccacttttagtttttttttctcagtgaaaaatcatactcccatatttacccgatttttaagttctttttcttggaaaagatcagtacggcctcgtgaatcctgcatttctgcggaagccgcatcattgcactgcatgcataagcttatttgtgattatatccactttagagaaatgcatgttacttctgacattttcaattaaatcgccacccaaatatgtgttaatatagatatttgccaactgaatactccctgccgaagaatataataaggacatctaaagttcaaaattcgtttaataatattctatccgtttcaggttataagacgtttttttgactttggtcaaaattaaactactctaagtttgactaactctatagaaaaatatagtaatatttacaacactggcatagtttcattaaatccataattgaataaattttcataatatattagtcttgtgttaaaaatattatttcttttttctataaaatttgtcaaacttaaagtagtttgactttgaccaaagtcaaaacgtcttataacctgaaacggagtgagtacaagatatcctcacctaatatagttatcgttatcttaaccaattacaactttcacttatttaatttcctcaactattttctatcacaaccatttctcacctaaaccataatctcttaaaaaaaaactccatatgttcttatattcctgaacagactgagtaataaacgcagaccatgttggtttgaccctgctgagttatctgtataccttttctaatctgtttaagcttataagaactaattagtgcatgaaactcaataggctttcaagctaagatgcgttgagtttgagatcttgtggtagggtttcaaaatgcgatgataattgataagttatcatggttatcggtcttattgaaccgaccatttacgaaagcctctccgtaaactagccaagttaaagaaaatcaaacaaaaattcaatattttggcaaaaaaaaatccaaatttaaccgctcgattatcgatgaaaccgccaggggttattgactacgtaccggttgcattttaaaacctttcccggtgaatcatgtatgtaagtatgaggttcagatgctttcaaaaataaaaactagttatttgattgtttttttaaaaccttgctacataattttttttcagcagcaactagctacttcctcagtcccaaaaaaataaattaaccttatattggatgtgatttaatctagtaccacgaatctggataacctcatgtccaaatttattgtgctagattaagttcatgtccaaatttattgtgctagattaagtcgcattcaattttaggtttgttttcatgggttagagtgcgtagcccgacccatcaaccatgggccacccatgtcacattaggcctgctcccccacaggctaaacatgagccacaactttaggtcctggaccaacaaactcaaaagattagtctgatgggtgatgactgccccaccttttaagtcgtactccccatcattaattattgatatgggactaaatccaacaatctccccgtcacacatcgggaacaacaatcttccccgtcacatcaacccatgtgaccctgaagacttattacctggcctcgggcccaacaatctccccgtcacatcaacccatcacctatgtgacctcgaagacttgttacttggcctcctcaccatgtgacccatgaaaatcgttccgggttctaaacttgggctctgataccacttgttaatgtgcgcagcccggcccactgaccgtgggccacccaggtcacatgaggcctgctccaccacaagctcaaccggagtcacaactttaggtcctggacctacacaacccaaaagactagtctgatggatgaggaccgcccctaccttttaagtcgtgcttctccatcatcaattaccgttcattgggcatttgggctgagtactgtttcactgagtgagttgttcacgggaagcaactgtggacggcaaggacaagttacaacgatgcattttctgaagtattgggatggcttgtgcatggaacaagctgattgcatgctacgttagttatgcacagggatttggttagttgggaccatgctgtgtgtaatggttaatttgtacatgaggtaaagctgaggtgatatggcaagccaaagtattggttcggcaagattgcaagggtggcttaacttagttatgcagttgtacgagacagttagaaatcccgggaaacagtgggtgaaaatcgttgatggaatcaacgggccgtttggcagtacagggtatatccagaatctgcggggcttgcataatggggatatataaaatatgcgtcactaaagatgaagagcaatcgctatgttggtaatttcttcgggtgatttaaggcaatggtgaattttctcaaattatcggatattcagtctacggatgcggaaagcgtggatgttggatttattagctcggttcataagacaacaagaaagaaagggttcactacatgtctggtgagtttgatttatttatttggtgatgacgtcggttatctggccatggattagatcaagtcaactttaagacggtagatggagttgaacatggtcttcggggaagtctatgatgtgacagttaggaaggaattccattttgtttggcaagacgactgtggtaataggtgagaaggtggagcactgttgtaggtggagtcaagaagaagaaattacagggatagcaggagttgactcttgttatggtgagcctggtggagtcttatcggggcggctcggcgtgaacggcgaaaagggatcaactcaatttcaggtgcacggagtttcgtgcaaagaacaaattcaggttggcgtggcatattcatcaaggtggagtttgttagagtttgtgttgaatatgtgtacgcaatcggttacagtttaggacttggagttgtactaggtgttaggattagagtaagagtcggactctatcataggctctctcataaatagaggagcgtgcctgttgtaaccgatagggcgacatagcatgcaagagggagtggctcccggctatagtccgttggtaactttaatacactgtaatatgctggatcgggaagaagcgttcataattaatgccctggagatgtaggtctcggctgaactccgttatcaaatatcacgcctcggtgtcgtcaccatgtttagatctcctatggtgtttcttccgcgtttggtttccgatgtgatttcgggaccggctttataacacatgggatgggaggtaggtaggtgagaccaggcagtactgcagtcaaatgttttattattggtttaattgtggatattaatttgtgaataaacatcaaaaccagtccctttcggaagacacacgtaccctagatatacatacgcacccaataaagtaggatagtgatgattcaggaaaagactagagttgattcacataggtgcgcatcacagagaactatgagcaccagtatgatcttttgtgaggagcatctatccaaaagtcatataaatgatctggcaattgcagggaacaaaaggtacaatcagtgctatcctgtacgcggaacaatcgctgcaataatacatgcgcccagcctgaaaaagccctgctgatcacagattcaaagtagtggccaaaagtttctggcttacacaacactaaagttgcaattaactagctaatctggtatagaaacatgaaacatatatatcgactgaaacaggaagctcgtggcactgatgaaagttcaagaaccaaatatcatagcaacagcgtttctcatagaaaacatgattaacgattaatcagttgtgatccgacatctatataagtagtacacatatcagctacagaaggcagatccgacatcttgccaagagccgataaattagcatgcactatacctagctagctcaaggagagggcaacagctactgaagcaggcactgtacccacgacacaatttgagcaaaaagccctttaaagggcagcctagactccaaagtccagagagccatagcccaccacttagaccctgaaagcatcaaaccctatcaaaaattgacaccaaaaagacagggagaggagatctatcccaagaaatcctatgtcccaagagccactttgatcgattggcgatagatagagatcactactactgccacaaacgccacacacgatatagctatagccatatgcatacttgcatggaaggaggtggccaactggggacttgtcttccgaatttctatcttttgccagatcaccacggcatgcctcttcctcctccacttcaactaccgtgccatccgaagctactccagatgccattcgaccaagaagatcagcccggaatccatggcgtgatgctctcttctgaccactgcgggctgtaccctctgccggcgcttccgttaagcaactccgccgccgccgccgccgcaaccgtcgcattggggaagcacagtgcagccgccggttccatgcccaatattggcggcgctgaggaggtaaactggctgggctagattttattctgattatcaacaaggtctcttttcttgttccttactaattctcatagagtatgatcttgttcttcaggtggccaccactgtaaccaaagctggcaatgagagtactacttgcaatggctccactacatggtacgcgtgcatatagtgaaaacataagatagatgcaaacccatgctgagatctccagttgtgggagcttgcaggtggaggggctcgacgatggcggcggcgggggagaaggggaagatgaagatcaggaggaagatgagggagccgaggttctgcttccagaccagaagcgaagtggatgtgctggatgacgggtacaagtggaggaagtacggacagaaggttgtcaagaacagtctccatcccaggtacatatgctcaacttaaccaaaaccctacatatttgatttcttatatcatttatacatatgtgtagataatagattccccgtttcttatcaattaactaattataaacataaacagaagaatgtctcgatgcctatttaatttggttaattagtaatacgcaagtttatatataccagataaaatatcaattttatatgtacagaactgagcaatgttgatcttgttttttctcctaaagggcttcttcagaacatggaaaatttgtaggattttcacaggaaacatttcaatttctccaaaattctcgtgaaattcctccaaaccaaatataccaagggtactctctatggcagaagagaattaatgcatgcatggttaaactaacttgtcaacaaaggtcttgatatgaatagattagaagctgatttaagacaaggcaaaatatctacaaatataattatatatatgcaggctatattattacttttcctttttatatcaatatagttaaaagcgattttacagtacttaagagatgttaggaggtgccaccgtttttaatgtaaattctggtacctctgtaattagtatttaaggtactaccaagtctttacaatagaaaatgtggtatctcttaacaagggaaatgtaaaatttctcatttaatttggtatgtgcttatctattagctctgtacttatgatatatatgtttattttgcttctacctacaatcgaaataaacgcagctactcctataacatattgctgtcaaattatatgatccatatgtcaaaagtgttcgccagtatatggaaaagtttcacacacttgtcatcagatgacccttgcaaataatcttaattatgtactagttaattaaggtccaagaattaattggtattttaattaaattggggttcactttgttataacaatgaaattaatctattgagctgaatctgacaggctcaccttctgcacagttttattaaaaaaatatttttaatgcaaattgttacattttggtgaacaagcttaattagttactagttacatttcggtgacaagtttaacaaactcatcatacataactagccgtatcagttctttaatttatgataggtactgtcatccctgatgcagataaagggacgggtcataaatagattaaggatcgagttcttaccacaaatattctgaatatgcatgtatgaggagtcttggggtaattaattaaggtataacggatcataatattggcaccatgaaagagaggaccctacatttgcaaaactaaggacgatgcatgccattctacacacatacaacacaagtagtgtaagccttagctatttcatgcgataaaataaacggcaattagcagccaattaacataggcacaaaaggtacattaataagaaagatgcttcagttccaaattcatacatccgtttgtgagaagctgtgttaggagtatactgcactgtatctggcatcttatatatctatgtataatgttcatataatgatactatttctttatctcattaaaccatatcacctcaattgtctttgacacttagatgattaatttatggtccaaattatttttatcattttctttctcatacgaagttatatcaccttagttttgtctttagatgattaatctatattatttctccttttttttattttgtcgttgaggcatatcaccttagttttactttttaatgatcaatttatatatgatttaaattattaaaaatcacgccatctaaactatttttaacttttttcatggtcgatcaaagatgaaaattatataaaattacgtcatccgtcatctagctatttttacatgttatttgttctattattatacagaacttccgctgcgatgcgcgggcccaatctaactctcatctgcttgcagaactcgatcgataaaaattaattaatgttgtcaattagctaattacgtcgcatgcgggagtcatcgcactgccaaatatctaaaaaaacatgtaatagtcctttcatttcagtaaataaacacatttatatttttttaatctatatattaaattgagaaatggaaatttggtagtcaggacttccttcgtcccctaatataagggatagactagtactttattcctttcacaatgtgagtcattctaacatttcccacattcatattgaggggg

SEQ ID NO: 27965 - DNA, 3859 bp, Oryza sativa
  unsure (1)..(3859): unsure at all n locations
cgcgccttgattgcctatcagtatggnacagnacntcatcaattgatgttaatgaatctagtctagattcattaacatcaatatgaatgtgggaaatgttagaatgacttatattgtgaaatggaggaagtatataggaggacaccatgaatataatctcttgttttgcggagcttctgatctgttggagatcagaactacaaacaggcatttttgtgtgatttggatgtacacatgccaaaactgatcgacgatatatatatgaatgcgcatatgcatgcatgcaggagctacttcaggtgcacgcacagcaactgccgcgtgaagaagcgggtggagcggctgtcgacggactgccgcatggtgatcaccacctacgagggccgccacacgcactccccctgcgacgacaactcctccggcgagcacaccaactgcttcagctccttctgaagattttagcactttgcattttcgtcgttgatccatccatcaatatatataccgtcgtatacctatatgtccaccgtttgatcgattaactgtggctagctctagctctctttcattttgatggttgagatatataggcgacgtaatatcgagccatgcctgcgcaatgtaccagtactgctagctatacgtgagatgtattgcgtgcatgcacgtacaatttacaagcagcagtcaataaattaagctatgtatttcttctataaacacatcagcacatgcaaagtttgtgttacacataaaaaactccaatattggaccaatatagtactagatgttacacatcctagcactacgaatctggacatacctctatccagattcattatactagaatatatcacattcagtacaagattcgttttttttaagacggagggagtatatagtactggggaaagtgttttcatgaacgcagttcactttacgactataactagctattgccgtgtttagttcatcgtccaaattttttttaagtatatggacacacatttaaagtattaaacgtagattaataataaaacaaattacagattccacctgtagactgcaagacgaatttactgtaagtctaattaatccgtcattagcaaatgtttactatagcaccacattgtcaaatcatggcgcaattaggctcaaaagatccatctcgcaatttacatgcaaactatacaaaaaaaatttcgaccacatttaatgctccatgcgtgtgttcaaacatcaagacttttttgaccaaatttttttggaatctaaacacatcctatatactcactttgagatcagttcatggatgcagtactacactgcaagtccggtgatatgcaattctgcatgcatgcgcatacaggtattcccttcctacgataaaaaataaatctagtacgttatctcatattttatacgatgtctcgtaaagagtatactcccctccgtccgataaagagtgcattttttttatttttatagaacatttgactcttcgtcttatttaatttttttatgattagtattattattattagatgataaaacataaatattattttatgtgtaactatttttttatttgttccataaatatttcaaataagatggacaggaaactagatacagaaatccaaaaatgcgttctttatgggacagatggagtaggtttattttttggttggaggtagtatccgtgagtcctaagttactccctccgtcccaaaacaactgcaattctgtactattcatatctaacgtttgaccgttcgtcttatttaattttttttatgattagtatttttattgttgttagatgataaaatataaataatacttatgtatgactattttttttttaattttttcataaattttttaaataagacggacggtcaaacattggacacggatacctattgctacacttattttaggacagaggtagtagatcatactgtacacctttattttttttttccactttggtgtactaagtttgatcatatactacgtactgatgagcgcaggcctgacagaacacacaacacaggaactaaaaggaggagaaaaaacaacacaggctcatcagcgcggcgctcctttgcgtacttgtatgtactcctacgtatatgtgcatcgatgcacatatatgcttcgatcgatgcgcgctaatgattgttgcaacagagaacctgcagttccggcgaaaacgaacaggggctcgcaaacaaaaccgccatcaacactcgcgtgctcgcatctcctcggcgtctttcagctggtgtgtgtattcagaagctagccatgcatagggagggcatgcaggcatgcagctgcacgcgaatcgatcggtctggtattgtggtcatccatcggggagggcctcaaaatgtggtcgctgaagaaaaaattaacactgtgagatcgatcgagcttgccatgaaatcgaggtgagtgggtgtgtcaccttcgaatctttgatcatgagctccacctacacgcgctggcccatcatgatggcctaggaaacacggcccggtcactgcgtgcgcagggatcccgtcccggcccaacttgaggaggcaggacgcacgttcgcgggcatcctggttgggcccagaggagaagagggtgacacggtccaatgcgccccaaattgcgttgatttcctccagcgccgtgcggagcacccgtcccggcggatgcggcgagcccgctatttttatctccgcggtcgcgactcctcacctgctgtctgctgcggtggtgcctgcgtggctgcgtcccatgtatcgcctctgtttgaagggagcatatctatgcacacatgtcctcgcgtgtacacaccatgtacaccaactaaaaatttttacaaaaaattctagaaaaatttatacatgtacttttaatagtattatatctacgtgcaaagtcgcatattcaaattcattctacatagagaataacaaaaaagataaaattctgacaaaattgcaaccttaaaactgtcagattttttgttttttggtatggctaaaatataatgaatttgacgttaagattttaaccctaggtgtaatacaattgatagtatgtgtatgattttttttagattttttggtgatattttttagttggtgtgaacgtgtgtatacgtgagggcctgtgtgcataggatatgttgccgtgtttgaagactattttttgctgaaatgtcatgcaaagaccttaacagaaccggcggcacatctcggggatatcattttccctcttgcttccgttccatataacggattccgtgctctctcccgaacttcagctgctccccaccagctctgaggccgggtcagcacatcacgtgcgccgccaacgcgtgcctgcggagcgaggcaagggaagccatggcccagggcgcatagctggtgggggagagcgcccaccaggacatgccgcgggtggtcgccgcgctcgccggcatcctggagcgcgtcgcggggcgcaacgacgcggccgcgacgcccgcggagctcgccgcggcgccggcgtcgccgttccgggcgacggccaagccgggcatctccgtccgcgcgtacgcggcgcgcatcgcgcggttcgccgggtgcagcccggcgtgatacgtcgtcgcctacatctacctcgaccggctcctgcgccgcggccggcggtgcctcgccctcgccctcgccgtcgactcntacagcgtgcatcggctcctcatcaccgccgtgctctccgcagtcaagttcatggatgacatgtgagttttctctgcaaactctgctgccactcttcagatggactacacacagagaagcgntcacccactccg

SEQ ID NO: 27966 - DNA, 21463 bp, Oryza sativa
  unsure (1)..(21463): unsure at all n locations
gcgcccatgaaggtangacaatcgctccnacccngcnncatattgggttcaacttatagttggataatttcaatcactttgtttcttattcctactcgacatagttttgttctattcacaaacttcccttgttcgagacactgccagctaggaataaactgggagtgtcttcgaagtaactccagaatcatttcggtccctagttcaggaatttttctgtttttacaattccaaaatgagtttttccttacagtcttgaaacggaaggcaaagagaacctccgaaatagttacatctgaatatcacagcaaccaccagctattaattgtcggtaatcatgctccaaagaagccactgggaaaggtttccacctcaactttgctgtcaaaactaggctttgcaccgggtacccaaagtgatttgtccacgcaaacaaacgcagtacatggacagaattatgcttgtccagcaaagcaaaaaaaaatgaggtggtttcatttcactattccttgcgtccaaccacacacatccaccgtggacccaagaacacaaaccagaattccaccctgcacaaggaccccctcgcctttttgtttggaatttaattcagtgccagttgtgggggattgggactggcaacttgcccttgctgctgatgtttgcagctcaatttccccgtgtcagggcctcatcgggagcatctcttttttctagctttttcttaagagtaagagcgacactactgtgacaatacttaattgccaacttggcgtactgaatgagcccgtttggtgccaattcggtgatttgtggttgcgattttgttcggtcgcttgatcgatcccttcgatgctactggtgattgtgccgtcaatcattggagagcaatcataaacgatctgaaagaatggacggagcatacaggcaatatacaataatactgtcattaatttctttttgtctgaaaagattaacagccgaattgttttgacttttgacatgatcgatcgatctgtatatatatatattcagatgctacaacaacgcctacttcgccaaggtcgggggcatcagcctggcggagatgaactacctcgaggtggacttcctgttcggcgtagggttcgacctgaacgtgacgccggagacgttcgccgactactgcgccgtgctccagtccgagatgctctgcgcggcgccgccgacgaggctgcactactgctgcctgtccgaggacgatgccggcagcagcagcagcagctcgctgcgtgaagcggccatggaagcaagctagcatgtcacactgcgtacatacatgtgatctgtcctacgtgctggagtattagttagtgtggcagttgctttgattagtttagttagcctgctagctatagtagctaataggtggtcgatcgccctctcctcctgcatgatgcgtacagcagtgcattcttgctgtgcactcctttgttctttttctttttttctttttttgtttcggtgtgtactaatggtgtagatcagtgaaacatttatgcaatttgatcctatgtaaattttgatggaaaaagtaattttcaatcttggaagtgaagtatgtagtcgaccatatagctcagactggcgttctcacacacggtggatgcgccaaccactactgaaaggcaagagatgtgaccgtaagcaatgggcgggaggggggctcaccaagctcctatgactatcacaataattacaggcaccgaaatcttgggtactggagggaaatgaaatactatgccagtagtatctacggccgctccgttccaaattagatgtcgttttgatttattgcttttaacgtttgaccattcatcttatttaaaaagttagtacatatataaaaaagataggccatacttatagtacttttgataataaagtaagccacaaacaaaataaataataattcaataatcttttgaataagacaaattgtaaaacgttataaacaaaaactcaaaacgacaagtaattttgacagaggtagtactacagtataggaaactattctaattttttaggagatattctctcgttatttgtatgtcattcaaatgattatgaaaaaaaataatagattaatatgtgagaaatcactccacaaacatataaaatcaaatttaatttctacgagttgcaatgaaaaaacaatttggctacgaacatatgttaactacccatagcttatgagcttacttgtcagctaattaattatcattcttttaggtaataagatagaagtacggtatctatatccataagtagatatacacaactaaatattacacgagttcattaagatacatagaaaaacaagcaaactaaaagaaaatattagaagagactagcttcaaattttccctcatcacttcaaactttaggggaatgcggagctagcccgctctttcacctccacaccctctcgttgttgttacaaccataaaagttcctctgctccgtcatgaacaaaggaaggggacagaactagtccacccaaccgccttgtcatcgataagcaccggtttagtgatgtccgaacaaactgtgctccctgaacgtgaatatgttcatcgctgtcatgtcgtcgtcggcatagactaacacctcccctgagctgccacagcttatcttgccaaaattcaatggcgctatgatgtccccctcccccccaaaaaaaaatcattgccgcataacctcacctctgcaaagccgtctaagcttatctcaccggagaacatccgccgctacgtcttctttgtccgaaaccatgacctccactaagttgccgtagcttatctcgtcagtgatatgctactaccacgacattgtcatcgtagaccacaacctaagccgagctaccgtcacaacctatctcctcgaggagtcgtcgtcttcactgctgacttccgccaccacgaataatcatattgtttatcacaacttctctctccttttaagaattgaaacacaagagcatatagaagaataggagaattctgtaaccttcataagaaaatatgtgtagtggattagttagtgattgagccattacttaaaaaagagaggcccaaatattatttttcatttatacagttaccagaatccccacaaaactgcagtaggccgaatactaatgaaggccctgggcatggcccaattagtagtgaccactgtactctgaatatgctgaaaagtttagcccataatgaatattggcccatggtttatattatagctttgtacactagggcataaattatatgtttaattggatccatactattataaattttcgactttagaaacatgttattattattcatttatttggaatcatgctattacaatttcttgattatttgatatgtatcactacttacccttcagtgtatttattttatgatttctagaccaatggagcccgagatagggtgctagagctcacggttggatgtggaggatgagagagcggcgcaatcggtgagggagagatggatggcagaggctgcagacggtgaaagggatgaggatggggatggggagcaagccgtggttggaggtgccacccttctatattataagttgttttaacttttttttaagttaaacgttgttaggtttgaccaagtttacagaaaaatgtaataaaattttaaacataaaacaaagaaactaccaaaatatgttaaatgttacatatattaattgttattctaggttgtttagcatatattgagatttgagaaaaaaagactataataccccttgtcaaacggtttataggtaagagtggagagtagttgagggcaaaataggaagaaatttggatgagaagtgattaataggatcattagtactctattgtgataattattttgggacaaattcaaaccctataaatacaattattatgggatagaggtaatagatgtagtgaaattaatttggtgttatataagtgttgttatatttttctataaacttgattaaactttcaagaatttaacttaaaagaaaatcaaaattgccgtatttcacatttggtaatccatagcagctccgctatacatcagacaatagtagcagactagcagagaatttatgttttcatgccatccaatacgttatgccgaatagccttcggttacatctagctttgcttcagaaatctgacatgcaggtcgattattcaggaagttggaaacgcaagccagacggaattccgccacgaacacagcgcagaagcaactagctagcatggcgtatcaccaattcacaagtcgagtactatattggcatttggggcatgaaccatcgtagtagaaggtactaccagttacaaagcctgaagaacacagcacgtacggtaccgctatgctcaaattgaagctcgtacatcagcgttccccagttgataacgtagcatggatgacatgacactatatatatcttaggagattcctatacattgctctagttatgaagctcatggttcgtctcatggccagaggaggaagacgaggacgggcggcttcagttgttaccgccaccgtccttctgctgtgtcttgccgccgccgccgcggaagctcccgcgcttgctccagtttgcaccgacatcgccgccgccataatccccgccatatccaccaccttctccggctccgccaccaccccctccaggttccccattatagccaccaccatagttgccatatcctccaatgccgccgctgccgccaccatagttgcggccgccgccgccgccgccaccgccaccgccacctccaaagcctccggggtggccaccgtatcctccaccgaaaccatatgctcgaccgcttcctccgccgccgccgccaccgccgccgccaccttcgcctctgctgccaccgtacccaaacccgaacccggagcccttgccgccagggctagcggcccagccccagccatacctccaagcaccgtcggggctggacccctggccggaccccgagccgcccttccacccgggcggcagcggcggccccgtctttcccggctcggccgcgccggcgccgtccccctcgccgtcggcgtcgcccctgcaccgcacgaacgcggacgcgaagacgaggaggagcaccgcaagagccgccgccgccaccgccgccgctcaccgcttctttccattgcaagctctctctcactcactcttgctctgtttcttggctctgcgtacttgtgttgcacttgcagtggatgtcccgtgccatgcccctatttatagcgtccacaggcaaccgatcgcgctcacgcaccaccggcccattgccacgatttgatcgatcgatttgctgctgctgccttttgccattctgctttgccatgcatgtcctcttcgtcgcgtcgatcgccaagctttgctttgcgcagctgcgctgccgaccgagcgttacaaaagtctctcgccaaagccgctttcacctttatcccgtccgtgccgcgtcgcactgtaatggcatgagaaggaatgatctctgttttcttttgttccttcatgtgcgtgcatttttcttcgtcgagagcgaggccccgtgagctagagaatccggttcgctgatggctagtgtcgaggtgtgcaaatgtgctagcaacagctggacaaaaaattttgatgttgccactatgcagctggccctgcgtcgttcgtctgttcccagaggttcgtgttgatgacaatgagagatctctcggcggctagcggctagcgcgcccgtgaccgcacgcatggcaaagaggagaaaacgatatgggcgtgacgtcgatagtgatttcgtgaacacgagtacacacactcaatcgggagtccgtttatttacactcatagctagctagtgctgtacattactggagtggtagtactagttatctagcggtttgatccaaagatgggcgcaataatatttgatactcgatcgtgccaatgcggcgtgcttgaacgtcgtaatcaagtagccaagccgcggcctaagatatccaaggccataatcacgggcatcaagatagtggtaagcaagcactgaccacatacgtagccgttaaatttgaccctcggggttaacaaggatatatgaagccttttgtgataccgtcggcactgtgcccatggtaggacacacttaataatagtacaatactacaattacagcatccttcctttaatggcacccacaatggtaatggcacccacaatggtaaagtaaggtgttctctgtaaaacatatacatctcaacaatagattagattaatagtaaatcacctcaatagtatgtctatatgggtatctatagctctctaatctattgccttgtttttctctatagactatctctagactagtagatagctttgctttctctctcttcatttaatctcttccatgtagaaaaatatggtgacatggatctcttatacatagcctatagataacaattcaactctagtctcgcgtctcgccgcctcacaaccaatgcatgcggtgcggtgcgtgcgtgcgtgcgtgcaatcgtgcgtggtcggccgggggaaaaggggcacgacgcagacatgcggtgggatcgatcggtgggagtaattcaacgagacaacgaacccatcccgtctccgcgcgtagctttcgactgggctagctttctcgtgcgattcgatggcgatggtcacctcgcccccatgtacagtgaggtgtgtgcacagtgcatgctgcagctcgtcctgggccgccgggagcgcgcggaacggcgcggtggccagggcaatttccggtcgacgggggcgcgccgccgaggggatgggacggaaacgattgccggcagctgggtggctcgttacaccggcggagcccagcagccacgtgcaccgtgcatatatggtgcggcgtatcgtgccggtgcaacgacgcgtgtaggcgcaggatgcgggcagagcccaccgcgaagcggttaggcacaaaaaaaggagaacttttacaggatttgcattccaaaaaaatgtaaaaacccaacgctagttacttagataccagataaaaacataagtgcactagttggtagaaaatggtagaattgtccctaattttaatcggtaccgtataggtaccagttagtcatttacgggaactagcttagtgtttcttatttgtatggtttcctctatatttacgttatgtactttgctattcttatttgcatgattttctctaaatttatgttttgtttcagaaaacacgttagtagagtaaaagttattgatcatgtttttttttctagatttatgttatgttctaaagaacatgtcaaaacttatccctttaattcatttgagacttatatttattttacgcggagagattatattgtgttttaaaaacataacctgttaaaatataatcgaaggtttgcatcgttttaagttatacattttattgatttatccgtataaaacatgaaggataattcgtcattttaagttatacattttattaatttatctgtataaaacatgaaggattgagcttcttccacgctatctctccttgtgggtgtacccattcaaacccttgaagaacatataggaggagatctcgattcaatttcttattcaaggaatttgtaaactacataaatagctaatcaagtgcgcacatatgtcctagatatcttaccgatgcgcttgcatctagccgtcgaccggccgatctcgtctcttcttcaacccttaaccatgtcggtgcttatccctttgtctcctttggtgaaccatttaaagtcctagaacaataatgaagtgaaggtagagaagaaaggatacatgatcttttctttttttttcctcattacagatcgaatcgatcgctaaatcaatggagtatccatgattcacgtttttttatctacagcaataccaatctatacaacaataccgatcaatagagccaagtattcaattcatatgaaatgtccatattttactaattaattactctactgccgtcatattataataattttgttccatactttgcccctctcttgatcaatggttcatattgctccacctctaagtacctcgcaaacaccgtgctttatggttatgggcccaaaagttagtgcacggcatgttgagttgaaggtgggtacccacttcgtgtgcggttatggttccctgcttaagagcatcttcaataacctctccaaatgtctatttgtctaactctccatctaatttagctagtcaaactcgttgtttactccaacagcttctccatctactatctccattataagtctatgacaaataggacccatatgtaaatctcttctgcccttcaacggcggacggcggcggcgactcgtgggcgcgaaggcgacagacgtgggaggcaggccgggggacagtagcgagcggtgagtggagacgacgctgagctggcgggctgcagcgagcggatccgctcctcactggcctccctcgctcctccctcaccgtcgtcgccgctcgggccgcgtccccatccgccggcgccgccactcgggccgagcttgggctccatccccatccgccctctgctgccgctcgggctcctcctgctggtgctgctctggccgagctcgccgtcaagccacatcgccaccaccaccgacctcactgtcgagcaaagccgcatctgctactccctccatcctcgcccccatctcgtccttccacgagttgatgcggggcagaggcggcgctaggagaccggcacccaccaccatgtcgtcccgccctcgtcgtgccctcgccgtgccgccggcgcgccctcccgctcttgccctcgccgtgccaccgtcaccgtcatcgtggtctcgtggtggattcggctagaaccttttcatggtagagagagagttgtggggcctacttttggcaagtgagtttggatggccaaatttgaccaatgagtggagagatttggccagccggatggcttagccatccagttggagaggctgttggagcatgttattttttgctagagttgtcaaattttaacttggagagatagttagagaggttgttggagatcctctaacacaaccaaaccaacgtatcgtactccggctccggtttcgcgtagtcgcgtttggttaatttcgagctttggactagtcggtaatctctacaccctccctcgtttccatgagttgagacaggtggttactcttttctccgccgatacagccaatagtgacaatcttgcgataagatggatacgtcgagcgtgttcctcttcttcttccctgcctcgcccttaaggacggtgtagattcaaacaagccggtgatataattcagcatccctgagaagaagaccacctgtgacaacatggttgagcacttgaggtgttgaagaacaatagcaacagggttggattctgtgcataatgtcaccacctccatcttccatgtcctttggaccaagattcaactgcctgccacgcctaccaaatactccctccgtcccataatataatagattttgactttttacttacactgtttgaccattcttctcattcaaaacaaattttggaattattatttattttatttgtgacttactttattatccaaagtactttaagcacaactttttatttttttatattacacaaattttttaaataagagaagtggtaaaacagtataagaaaaaaaattaaaatctcttatattacgagggagagaagtactgacttcagcagttgcctcctctccggcacgccttctcatctccggtgctttgtgcttctcgatgagcctgtctcccctgtgcttttgtactgttgtgtcgacgaggagtggacgaggtacaagtacgatatttgggacgcaggccgtcaaagaaaaactgcccatttgcccgatagcagcttgtcaggggaagtttttactttaacggcctggccggctagctaggcgtgctcgagttctgccctgcgcctgtgttcagcaagatcacaacaactgacgtgattgacggatatttttttttcgggtatataaattacgctcatatttatatctcgtcaaatctgacgacgaactctacatggcccgcaccctgtttggatacgacctgaagacaatttatgaagtctacaagatggatttttggctacagcggtgcagcagaattcaggagatcgaagggacatcgaaggttgagaatgtcgacgaacctccagtgtcagatcgattattgtgggatcctgcacactgaaccatatgatatgatactggtttagtggtttgtattgtcttctctcatcgtgtgttcttttgccgtggcttgtaatttgtaaagagcttttaggttcttttggtttatatgtaattagttattttccaggaactaaaagaacctaatgagaagtaatgagaatgctgatgacctaaaaattaatgagaatcgtctgacagttgcttggttatccgaagagtaaggtgaaaaacgaaaagaaaggggaaaaaaagctatacatactcattttcttttaccaacaaaattcttactaacactaatttatcatgttatgagtgtatatagattttttataatttttatctatctaaatcaaatgtttgagatgattgttagtaaatttagaaaataagttattccgtgtagcagtattcaattctcattaattttgacacttgttacacaacaaatgaccaagcaactgttacacgagggggtaatgaaggtggttttcagcgaattacacactgacaataccaccttcatccaaaagttccatttttttttcttccaaaagttattactattttatttttatcaccaaaccttcccaaatataacaatgttatctgagcagccgtgttagtttgattagtttgaaaatcggttttgaggacacactgaagaaaaacccaatctcacgttccaccatctcacaccatgcagcaacaaattatcggcagtactgaactgagcgttatgcaaatctgataagatggggcgatagtgattggaataactgtaattaacggtatggaaagctgaacaatgtacatatattgtgaattgagttgacaaatttagaacagaattcaggagaaggaaatttctgccgaagaattgtccgcagaacatctacgaatcagttagatcctcttctcagcttagccgccaagtagctttcacactaaatctccatgcataaacataatagaaacatagtagaggaacagactgttaaataaagacaaaatactacagaccctcacagtatgacaatgcaagatgaataataaaatataatcagctgcttgttatgcaaaaatcacaacggatattgcatactacaaatacatctcatagtccgcatattgtcattacagccaatagtacaaaataagattttacaggttggaagtgttcttgtctagttctgatcttgtggaataactgctcttttcactgtctcaatagctggatcttgtggaataactgctcttttcactgtctcaatagctgaattcacaactcgaacagacaagtttcacatgaaatcaacatttcatcgaacttttagaatttatatttattaaaaacacaggttgatcaaaatagtgagcttgggtatgcattcaacgaaggatttaacagcactagctctcaagcctggcagggcgaaagctattaggcagtaactgcagatgctatgagaaattttagcatcattaggcgtccatcaacagctcacttacattcagtaaacattaattatagaagtggcaaaacaataatttaaagagaatacagttggtgttgcattgcatcagacatccaaggaaggaattagcagcattagctctcaaacctggcaaggcgaaagctcttaggcggcaactgcgaatgttatgagaaacaagccttgcttttagcatcatttgccatgcagatcaccaatttacagaagaacaacaaataaacttgcatgaagaaaatggctcagacatccaaggaaggaattaacagcattagctctcaagcctggcagggcgaaagctcttaggcggcaactgcgaatgttatgagaaacaagccttaaatttatcatcattgccatataatcaagggaccaaaaaaataaaagcaaaacaaaaaaggttgttaattcaaataaatcaaatgtaatgacagatacgggctctgtagaccgatggagatgcagtcccaggttcctatcaacatgtgaaacgtaggaaaccaactctgttttggcctaatcaaagcatcaccggtcaaagccgtagctacaggtgacgtggcatcaggcccaaactatcacaaaataacagatacaaattctatattattatgagacagcttcgcataatccctcaagagacccgtttaaaatcacacacacagctgaattaaccaattgcaaatgggtactccatcccagaccaaaccacaaaggttatggtcgaaggatggacacttgcaaatgaaaaaagcagctgctgtttaaagtgtcatacggcacttcctatggtcatagaatcctcactgggactagattgcaactcataatacatgaacaaaatctagatctttatacactacaatattactggattataaagcctcaggatgccagacaaatgtcgtcatttgataatctgacggtaattccaacaatatgctaatcatcataggcttaaaatcgtagatataggaaggagaaaaaattatagaacacgcaagatttaaagaaaagaatataaaaatgatctttaaagcatcatcagaaagaaaagccttctcattcacagtgttatagcactgtgtcagaaggtgtcctaagattgttataaggtttcatcctctgatactgtaaaaaatccacataaaaccataaacgataagatctgttctgtgattggattcagatgcaaagatgtgtaacgtcacatggacgacagaagccgtcctctgatcaagtgttggattatgcatcaattacctcctcacaatccaaacagatctaagaaaaacaacagaaaaaacatagcagaacaaattgaaggaggatttcaagttactcagtggtggctttgttaattggttcgattctgccagcgagtgtcctcaatgccttcagaagagggagcttaatatcctcatcgcaatagactcctccagtgcaaagaacacgaatataaaccaataaggaatcgagaaagatagcaatttttaacagaaaaacaattaaaccagataagaaaaaagagcaaaatcagatggctcggttcagcggaaaaatcggcatacaaatcaatccctgaggagtagatccagagagaaagacctgtgatttggtctgttgagcttgaatattaccaggtcgtcactgccatcgcatcgcttgcataataaaacaacaaaacaaccgtgaaaaaaaagatcaaaacgaaacaaaataaatcgcaggatgcagaaaaaagtgcgcaagaataagcggatctggctgtggctgtggtagggagggactggagggagattagggatggcaacggggctgcccccgtcgggtttgtgcaccccgtacccatccccacagcataaaaaacagaacgttccccttccccatccccgcacagggggtagatttcccccgtccccgtccccgcagcgggtacggggcacccgccgggtctcagcacccgaaagaaacagaaaaacagcaagcaagcaacaacaggattacaggaagaagaaaacatagtaaacttactccaacaaacattaaacttaacaagttcatcacataaacttaagcagtacatcggtgcatgcatagcatcatagcagcacatcacatgcagtacataacaagctcacatgttttggagttcaacagagtacacatcacatgcgacggcggctccacacacacggcagcggcagcggcacgctactaacctacgacggcggcgcagggagcttcgaggcggcgacggcggcgcgcggcctggaggcacgtcgctgcctcgctggctccctggcgtcgcctcgcctcaccaatcggacttctattcagagaaaagagaggaatggggaattagggatcggtagatgggagaaagaaaaaacgcgatgtgttttctgtgcgcacgtggttgtgagcggcggcggagtgggggtgggacggcatcacgggattagggtttttctatatatattatctctaagtgggcctcatagttgggctgttattttttagaatggactgacaccctagggatttgctcatgggctgatatatcttgggccccatggggatacgggccggggagtggtggaacgaccccgtccccagcccacccgatggggcctaatttcaggggttaattagatccataccattaaaaatttactggttttaaaatgtcattactatttgcatatttgtaacgatgccattgctatttgtttgtaatcttaacggtgccaccgaaatacgtattttgcatatattagacgaaaatgtcctcatcttctacatctctctcttccacatcttctacccctacgccgcctgctccaccaccattgctgccgccacgtcgctcactccgctgctcctgctgcttgcgctgctcgccgcgccgtgtgccgctgctgctgccatcgcggctgctgccgccgccgggctgcgcgtgcgccgctgttgctgccgccgctcgccgctgcgctgctgttgccgccgccgggccgagccacgccactgctgcagccgggccgctaagacctgagaaggaagagaggaggaaggagaaaggggaagaaggaagaagatgggaaaaggggtattttggtctttttttttaatgtatccaagggataagaagtggtatcttttgaatatgtgtgaaattataatggtatatttccaaatacgcaaatagtaatggtatatttcaaaaccaacaaatttttaatggcatgtatccaattaaccctaatttcagccgttttctacccccgtgggggatgatttcaccccgttaactcaccctaatagaggaattctccgtcggagaccggggaacggggccccattgccatccctaagggagatgcggcgtacaacgatggggaaaagatgaggaggagatttgctgcggcgggggtggaggcagcgatgggaataacagctgcgaaggctgtggttatatatgggacgggatggatgatgaattagggtttagggttcgaggggtggagcttctggattcttcagtcgtggcggctagttgggccgtggccagtggattaggctaggccgtggcggcgggttgaagctgtagaattgggctccgacttgcgagacaacctcaggccggctgctaggatggctttctccaataagatgggagtatggcttgcaatatgtgagagatatcagaagtgtggtttcatcccacttggcatcaccttttttatgaggctataccttgcgttggccatgcccttagcccaaacaagcatccatagtggacctaacttggatggtttttgcaaagatgagaagaagatttctggtattatagtttagggatgtcaagtaaattcgaggtaaagctgagggacgacgagtggacttattccttcttgtgctgataggggatttttttttaaaaaaaaaggttaagtctgttttacaacaaccccttcaactacaaaagttcgatttacccctctcaaccacaaaaacagacaacatacacccttcaactgttgaatatggacacttaacccccttatgccctctttctattaagaaggaaccattgtgggggtagattgagctccctttcagatagggatggcaacggggcggggcgggccgggttgggctggaacaaccccgcccccaacccccgaccccgactcgagatgtagggccaaatcaggccccatccccgtccccctccggggccccgcattaggtagcgggaggctggaggggagagggagagggcgaccgggacggcgagaccagagtgcgtggttctggttcatgggactcggagtccggaggagaagggagggagcgaacgactgggaatggcgaggggatgcgtcatgcgtggtgccggtgcgctgcccctagcgtcctgccgcctccctatatgtgatatgggtgcgcgcacgggagatgagatggggagaccagagactgaagagataaggctagggtttcgtgtatatataagtattttattggattgggctcttttagaccttatatgggctacattgtgagggttaacgtacacccgcggggggcccgcgggtgaaatgtcccccgtcccctccccacctaaatgcagggccccggacccgactcccccgtgggtcaaaaaatgaacccacccccgctccctagggtctggtccctgcaggggacctggctccatggagaaattaccatttctactttaagatatgtatatggtgttattgttggcacaacggagcttcacaaacatgacgccagtgagcgaaagggcctgtagcctagtggttacaagagcctcagtagcacctgaggtcctaggttcgactccccatgggagcgaattttacaggatttaacggcgttgtgctttcagtagtaggcgatgtacccgtcgacaacgaggtgcctgtggtgactttgtcaatctctccagaatttgccggcccagtcttcgaagatgctcataggggtagggtttgcgtgcgtgtgttcatagggatgagtgcgcgtgcgttgtgagtgtttgcgttgtactgtgtaatttaaaaaaaaatgacgccagtgacagctgccagtgacgccagtaaactaagctagcccaccaaaaagctagtcgagcttcacaaacagagcttcacatatttattatgacctttttacacattaaactaaggaaatacatagcaaaacgacaaaggcaaaaacatcaagagcagtgctcaaatttagaccacatatcattgttttctgctcgctagcttaaagtagagccaaccgaggctatggatgatggatctgtttggtgcctcattttgccacactttttttttgcgaggaattttgccacacttaagttatattagtttgaccaaatgtttcttaaaagagaaaagtttgatcaaatgtggcaagtgtttgattcatttccacaactttgacaataccatactttctattttttaaatcccactgtaaactcttttttaaccaaagcttattagaagtgagatcatcaatttttgagccacaccttttgacataaaattgtggcaaattaaggatttaaggtggacatccaaagtccaaacagacccatatcctatcttactttaaagttataacccactaactcctaaagcttaaaatacaaatatgccacatcatcatccactaacaagttgacacatcatcatccactaacaatcaatgcatttagtatcatacaaacatgctatattatctataatttaaaatttattacattttagagcttttaaaatgaaagcatgttaaatcatcattccacataatttacataatatttcggaaaaagtacgaattaccccccccccgaactatcgcggtcgtccgcattacccccctaaaccacaaaaccggacattcttcacccccaactatgcaaaccggacgaattacccccctcgatccaatccgtggtggttttgatctacgtggcgtacgcgtggcagtccagtcagcattctatttataaaaaaatgtgggactcacctgttatatccttttccactcttcccctctgtaggatcgagatgtcgactggagggggggtgaataggcaatttaaaattaaatgacacctaatcaaaactaaactaagttgctaggctcggtgagggacaagactaactaagcaactaagttatgttttgcaatcctagggtgaaagtggctcaagtatatcactaggaaagtaaatcacactcatatgtcaatgtttagcaatcctagggtgatatgatctcaagtatgtctctagaaatgtaaattgcacaaatgtaaatgcgacaatcaaatgagacaatgagataagagatttttcaccgaggttcggaaacacgccggtttcctactccctgttgaggcgagcccaactctaccgctcaaccacgaagccaccgcacgcccccttcgtcaaggggtgggcaaggcgggagccggcccatggagaggactacccaagcctcgatcactcggggtagttcttccttcactccgaaggtagtgaactccaaaccactcacaaaccggcaccgggcctcctccacaatcttctcggagaggtcactaggcaactcctccacaagccgtctaggaggcggcaacctccaagagtaacaagcaatgacccggcgtggagatgatcaagtgccacactagctctacaatggaagcaaatgcacttgactcttggctaaaacaacctcaaccactacaatggatgaacactaagctcaaaggtgtgtgagagagatgcaagggattatgcaattgaattgggtgccaagaaagtccccttgctgctggagggggagtatttatactcccatcaaccaaaactagacgttgggggcggaatcccccaactcagtgctctgccgatctgaccggaggtatgtggccggtcagaccgtgctactgtgcaacggttagttttctagccgttgcagggctgacactaggccctactgccctggccggtcagaccggcctcggctcggtcagaccgccatcagctcggtctgaccgaatacggctccagcggctcgagatcggcacaccgagacggcaccatcgccatatggccggccggtcagactggcccgcacctgccggtcagaccagccttgaggcggcggtcagaccagctctgactctgcggtcagaccggctgccctggccggttagaccggcactaggtccacggtcagactggtccttgtcaggctgaactcaaacagagaaaaatgtttgtgtgtgtgtgatgaaatgagagcacaagtctaaatgcataatgacctaatgtggcaattaaaatcatctctttgctaggtcattaccccacttaatagtacggcaaggctttaaataaactagcacaattttgatcgcccaacgcctcgatcaatttaaaatgaaaacactagtttaccgtcttctcttccttttgctttgcgccgtcaattttaatccatcaatgatcatccatgtgcacacaaataagtgaacctaactcaaataaatagctcaaacacaacggttagtccacaattagtgcttgtcattaattaccaaaattaacaccgggggcctagatgcttcatcctttctctctctcttcccctctcttctctctctctgtctcactcttcccctctctctcgcgcacggtagcaggcgggggcggcggcggcggcgagcacgtacgcgaacgggtgccggaggtggcggcgaggacggcttcgtggccaagacgcacacggcagcgaggaccgcggcatgcacagcacaacggggcagggcgcgaggaggcgacgcgacggcggcgacacacaggcacgcgggcgcagagtgacagcgtgcggacggggctccaggtgacgacggcgatgggcgacgaacgatggcgcgcggcgtgggcggggctcgaggggagataacgacggcgcgcggcgcgagcgatgatgacaggcgaagcgacagcgcgtggcacgagcgacgacgataggtgtcacgcccagaaattcccgaatagaattccaagcagaatgtgcattaaaacccccgtccaggacaggccggggtacacaaacgacaaagttgacatatagatccacgtcttacaaacattataaaagtcttacataaatgcagcggaaaattaaaagataactggagctaacccttgacttggaccgcaacgggaacaccactccacaggcatcctcgacggcacgaacggagcctactcctcggagaaaccgccatctgacacgtactcaaactctggtgttttggggaaaatagagcaagcctgagtacaaccaccgtactcagcaagtcataccggaataggggtatgatgcagggtattaccaatggatagctagagaggttcttttgcataaagtgagcatttataaacagtagttgaaagcagtataaaaattgtattaattacccaatattatccatccactgtccaacgctacaccatgttgcaacaggcccaaccatccacctgaactaatcaattccattagactagactagggtgagactaatcacagtgaatctggttgaccgcccataaccgcgggcatagctattcgaatagttttactctgatcagatgtgtacaactgtacccacaagacacagccccacgacgcgttctcgtgcgccgacatgccaccacgacataccggatagaggccgtgacaggacccttcgcattaccccctctaaccaagcacaccacacctcaggtttcacccccactcctcgcaaggcagcgggcagtcccctttcgtgcctaggtgaatccggaagccgcataggccgtcgtagggcccatccaaactccatcacgcccacccttgcctggatgcgtcagctagaggaaagctacactacaagcccagccgttgcccacgctggcttgtggcaagtacgaggaattcttccagggtttcccacaaaccggtccttaagtgccatgggcgcgaccatcaaaaccatgcacccacagcccagcaattagtatattttaattgactaacaccaagacggtggctttactccaccaccaacactagaacctgaagtctaagcattaatgtgatttcccccattgtgtgctagttgaactaagcaaggctaagcaatccctagtccaatctctagtcatgttatatcccaagctaacaaaggagcatggtacaaaatagcatggctgtaacagtaggtaaacatcccgtagtaacattataaaacaatgcagtatttaagggaaaatagtagagcatttgcaatataggattaacatgttcaagtgacaagcatgacttaccttgctctgctgctggaggaacctcggcgactatttcaaagtacaccagagcgtcgggagagccggaatctaagcgacatacaaagcaaacaatacaaacaggctataagactactgaaacagaaaatgatgaactnctgtaccatcggttgtcgcacnngtgccac

SEQ ID NO: 27967 - DNA, 12188 bp, Oryza sativa
  unsure (1)..(12188): unsure at all n locations
cccacgcacgtgtcaattgccgnanactacgtgctcttctctctccccgccgaccctgttattgctgnttttctttncccctcccccccccccccccnnaaggagatgatgccatcgctggnacanancncatcaggcctcaccgacgacgattgacgacggcgagcgacggagggcgatggcgacggcgggacgagctccaggatcacctaaggaatcaaaaggggggagttagagagggagagggaaaccatggatggttagggcgccgaccgaaggcgccggccatggcgaagctcaccggcgcgcggtgcgaacggggttcccgcggcggaaaacagcggcggagaggcggacggcgtggccctcgggcttgtgaactcgacgacggcaacggcgcggctcggcgtggcggctagcggctaccagagcggcggcggcggcggcggtgaagaggagggcgacggcgctagggcgatagagggcacgagagagctcggcgaaatggagaaaaagagagagggggagagcggggatgcttaaataggggagagggggctcggacgtggctgggagcagcccgatttcaccggagtagtggggagggggagagagggcgtggccgatgggattcaaaattgaatcccggccgtttcggcgcgggcgcgggcgcgggcgggagagagagagggagtgggcgcggggtcgcggggaaagtgggcgcgggcggcgacgtgggcaacgtggcccgagaggcgcgggcgcaaggaggcggcgacggttgcgggatgcgcggcggcagctggaggttgggggaggacccgacaggtgggccccacttatcggcgaccccgggagagaggagggggctcgggcggccggcccagcggggagggggaggaggaagagaatgggccggcggcccattcggaaaaaaaaagggggaaaaagaaaaagaaaaagaaggaaatggattttcctgggattaaatattgcttgtgctcatttttaattggttgcaattagttctagagctctgaaaattgcactaaaaatcttgttagcatatttcgatatgtagaactcaagaaaaattccacatgccaattccgattattatttgcattaatttattagggtttctctcttgcttttacaccgatattttctctaggtgatttataaattcaatttaagcttgggaaagaactttagggtgtgacaaacgcgacgcgacggcacgcggtggcacggggtgcgaagaggcacgacggcggtgattgcgactgtccctcctcgagttcctccacgggatcgatgagctgccgagcaagctcgagctcctgcatgcgggatcgacgagccaccaccggcgatgccgccgccgccgtgtccttcctcgtcgacaagtcagcgaaggtcttcatcgccggccaccgcatcatggtcggctcggtggtgcaccgcaagctggactcgctggggttcaccaacatcgtggtccggactcgtgccgagctcgacctggcgtgtcttcttcgccgccgagctgccgcgctacgtgatcctggcggcggcgaacatcggcggcgtccacgccggctccgctgcaccagcggagtacctaacggagaacctccgcatcactgtcaacgtcgtggacgccgcccgccgctgcggctccgcacgcaatctgcttgtcctcgctagctcgaccatctaccccgcggatgcgccgcagccgacgcctgagtcggtgctgctcacggggccaccggcggacggaggtcgaggcctcgagcctgcggccggtgcgtgccgccgtcctcgccgccgcctgtggcccccgtccgcgtgcgtgcgcgtcagagagagaagagagagcctgctgccgtgcgcgtcaaagagagtgagatgggggaatagtggaagaggatatgacaggtgggtcccacattttttaataaatagaatgctgactgggttgccacgcgtacgtcacgtagaccaaaactaccgtggattgggtcgaggggtgtaattcgtccggtttacatagttggggggtgaagaatgtctggttttgtggttcaggggggtaattcggacgaccgtaatagtttggggtaattcgtactttttcctaataatatttcaatatatatcttcattattttttataatatcttatatacctttataatatcttatcacttggtttatgttatttctctcttctttaattaagccatatcacatcaactgattctagtgtttatgtaagtttatattgtttagctatcttatatattattttattattatcatactaaactcatgcagcaacacggggggtttcacctagtatctgtaagttttgcacaccacccacattaactccattcttaggtggtcaatgcgtatgtttcggtggtgtttggatcagcgactaagtccatgtcacatcagatatttaacactaattagaaatattaaacatagtataataataaaactaatggcataaatgagagctaattcacgagacaatttttttaagcctaattaatccataattagcacatgtttactatagcatcacataggctaattatggattaattaggctcaatagattcgtctcgcaaattagttcggagttatggaatgaattttatcaatatactacgtttaatatttttaattagtgtctaaacatatgatttgatggcaactaagggcttgttcactttgctaccattttcaaccttacgaagttttggcattgccaaatttttgttaagattgctaaaattttggcaaggttgacaaaatttggtaagatttcatatgtacttactaaaatttagcaacaaactaaatgtagctattttttttaattttttaaaaaatataaggttgaaaatggtagcaaagtgaaacagacatgcatccaaacagaccctagtggcgcgccgcctgccggtggtaggcgcgtacgtgtccctgtgcagcgcaccgcgcggcatcagaaatccactagtatcggatatttttcctctgtgcccatcagcaatttcttgaaaagaaaaaaaaactagtactcctagaaaacatcagctccactacttgctgtcttgctgccgccacgctgctcctccccgctccaccgatcggaggaactcaggcagccaccacttcctcccttccttccttgctcagctccgattttatccaacctatccatctatattttatccatccttcctccgtcaccatcagctccccgcgcgcgcgtgcatatccgcagggcgcaggcgatgctctgctcggcccgcatgctggcctgcagcggcctcggcggccccggggggcggctccggccgtcgccgcggccgggggcctacgctgaccggctgcggccgccgctgccggcgcgcaggtggcgggtcgcgtcctccgccgccgcgtcgggcggatcccccgacctgccgtcgtcgtcgtcgtcgtcctcgccgcctccgacgcctgcagcagcgtcgttcggctctggtgatgagcaggccgccggctccccggggtaaatgctttttctacgatcagtaggtgtttttttttggggggttggtcgtgggtcaatcacgctggatggctgagtgttcttgagcttgaccccccaatatacgctcagtactgtgttgaccagcatacaggggattgaggggagaaataattcgaatagatttagcatatgcttcatggttgggacgaattctctgttgatagagtttgtctgaatatggtggatcttgctgataaaaaaccgagtaccagggtagctatatatatatatgatatgcttgcctcagcttcgctgttgatggaggatgtctgaacatgccggatctagacgataaaaattcaagtagtttttgtagcctttgcttggctccttccgtgttggtgctggagtacgactgaacacgttaggtggatctagctgacaaaacgttggtcccgaactctgtcgttttggacctttagagatgataacattttggtttggtgttgtattgcacggagctcatgttgagtcatgcccggcttgttctcaggttttgtatcattgaagggcctgagacagtccaggattttgaaaagctggacttgcaggagattcaggataatattaggagccgccggaacaagatcttcttgcatatggaggaggtatgtcgactttgttttttctatgttactgtttttcattaaatggcaatagtgtaagcttggtatgatctgattatccctcacaaatagttaaaatacagaagataatgtgtagtccttgcttggtaatcagcatatgagttcaactaacgtggagatggcaatcctctgagctattacatagtacttttagattgtttacgcaatgatttcacagcttgcgccgttgttagttaatctttattctagatattgtgatattaaacaggtgtgttgcaaatcatcagagaactggaaacacccgttaatccttttgaataaatctggcacatcttctttctgcatgtactttagattgctttcagtttgttataccttctaaagttcttctgtgcagtgtcagatgtgttttgtgctgtatccttatttttctattttcgtgtacgtagattcgcaggttgagaatacaacaaagaataaagaatgttgaacttgggatctcagttgatgtgcctgaaggggaacttcctgattttccatcattcattccattcttgcctcccctggtaagtatatatacttctacatccagcaccatctcacatggttcatatttaaggagtgtatatatgctattgatattacttgttgaatttgaagttccaaatcagctcattactaatggttctcttgctttaaacagagtgcagctaatctcaaaatctactatgctacgtgtttcactttgattgctgggataatggttttcggtggatttcttgcaccaattgtaagttacactgtctagtccttgtcaccatttttatcattattgattccatcaatatccagtggatgtttaacaatttattgtacttttcttgcagctggaacttaaactcggtgtgggaggaacatcttatgcagacttcatccgcagtgtccatttgccgatgcaactgaggtattacaactattccatgttctattggtgtagtgaacatcttttaaccagttcttgataccagggaagttctgagataccgtgtgctgatccttttcatgatttttctatctgtacagtcaggtagatcctattgtggcatcgttctcaggtggagcagttggagttatctccgctctaatggttgttgagatcaacaatgtcaaacagcaggagcataagcggtgcaaatattgtttaggaactggtacttatttcttccaatgctgcttcaatcctcgtacccataaaatatgaataaatatctaagatttgcacttgctgttgtgttttggacttttggcagcgcagttcagtacttcaatgcagtacaatttgtgctttagtaaaatctctccattatgtaaagaaaaagtttagtacttcaatgtaagaatgctatactagtgttagctcagtccaaagatgctcacaagaatcaaaaaatctcagaatgaattcaaaggtctgatagcttgtaatgctgtataatgcgtctaatttgttagtgcctagttattaagcttgtttttatggacctgttaccaaaaaatctatcccctctaagaaaattttcttatagttgctcaattgctataggtttaattgtttaaactacagctttgctagggtactgacagttgtggcttgtaggatacctggcctgtgctcgctgttcaagtaccggaactctggtgcttactgaaccggtttcaacattcagcgatggtgatcagcctttatctacgccaagaacagagaggtgcccaaattgttcaggcgcaggaaaggtaaatcagccttttgcacaatgattcccaacaacaatgtcattcaaataatatacgcatatttccacttgctattttggattgaaaaacagccctgatttcaaacaaaatgtttgcaggtgatgtgtccaacatgtctctgcacggggatggcaatggcaagtgagcacgaccctcgaattgatccgtttgattaaaatgcacgtcatagttcagaaattcttgtaccactatataaactgtttgtagataatagtattgacaggcgcgcctggggttccaggcttacgaatagggcaacacttcacatcttagtgatgtgcggagcgaatcgcttgaattgaacagtggacaattcagaggtgtatgttgtcaaagctgtatcactgtatctgtatagtatgtttatggcacccaacactaacagttcaattccacgaattatttatctgcgttttgcttgcttttcaatggtcttttgtagaccttcgaatgtgttggcttggtgcacattttttatgatttagcctagctgcccatgatgctctaaatgtagttacagtttatgcgcgaccggagaaaacaagattataagccgctacttaaaaaatatgggtaaaacttttatatgctcttttcatcccgtttgagcatcacctaagattttttgtcttttcaaaatgatcagtgtctgtttatttggtgcaagtgccttcttatttatttgtgcaaagagtaaataaatgaatattattgaatacgatgcatgtaaccaattaaaattaatttatattggtgcaattccgtgcaatatttaaaatttgatgtatttcacgggacatgaagcgacgtagcactttgatcgcgagtattaatttaagaatgatgaatgttgcgttgttcacttgtatgctgtttgtttagtgatgatcaaactgggaatatttcttcagcgatctaacgatgaaaaataaactatgatttaaaagccaatgatgaaaaataagctatgatagaaaaactttaaaatcagctttaaatttcaaaattcaaattgcagtagcggctgataagccaagaagactaatcatgggagttcttcgttaacttctagttgggccgtcgaggcaacagtcgagtatccaataggaaaaagtacaccgaaggtccctgaacttgtcatcggcattaaaaaatgtcctcgaaccgcaaaatcagatatacaggttcctgaactgtacgaaaccggtcgcccgaggtctttttggtggtttttaccccggtttttgtctacgtggcagctgagtcaacatgggccccacatgtcagcgtgccacgtcaacttcccctttcccctcttctctctcccttcctcccctctctgctctctctctctctcgcaggctgggccgacgggtagggagcagacggccaggcggcgagcggggctgagcggcggcgcacacctcgcggatcctcgcttcgagcctcttgacctgcaggcaaacagtaaggagcagcagcagcaccatcagccggaactagcagggacggcgggatccgcgaggacgccggattggtggggacgcgatgccacaccgactccaccttgatggtgtcgatgccgcaggcaagctcccccacgacgcccatgaactgcgccgcccacggctcgttactcgcaatcgatctcgcctacacttcccatgttctctgcatcgatcaatctgaccttgtgactgcatgcatttctagctcccagctacctgtgtcaaacattccatttgcatgataatagcatgctagagccagataacaagaacaaattaaccgatacttgaagaactgagacaaatcatcgcgtgcaagttcaactgggcctctttaatctacccatgacaatactgtcagccagggtcaactagtgcttgggttctcctccgctcaggccccgtcgttcactgagctgctcatcactggggtggtggcgtcggcgggcggtgacgccattggcaaccgcgagcagagtccagtcttcccaatctctgctccgaaggatctgcatgctcgagctcttcagcgcacaccgcgtctagtcgctccaccacgtccgcgaggaagaggcggcgcgcctcgtccgcgtcgtcgccaacaagtgtgccatgggtggcgtcggcgtccttcttatactgccgctgcataatgtcaccgctggggccatcagttgcaggaggaggcggcgtcttctccagctccttcgcggccggggaacccatcgccttctctggctccgccatggtgttgcgtaccgtgaggccataggcgatttgggaggaggggttgtcgggggcggtggatgtgtcgagaacgaaggaggggtcgccggcggcggatgcggcttctccgccatcccgcccgccacctcaccgcaccgcggctgctactcccgcgcccgccgccgttcctgctccctcctcttctccacggccgacgacctcctcagcctcctcgacaacgacaacgatgccaacccgttccccgccgacgaccccggccgcacgcgccctagcgccggcatcccgatgccctgcgagagcagagagcgagagggagggaggaagcagagaaacagagaaagagaagaggggaaaggggaagttgacgcggcaagttgacatgtggggctcacgtggatctcatgctgactcagccgtataccaaaaccgaagtcaaaaccaataaaagatctcgggtgatcggttttgtatagttaagggacgcatatctagttttgtggttcggggacgtttttctatcccgataacaagttcagggacctttggtgtactttttccgtatccaataagaaccagcccaccaacgccaagtatccatgcccactcatcttcttcctccaggctcccgcagcctttcgcaccagcgcagcgcgcctcctcgccgcccccggccaccctgcgccgccggccgccgcccgccggcgccatactaagagggaagagtgggtaactgagttccgacggccggaggcggggccagcggtggatccgattggccccttctggcctctgactcgatccggttgagatagtggtgaggcgatggatgcgctcgtggcgaactacgcgtccgactccgactccgacggcgatgctccggcggctaccgcgggcgaagccgccccggtgcctccggaaccttccgcgttgctccctcccccgcccctcgacctcctccagcccccaaacttcgtaggcatgattgatacttctttaccgtactgagcctttcctcaattcttattctgaggccccccggtgatgtgttcttactgaagttttgcagattgctcgacaatggcgcaggggagtcgcgtccggagcttcccacatgtggaaggcaactatgcgctacatgtttacatccctggtctgttttctctctttcttttctcttgatctttctatatctgtttgtgcttaggtgaatgtaaattattggtcgtttatcgctggttgcatgttaccgcaaggttagttgcttttccatgtgaataggcatgcttatattgcttaacaccacgatcagatgtgtaggagtaggatctattgcctagccctacctatctggtttcatgggttttccttaggaaacaggatgcattctgaggacattactgcatgtttgcacagtacatatactgatataccgaaataagcatgcaccttgccaacattaagcgacgaagggcactttctatatgttgctgttgctgaactgatttttcagcatgttcatcatcctaagttgtagaattagtaacatagcaaaattttagtaacatcattttcccttattctgtcatttatatagtgtaagggggaaatgccgttgattcagttcagtatcatggtttctttttttattgtattgaattgaacagaaaacgggtagaaggattcactttctcactgttggacatgtaaaattttacgtcctgaaaggcccttgctcttacatatagatctctctcgtgcagttgtcataccttctgatgcaaagaaacacctggtccttgttatgagaagagccgcgtcttttgtgccggatctctatgccatcgatgcagattatgcactttccgagttgtgcaaggatgaacaaaagcttgagaaagtgcttctgagcagggagtttcatgtaagtttaggaagaactgttgcaattcaggtgcatcaaattgagtcccttgtcgcaatgcttcggcaaaagttccgctcacagcaacggttagtcatctcttatacctttattgctgagttcttactatttaactcctttcagtggacagactatgtgtacttgtctacagattatacttgctttatgtacctatttgggtataataattttttgcactgatagaattgactatatattaatcaggtattggatggacttcaacaaatgggagcattttgtcaatgatgattgtacacggtcatttctttcgctagaagttacaagtactgggttgccagaggtgcttaatactatctacctagtgtcctagcatctttaggcattgtatggatctttttactaagtctgataataaaaataccatataatatatgttcttatatgtcattaatgaaatgcactattaacttactgtttgttaaacttttgcagattagtaaacagataacgatggtagatgatgtatatcgattacatgggcttcctgaattctataaggtaatatattctttagcaatgtttgtgctggtgttctgcatattttacttgatgggtaccacatcacacatattttatggtttaatttcaaaacatgcgagcaacataattgcaacctaaaacagaaatctaatacactgctgcaatataaggggagggcggtagtgtactataattttgtttggtttggaacatctgtctgacagaatcagtcactggctgattagaatgattatagtgtcccacccagagtatcactaattcattatcatctgtagcatcaccacatttgtgcaaaattatttaactagtgtcttgaacttatggcagaatccacggccacatatatcactggcgtgggcattgggtgatgttagctgcaaactgaaacaagcaattaaggagatcgaaaaatctcagagcagtctgggcacatctcaaatatctaatctgagatgcaagtttagtcatgtagtgtgtaaaataggcaagaaggtgtatgatatctgtaaacttgcagactgagagataaatttcttgtgcacttgaccgttgagttctggggttgcaacagagatatacaaatgagcatgaaaacagagtggaagtaacttggaaaaactacaatattattcatttggttgagagttaaaacttcttgccagcatgcttctgatcaatggttgtatatcttttgatgtacagcaagatagtgtgcaggctttccattccaagaaaggaatgatggccaaaatgatcacaaattcacaatgattaaatgactgcatgaggtaaaacaaaatctagaacaaaaaggaagtctctctaagagcaactttaatagtatagcccactactagctccaattcatctatagccaatctaatagccagttcatacaatagtcgtcccccctgtactattaacacacggccccactctttcatatgcacatttcatcttgttctccgccctttctctccttccccactctatcgccgcacctcattctcatcactcttacccattctcacgtctttatcctacctacccctccccccctcgctactcactcgggcctcccatgtcttctacacaaccctccctcgaccccgctacccccattcattccccccttctccccccttcttcctacgacactcccatctaatccctccttctcgcgttatcgactacccttcctactactcgtactcccgactacctgcaattaatagtcactgcgtttatacttcaacggaagcccacactcccaaatctggggatcaacccaacactcctatctcccaagcctttttcttaccgcccctcattccaccccccccccaagcatttcctctatcacacctccctccactaactcg

SEQ ID NO: 27968 - DNA, 6059 bp, Oryza sativa
  unsure (1)..(6059): unsure at all n locations
aataacagcacttgtatacaaaggaagatatattgccgccagagtttctaagatgcattgtgggtatgcgaggtggggccatattctatgttgtatggnnnccacctattgaatgaattggttattagattggctatagatgaattgtagctagtagtgggctatactattaaacttgctctaaaaggtgcctttagttagaattccttgtaaatnctagtgacaaccaacactgtaccagattgtgccaatatattaccgaatgaagattttgaattacaaaattgaggtgattcctcaacagattctcatgcctcccatcccctcaacagagtagcctttgcaacccggttaacccccaaagtgaatgcccccatcctaaggttgcagttttgggatttgcacatgtccttgatgttctgaaaagcgttcttcatgtacttttggagctccctgttcaccttctcttcatcccacatgaagccctgaatgttctgcaccataggcgtagcacaaacatatgccattagattcatgggaaagatccaaagaaggcacaaaatcttctgttctattacctgaacccactcaaaatagctgacgaccacgccgcctgaatttgcatagatatctggcagcacaatgactcccttctttgcgagtatcttcaaggcagagagtaagctcaaaagattagaattataaataaattatcattcttgatgtcttgaggatattcatgttccttgaaggagagagagagagagagagagagagagagagagctcattgtggttttgagcttacctcatcagcttctgtatcagtgggatgattagccccctcaattatgaatctggccttcacttcagctgcattttctctgcagataactcatgtgaattagcaattctgcaacatgcagctagactaaggtagaaaactaaaacagaaaactccacaatacacagctaacaatttttggtatcatgacaccgcacacactaccaaataccaaggtgccaatatttatatgaatggaaacacaggaaaatataaagcaaatctcatttgcagtttacaaacctagaaactaccataggataaaaaaaaactgacgtctaagatttgtcctcatcaccccgagtaaaacttttactctcagatttaataataagtaaaaagttttattgggagtaaatgctttactcagaatatcttagacggtttatttttaattggatcctacgttagtttttaggtttgcgctacatatgaaatttgtactacatatttctttggaaacactacggcctaataatgagatattggaaaccaggtgaaaatgtagcaaaaacatcaatcaaattaccataatacgagattcttttatcaaatgcagcaatgcgccgttcttacatgttgagaacaccacccaaggcgcacgggacgagaacatcacattcatgcacaagcagctctgcagcgtccataacttctgcaccgtagaagtcctccaaagatccaccctcgctcctgtgcttcaagagagcaggtatgtctatcccggatttatttctgattgcacctgttacatctccaactgcaactatcttgccacctttctgatggatgagcttggctgcccaagaaccaacattccccaaaccctgcagaaaagattagtagttgatcaagtacaaagttatacaatttttggcatcctaatattaacatattgttaagtcaatcaataatgttgtcattgttacctggataacaaaggttgatcctgaaattgactcgctgtattcagtcaataaagcctcagtagcatacataacaccgcgaccagtcgcagcatctcttcctaaggatcctccaagatcctatatcaaataagacaataagttaagttaatgataaaatatgaagagtttgtctagatgaaataggtttttcatgactcatgtaaactcacaattggctttcccgtgacaacagctggggaggggccatggaactttgagtattcatctagtatccatgccatggtctgtgacagttgaaaataaaattttcagaaacatgtaaagaagaagcagagtatgaagacagcagatgataaattataaggcagatggaattggatgactcacctgtgcatttgttcccatgtcaggggctggaacatctgtattgatcccaatgaggtcatgaattttctgggtaaacacgcgcgttaaacgctcaagttcacttctactcagttcaccaggagtgcacccaatgcctccctttgctccaccataaggcacagcagcaacagcagtcttccatgtcatcagctgagcaagtgcattcacttcatctgggtcaacctgtccagggagaaaccttgatggttacaatactaatcgatccttctaaagacctactcttttggaacgcaagaaattttgtagtttctaaaggaattggcagaaaaacatcatctcctcacctcagggtgatacctgatgccgcctttcatcgggccacgggaattgtcatgctgcactctgaacccaacaaacgtcgccaaggtgccatcgtctttggggatggtgcattcaacctgaacacacaaatgccaatggttcagtgaagccgatgtgaaccactgaatcaagcatcaaattgcgagaaacagagaagcaggaaatcacacaaatcacacagagcatctatcaatcaatctatgcaatgcaagcagggaatcgggtaccttgatctcgcggagagggatcagaaggctcttctggagtttggagtcgaggccgagtagcctcgccgcctgccggaagttgcggctggtggcggctagcgcgttcatggcagcaccggagatcgccctctttttctcacagaattgcacgaggattcgacggaaaacaagcacaagaacgacgagaagctcacgagacggaaatttggcgaaccaaaggcgtgattttcatctctggaatccgaaggcattaatagctgagtgactttgaaagcgtgccgggaacaaacaggaactctttcgagaatacaaacaggaactctattaggctcggtgacacggcattgcaccgctggttagagcctaatagaattattcatcaagaaagttattctgcaagggaatcgttgaaagtagagagtttgtcgaagaagaaagggtgttttgatgctatctttctgcattattttcttcagttcagttggctggtggatcgaactgctcgagtcatatactagtacgagtcaagaattctcgacgttacacaagcaggacatctgtggaggcacaaagcacgtaacaagtcccggggatttccaattggatctgcagttctgcacgatatcgagaaggcactaaactgttttcggacacgtttttaatcaagtagccaaagtgttttttgctcagcgcagagcttagaggtcttggaccggcgtctcggttgaaaaaagaagcgttttgaaagcatggacctttgaacgtctgttctctcagttctcagttgtcacaaaatttccaggctttgcaccgtgcaaacacaagctaaaacgtgaagctcaccaacgtgtgattgcatggttgaacggtggtagctgcaaccagcgtttaccttaccgccggtaaccgcgcggttaccgggcttaccgcggggtacggtaatataaataccacggtaacctccttatattcaaataaattttaaaaataatttgattttttgataaattttgcacggtttttcgcggttaccgcggttaccgcgcggtaaccgtgcttaccgccggggcgcggtaaccccggcactggcggtttgggaaaccctggctgcaactagcctgagacgcgatctcccaaatacccaggacactgaaacgtcaatggatttcgcaaagcacagagctagttagtcaaatgaggactagtactgcaaccagaatgtagaagaagcagacaaaacaatcgccaactgggtatttgtaaaagcagtacaaccaaatgtcaaccatccattgtgccattgtgcagctcaagaacagatcatctcatggttcagtatacgagcttcagggtcatccattcgtgcatctggcctaggaactcaaggaagccctggaactctaagcaattaaaaaaaattcccctattctcaggccttgcaggtttttctacaatttctattcagtcctttgagcatctatagctgagcaaaattccaggcagcacagtatggcggtgcagacacattttcctctccacagataagaagcagcgctgcattccctaaattaagaaaacacataagtaacttgtatacgtaatttccagttaggatatagatgctgatcaactagtaacttatataccgatgtgcctttccatatacttaccaaggatatgcaacctccctacaaaaaccgtaaggctcagttacaagatcgtacatagtatgaagtatgaaccgagaatcttcggtcaggacatagggacataaaaaataaggcacatcttcatgcttccatcgctacagttctaacggtgcctagatcaccacaaaacatggtagcaattaatcccagtttcaacatttgagcaatcaacacttcaatatcagtcgcatagcctgacagtgaataatttattcacatcaacattcctgagcttaccatcctccaaaaattcaggtgattttcttcttgagaagccaaaaaaatcagatatggatgaaacttgagtccgcatgcctacttttccgcaaacaacataaaaaaggacaacaaagtttagtcttagatgaatcaaactgacattttaatctcaaaagaatcaaattgcattttagtctcataagaatcaaattaccagatttagctgtaagtttactgttagtgagaatggagaatcttcacaaacatgtctttgagctccctatgtgatgtcattgcttccaatatcttgtcattgaatatcacttcttgagacaagttgaatcctgcagcatggggttcttttgaaaatagcagtttggacatatgatccttcttagcttgcctatcatatttgtccttctcctttgtcccttctgtgattagattgtatgtatacacaatcttctcttgaccaattctataagctcggccaatcgcctgccttccaactgaagggttccatacaacatcaaggagaaccacacgtgatgccccgataagtgtaatgccttcacagcatgccttcgttgatgcaagcattaccttggcattgcttttcatgtcattgaaggcctccatcaaagcttctcgattttgaacaaggacatttccactcatcagtaggatctcctcaccttctgtccaattgaacattttactaagttggtccatgatcagagatagtggttcaagatattgactgaaaacaagtactcgctctttcatggcttcacacaaacggacaatttccaaaacaaattttgttttgactcctacgcacgggtttggccgtaagctcttcagcaaagagacatccacagaagatgtttctttttccgacagttttgcacatgtgacgaggaacgggtgtatagatgcaagggagatcttgtattctgcatcaagagtccccattgtcactgtgttctccattgctgtgatgatttccttttgatgaggaagaggattcagaatcacaactgattctctcaatcctggaagagacttttgaagaatgtcaccgttatggatgtgcacaattggatcgagtatttgccggatttcatctatctttttctctgttatgttattcagtgtcaaggatgtccagtaatcctcaaggcctattttcttgaaacttttagaagcgaagtgtcttgcaaactttggtctaatcaggtacaggacattagagagctcaagaaagcttttctgaaatggagtaccagatagaattattcgctttttggtgcgaacttcttcaagaaccttncatatgagactnttcttgntccttggtgtgg

SEQ ID NO: 27969 - DNA, 3534 bp, Oryza sativa
  unsure (1)..(3534): unsure at all n locations
gatgggcctttgaaatcagatctgcatgtagnncancatgaaaagcgtatagctcacaccaattatactgctccctttacgccatgatgccaacttcaactttcgcctaaatttgtgatccaatttgtttctagccaaactttgggccaaattttcatccatgatagccagctgtttgatggtcctgtcttctttccagttaatctccttggagttcaatacatgaaaagggaccttcaccttccattttctgaactcctgttcccatgtagcaagcatccctctgggagcaattatcactggacagcactcgggaaaaaacgcaaagtaggattgaacaaatgtgattgctagtctggtcttccctgtccctggtgcatgagaaatcacacagccaccttcaatagtgtttgcattgttcctcagctgttcaattgaagtcccccctgctagttttctccacatgaactcaaaaccttcttgctggtgcgggaacatgtcctcccggaccccaggaactagatcccaaaccaggccagtctttttaccaccaaaatcacgtggtccttcatatcccgctgatgttaggatatcatcaaaaaacaagtctaactcgtgatcttttctcatgtccctttcagtacaggactttacctattgaatgagaaaaaaaagaaaacatatataattttttgcaagataatagatgattaatcagaagaaaggcaaaagcatcagtcaggtgaagtataaggtctttgggaaacatgttggagtgtacggtagtagcttaccatggagggaagtacgaatctgatttcaagatcaacaaagttgcagtgcttgcatcgaagtcctatttgctcatcaataatgagctcatgcttcccttggatgcatgaagctgctttgtccgcagggatttcttgctcatcttccttttcaccctgaaaacaacgatatgagcatcacttttgtatttagatttttttactggagataaaaaaacacagaatttccaaaagaggtttacatttgaatgcatacaaaagttaatgtttgtcctaacatgctgagaggacaaacaaggcaactcagacctccctatagggaggctttacaaacttattctgacaaccacttcctgaggctgatggatatccacaaagaacattaagctaactcgtgtattagcaagggctattgatgatgcatttattttgcatacttatatgcatataaaattttactacaaattaaatgatactacagctatgaataatcttgtgaggcagcaagactaactttctttttaaatatatattctttcttttttctttttttttgaaaccgagcaagcaattgctggtgttatattaagaaaaggcagcaatatttacaatggtgcaagtaagcagttgcacttagaaagggaaacaaagcaagaaaaatgggactgcgactgcgccatacatatatattcttatgcaaacaaaccttttgtttcttaattactctttgttttgaatttttatgtacataaatatctattcatacacaaaagacaaaacagtttattgttctataaattaatgatcaatagtcaggtttggagcaggctgatttaatttcaataatagtttcagaatccaaaactagtcattagacacatttacttggcttatataagatatatatagaatccatcctagctattattcctgattaaataataaacctcacattaaagccattcaagaaacacaaaagtcagggctgatagcgcacttctattgacataattagaattatcattttagataataagtataattctaactatatttgcgtagcagagagcacgatgtacctcctcgcagttgtgagaacaaacatttatggattccaaagcaaaatcaaattctttccacagttcatcttcatcctgtaacttgtcatgtttggatttctcttccagcttatcgtcatccccaaatgcgaataccaggggcaatctcctgtcaatttgctcttcaggaacaggctcatattggttgctctctatttcattaaacatggggtcgagcaaatgaccatacttttcttggtctgccgttgcttgcctgcgcttcctcctctgagcaatctttacatttctcttgaaggatacaccaccctgtccattgagcccatttgtttgtctcccaacttttggtccattgtttctgacgcattgtggagtggagccatcctttttcttgttggaaccctccttcttaacctgcctacgaggtgctccttcttgtaccctcctagaacctgatccttccttgacatcacatacaaatgttgtatcctcctcgctatcactatgggcactttgcctcctgttcaatttcctcctcttcacagctctatgctcctcattgccatcgctgccgccatcgtcatccgcacaatccccaccgtacgccgactgctccggctgtggcacatcctcctccgaccccgagctagacacatcgatacaataaggcttcgcgaacgtcccacgcttgagcagtttcttgtccaggagtttcttgcgtttgaaatttgatcgtgtgcgagctctgatatccctgccagtcgaggtgtccacctgttgtagaaaactaaatccctcaaacatcctctttcccatcagcggcattgccatgattcttgatcggggaggagattcctcaccggcctcacccggttgatcaggtgcatcacccggttcctcctcctcctcgtcatcatcatcatcatcttcttcttcctcctcctcctcctcctcctccaattcctcttcatccccttcctcatcgctgaagttctcatcgctatcatcactggtttcatcttcatccgtacccaattcctcctcctctatctccgcaacatcgtccgtacctccaccttctcccctgattccaccattgccatgatcgttgtcatctgaacgaacctccacctccacctccatctccatctcctcctcaccttcttcttcgtcctcctcttgttcctccacttgttcttccttcacttgtgcaaaagctctcccctgctcttcttcttcctcctcctcctctcgttcctccacttgttcttcttcctcttgtgcaaaagctctcccctgctctgccaagcgtgaccgagttctcgaaccaacacccgtgctcacccggttcaccggagtagcgcgaccacgaacagcgcccttgcttctctggcgacctctcccaggccctctaccttttcccctgccgacggagggagcaccacttgaccgggcaccgggtgtggaaaatttccgaaaaacacccgccgccctttggctctggttgggggtttcttttcccgttccccctgtttcgtgttggggggcgggacgaacgcacgggcaccggccacattgcctgcggaatggtcccggaatacggctcctcttgatttgacgggcacaccgttcttctgggtctgttggggctttttttctcctccttg

SEQ ID NO: 27970 - DNA, 5639 bp, Oryza sativa
  unsure (1)..(5639): unsure at all n locations
cggttgaanngtgantcggcttcgtctgcaagtagctcatcatggttcgctccgccgctcgccgccgccgtccgccgtcctttcgcggccggatcgtcgtctaccttccgccggcccgcgtggcagccacgtaggcaccacgtcggcgccagctcagcccagaccgggtcgggccaaccccggtcggtctctccgtgtgcgcgcgttccaccgcgagccgtgaggctgcgcgtgggcccgccgcatccgcgtccaccgcaaaccgcgcgcgtgcaccgggtcccaaccccgcccgcgcgcgtgcaccgcgtgctccctccgcacggtgagccgagccgctgacaagcgggtcccacccgggaccgcgcgcggtgagtccggtccaccggtcccctctctcctccccttccgcgcgcgctctgggccgccttttgggccggccggcccattaagctcggccgagccgccccaaatcccttgggccgcaccctagccgcccgaggaaagtctaaatttcctctctcctttcttttcttttcttttccaaaaaggatttaattaaatccgtttcctttaggccaaaaattcaataatcttagaaattcaataccttcccaaccgtaaatccgttgactccgttcaacttccaaaattccctaaatctcgagatctatctaatggcacgcttagaggtcattaatagggccttatttttttcgccgtttgttgagttgtcccgtttcgcgtgtagtttcggaacccgaagacccgcagtgcgaggatttcgaggatcaagctccggatctcgagcaaggcaagccacctttgaacatcttgagcctatatttgaaatttaattatgttgcttgctaaatattatgcattgataggatcgcacttaatctgtttgtcccgtctgcaaggcagattggcggacctacctaatttgtcgcatttgatccttcctttgttaattgctataccatgtccccttgtaaccacccagttgcgcctcgatactcgtgcaccctgtgcaagtatcgacggtcgccttcaaacttaaaatctgagtaacaacttgggtaaaattggagttttacaaaaagacttggaaaacccgacacctgggtcggtgcttgcgaactaaatgaatttctaaaaccgcggaccgggaacgtacgggtgtacggttttcccgctcccgcacttaaggaccgattccttggaatttcatccgaacataagacaagtacgaccacataggtggaatgggacacccctggctgagtaactagcttatcaggggagccatgatgtcgagagacatgtggattcgccggggtggtgtcggagaggacccccctgggcttcctggcacagtatggtctgggacctaacctgttgttggtctagaacccctctcgtcggcatatggtaagcctgtgtcagctttggaaatgccttgtcatgaaagcttggaggtctcccgacgtggctgatccccacgggctgggtgatccgggttagtaatgtcgtgtgggtaaagtgtaccccctctgcagagattaacaaactgttcgaacagccgtgcccacggtcatgggcggatgtgaggtgattcctagcgtagttttgtttgactactgcttgtgaaattactgtgtgaaaaggggttcggtgtttgaaaaatctgcagctgatgggatcagctaggcccgggtggccgtttgaaaagttgttggcccgggtggccgttgaaaaagctgttggccgggtgccaaccttgtttaaattctaaagactgatacattgcacatactccgaccggacgagacgcactgtctcaaccgtgtcgtttgagaagcactcacctagatgtttttagaaaagagttcaaataaaatcaattacgaaaacaacagcctttccttgaagcctgcattaaacacttatttcccctggcttgctgagtactcccgtactcacccttgctctatataaatattccccccagttgctgatgaagatgaagcggatcctgctgatgaggagttcttccaggagcaagccggttacgatgagttttagggtttcggcctagttcccaagtcgcgcctgtgttgtttggtccaagtcccggcttccgtttcccttttgtaatgcagttgtgagctcgggatctgtccgcagcccaacatgactgtactcctactctataataaagagacctctgttgctgtgatattctatcttcctgtgataccagcactgtttcctgggactggtatcgattaacaggttaatttggagcgtcacgggctaattccagtcgggactagctcggggcgtgacaagagatggtattagagcacaggcttggccctagggcgaaacccgacgcttaggacgaccctaaggatactatgttcaaaaactacttgcgaaaagctaaggtgtcttttgttttctttatttttttcaatagtttgtttctaaaatggttactgatctttctccctctttcaaaattgtagatggcagtgaacgccagcttcagttcccacggttttggtgagggtcaccacgtcgctcagcttcgtgacctcgcccgtttccttggcttctcgtgtcccgagtacacggggtactccgtggaccgtgttccccctcactgtgagctctctgtgtacctttacccccgtggaggtatacacggagctggccttcgcccccaccacttcactgtggccaggcccactctccagatcgcgtaccaggacctctcctggactgcgctttgtcgcctggcccacgactacagccaccgtctcggaggttccgccttccggcagcttccacgccttccttctggccactcagacgccaggtacccttgtccgtacagcgagtctcagccagtgctgactcgcatggttgagctctcggaggctcaggccactcagcacgacctactccttgaggcttaccgctcccttgcccgccgctacgccgctttggaggcccgtttggccgaggagggtgtcacctcagttgacactatctcttgggactcagcccgcctctgccacgccagccacctgtcctcccacagctcccgcggctctgcccgcaccccagcggaccgcgctcccccagctcgcgtgcgccgtactcaccagtgtactccccctacccacacccagttagcccttcctacaccccgggacacaccccagttgcttcctcccgccgtggcccacgctttatccgcaccgcgcgcaagcgtgttgttggttcttccaccgtgttccgtttccgccacccagctcccccaccgccagcggcccgtgctgctgccggccctcgacaggttctgccggtcccttcgcgccagccgatcgacgtttcttcgactgaggagccgactacaggaggcagccaggccgacgaggagtagaggaggcagtcttcagcagccgtccgtgtgataggcccttttgttccgccgccaactcttttggagtcgtggcgaggtagtgcgtgcgtgtgtttgttgtgggtgttgtttggtagtctggttctcctaggtggtgtgcgcacagtcaagctcggtgtagctctgtgacttgtccacacccgttgtatcaggtgtttttatgatttgaaaaatccagtttatgcctagtgtgtgctatctgagttgctattactttgctccttgccctcctaagtgcttatctgactcttaccccgcccttttctgggagtttagatggctagccgcccccgccgtgcagctcgtgcaccagcccgctttggttttgaagatggtagagttgaagcagaagcaaatcatgaatcagctaatgagcagtctcaccacagcaaccgttcgcaccgtactatttcccgcaacgcagaggttgagcaaccccgccgcagcaaccgctcgcatcgcacagcttcccgtgatgcagagatggaacagtctcaccgctctcaccgcactgccagtcacaattctggagaagaacgcctcccttccccacctcatgtggaaaacaacatgcaacacttaatggcagttcagacacaaatcttgcaaggaatagccgcagccgtagccggttatcagcataatgcgcatggaaatggccaccctcacatgggcaacaatagatccaagctgacagattttctgaggtcacgtccgccagagttctctcagaccgtcgagcccgtcgaggctgacgattggttgaaagatgttaatagaaaactcaacttagtgcagtgtactccggtcgagaagacgctctacgcctctcaccagctaagaggacctgctgcagattggtgggagaattactgcaatgcacaccctgaacccactaacattgcttgggatgagtttgctacggctttctgtgcagctcatgtgcctgaaagcaccattgacatgaagaaagaggaattcaacagacttaagcaaggcaacagcagtgtcaatgagtacctaagtatgttcaacaagttggctcggtacgcccctgaggaagtggactcagataagaagaagatcaggaaattcttgaaaggaatcgcagttggaatgagactccagttgctagcgcatgacttccccacttttcaacatatgatcaacaaggcacttctacttgaggatgccagaaaagaggctaccgaagaatacaagaaacgcaaatctaaccaccaggggaattcctcccaaggcgcacctcgccctcgctacggtcaacccatgcaataccaccagtcggtcactcaggctaaccgccagccaggctacgcccctcgtcctcagatgaaccgcccggcaccccagccacagcagcgtgcccctagtggcaatattgcgccaaacagtgttacctctttcaagtcaccgcagggaccgtcagcagttcagtgtttccggtgcaaccagatgggtcactatgccagacaatgccctcagaatcctaccaacaccaactcagggcatgctaatggcagcactgccagaactcctactccagcggcagctcagtctcgtcctagcactcaagcaagtggacaaggttcacgtgcttccaaccactttggtcgaggccgtgtgaatcacattcaagctgaaaccgctcaggatgctccagacgttgtgatgggtatgttctctgtcaactccgtacccgcaatagttctgtttgattcgggagcttcccattctttcatatcacaagcttttgtgaaaagaaatggttggaaaacccaaaatttacgtgtaccaatgatagtacattcccctggaaggaatataagggcaactcaaatatgcccggaagttaaccttagaattgaggaaattgacttcctagccaaaccgatagtcctagactcgcaaagcttggacaacatcctaggaatggattggttggctaagcacaaaggacagatagattgtgccgaaaagtccatcaccttgcaaggacctggaggaaagcaagtcccctttacccctaacacttctaccgcaagttggtctatcttaacctgtttacaagtcacctccttggagtcggtgcccatagtttgtgaatatcccgacgtattttcgg

SEQ ID NO: 27971 - DNA, 3015 bp, Oryza sativa
  unsure (1)..(3015): unsure at all n locations
cgcgatgtggttcgttcttttttttaacattctactatacttccctccctcccgccacctttacttatatttcttcntttattgnccgnctggccncccnccnnnncggtggtgatgactcggtcgcctttaccaancagcctatgcatacaggcagcccacgccttatgaagtcaattatcccacccatgatctcaagttggcagccgtggttcatgctcttaagatctggaggcactatttaatcgggaacagatgtgaagtatacactgatcaccaaagtcttaagtatatcttcacacagactgagttaaatatgagacagagaagatggttggaactaatcaaggattacgatcttggaatccactatcaccctggtaaagccaaggtggtcgctgatgcgctaagtcgcaaggcctatcacaatgtagctcaaatacggcctgaccaagatcacctgtgcagagaattggagaagttaaggctgaccgtggtacagtcaggtgtccctgccagcttgacagtatagcctaccctagagtcgcaaatccgggaggctcagaaagacgacgaagggataaaagaattaataaaaggaatacaggagaagaaagacaccaatttctccatagacaaccaaggcacagtttggtgcggtccacgcatctgtgtaccggccaagaaggagttaagagatctcatcctcaaggaagctcatgagtccgcctattccattcatccaggaagtacgaagatgtaccaagatatcaaggcatacttctggtgggctggaatgaagcgagatgtcacagaatacgtagccctgtgtgacatttgccaaagagtcaaggcggaacatcagaggccagttggtctgctgcaacccctaccgactcccgagtggaaatgggaagagatcggaatggatttcatcaccggtttgccaagaacccccaacggatacgactccatttgggtaatcgtggaccgactcacgaaatcagctcatttcgtgccagtgaaaatcacctatgatggaaagaaactagcagaactctacatgacctatgtcgtatgtagatttggctgtcccaagaaaattgtgtcagaccgaggcactcagttcacctcaaggttctggaagcagttgcatgaagccctcggaattgatctgaattttagtacagcctaccatccgcagaccgatggtcagaccgaaagggttaaccaaatcctagaagacatgctacgtgcgtgtgccttggatttcgaaggcacttgggatcgttgtttgccgtatgccgagttctcatacaacaacagttatcaggccagcattcagatgtcgccgaatgaggcaatgttcggaagaaagtgccgcacccccttgtgctggaatgaggtgggcgaagcactggtattcggtccagacatactcaagtcagctgaagaacaagttaagctgatacgagaacgtttgaagacagcacaccgtcagaagaattacgcagacaatcgaaggtgtgaccttgagttcgaaaaaggagatcatgtgtacctgcgggtatcaccactccgcgcgctagcctccaaggggcggagggagagagcccctctccctctgccgagtcgccccgctccctcctccttttcccgaatcggcaaaggggcgagcccctttctctccctccttttcctctttttctcccctttttcccctctcgccggcgtcacctcctgtcgccgctttggacgctagccggagcgccagctcgccggcttgaccgcccatgtcagttcccctctctcaaaccgacattgccacccttttaaacccgtcttccccctcccttcctttcctctcccattcgcctcctcaccgttgtcgccgctcccgtgctctgcctcgcctccgccgtccatcgccaagcgtcgggagagccggtgcgttcgtggacgcggaaggggactccgggcgcgcccccttcttcctcttcctcggcccgaggccggagagatcactcccgcgccgtcggcctctcgtcactgcgccccgtcccgcacggtagtgcctctctccgttcttcctcctcgctccatctcctccccctagctttcggtagtagcttgagtagactccccgtagttagccggcgccgccccgaccgttgccgtcgctcgccgtgtgctcgccgccgtcgccgcccgagctccgtagcacccgctcgtcgccggcctcgctcggcatagttccgtccaatccgacgctagcgtcgagttcccgacgccgcgtagatgctctcaccgccgggaatcgacccctcgtagcttcgtcgccgttttccccttctcccgccgccggttgccgcccgcaatgccgtcgagcaacctccggcgaatccgagccgttggttcgtctcccctcgtcacgaacaaccgcccggtgtgctcgctttgcccgtatcaccgtggttcgctccgccgctcgccgcgccgccgcccgccgtcctttcgcggacggatcgtcgtctacctcccgccagcccacgtggcagccacgtaggcgccacgtcggtgccagctcagccagaccgggtcgggccgaccccggtcggtccctccgcgtgcgcgcgatccaccgcgagccgtgaggctgcgcgtgggcccgccgcacctgcgttcaccgcggaccgcgcgcatgcaccgcgttcctttcccgcccgcgcgcgtgcaccgtgtgctccctccgcgcggtgagccgagccgctgacaagcgggtcccacccgggaccgcgcgcggtgagcccggtccaccgggtcccttttttcttccctcccgcgcgcgctctgggccgccttttgggcggccgggccattagcttggccgagccgcccaaatcccttgggccgacctaaccgcccgaggaaatctaaatttctccctccttctttttttttttttgcaaaaggggttaattaatccttttctttaggccaaaaatcaaaatctta

SEQ ID NO: 27972 - DNA, 2563 bp, Oryza sativa
gcttgttaatatggtatgatgtttgacacttgagtttctgagaactgtctgatatagatgcgtatttatgtaatgacagagttaacttatgctatgaaataaaatagtggatgctaatttttgtaacctacccttttggaaacaagagaatacgcaaggttagttttcagagaccgtaggaagccccaatcagttctgaagcagggagtgtccacctccttaataggatttgacattggtctgttactacttggtacttctaacagagacaaaatggcctactcctaatggttcttacattgtacagagctcatgaaacacatctgacatttaattcactaaagacgatgattcattggtgttgctgtatgatgcttgtgctgtcatactttggctctcacttgggttttgccaaggctgaggtctgacaaaaatggttgcagtggtgtatgcccctcaagcaggctcactactttggacatctttggtctcggtgctggtgctgcattggttcagaagagggcaacattcatcatgaggtgcacaagtctggatctaccagctctaggagatttccttactcatgtacaacacaagcctgcaacacatctgggagagaacatcatactgctactaaggtatgttccatgtgaacataccagaatttccatccttcctgtgaaatattttagtcaagaattgaggttgacagggtatctgctttggagttgtttagccttcctgtgaatttccatccaattccaaagcagtagtaattactcagctcctcctctttgtttttgtaataggcaaaatgcttgcgtatcattgtatcaaggaagaagtagaaaaatgcaagcgcatacaagagggagggagtgtcagcctccacgagctgacaacttccaggaaaagagaaggcttagaagaaaacaaccaggattacacaccggaaggatgacctgaaaagctaaacaccagagtttaacctcctcggaaacttgagaacttctgcccaggttcttaactgctggttgaagacgtgattgttccattcggattcccattccttccagatcatccaggcgaccaagattatcaaagtgttaagatactcagctcctcctggtccgattgtttgtgctgtgctaggatcctctcgatctttggcaggggatcttctcttggctagcttcttcaaacctctgacattccaccacttaaggtactgatccattcctctcttactaataacctaaaaaaattatttttttttcattttgtcggcagtcaagtttttctttgcttagttcttttatagggaaaatcttttaattgtgtttatttaattttccacttgatctaataataagcagttttgctataatcgtatcgacatattttctagtcaatcagtctattttctaatcgtcaacactgagtagtagttataatagtagttttctcctgaagagctcttgcgtgtagcagtgtgcaactgcaactctgcaaccaaacagtcaattgaattttttcatcttgcatcacggccctcacttttcctattgaacaaatggagagaacttgtgcctgtactgctgcatatctgtatgctgcctctagtactagtttatactttactgattactttgagtaagattatatggtaattacaccataattatgctgtaactttggtgtaaattttatagatgtcgactgtaataaatttaaatttgtttgagacacattcatatgaattcccataaaatttaaattattaatattacagattccaaagcatactgttcatgcaaaaattaagtttctcaagaaatatcactaatttgagtagcatttgtgctaaacattgtagttagagaaatttgactcttttgtatagttggaattatatcgcatcatgtatagatgcatccacaatgaaaatcttgatactgattttaacataccattatttcctcttaccagttccatgcctcattacagcgtaatctccccgattgtctctctttgtgaacatgttgtggaagccaatcaggaagcacatttactactgcctcaatcctgaaagtaatgttcataatcttatgatcgctgctgatgatctgagggacaccattgatactatcgaggagagaattctggtgggtgaatgtgagggaaagaaaccaaaggcacaggcaacaagctggatacgtagtgctcaatcagttaaagatgaatcagacaagataaaaaatggctatgaggcaaggagaatacatgcgttgggttgttcctggaactttttcttcaactacagtgtaagcaattctgccaccaaaatgcatgctaatgctgatgagatcaagaagagagctcctgagaatgatggtatgttcagctccctgcctctggttggcagagatatgcctctgccaccctacattgtggggcaagatgagtacaaggataagattgttggttccattaagcagggcaccacaggcaccattgggatatgtggcatggcagggtctggcaaaactactctcctcaaaca

SEQ ID NO: 27973 - DNA, 10170 bp, Oryza sativa
tcttgcacaacaaaaatgtcacattccctaattcgtgctataggcctcacgtgtgaactctcagcatgagacagcccagtcagatatgcatgttaactagttcgggtcctttggagtcgcttgatctctcacaactctggatctgtagtgcattaatattgaaccacttccatctgatattggagcattactgaacttgcagcaccttgatctttcatacacaccaatccaatcactcccagtgaggttcagattattgaagaaactgaggtacctatatttaaggtatacacgcaaactccaaacagtcccagatggcaccatatcggcactaagtatgctgagggtgctggatatacacggcagtgtttttttcacaaaggtgaaagcacggtcatatcttgaggaactggagagcttgaccagtttgcagcttctcagggtcacagtggttgatttccagtcgctcaggaggatcttcaatttgtccagagtctccctgcgagacaggattgggacgcctccaagtttcgtcccaacttatcagcaaagcaagggcacaacatctagaagttctggctctgagctatatgaagagtttggagaagttgatgataggtggtgaaagtgaaaccagtgtggattattcagattggtgcttccaaaatctcgatgaattcagattgcatcacctcacaaaactgggaagcatcatgtggaaaggggtgatgccacatgcttgctttcctaaggttcgtacggtagatatcatcggctgccacagcatcaagacactcacttggatcaaccagcttccttgcctagaagaggtgtatttatacaactgcaactcactgttggaggtagtgagtgatgatgatgaggaagataccaccatgccatcggcaacagcttcatcatcatttcctcgcctcaggcacctcgggctaagtcatctcaaggatctttacaaaatatgtggtgatgggagacttggatttccatgcttgcagcggctgcttgtgtacgagtgccctatgctggcaagactgccattcgtgctatggaatggatctgctgtgtgcctctgattctcggtgaacaaaactggtggaacaacttaggttgggacgatgctggactgaaatctaattcagtccctttcttcagagaactacctccaggttttaaagggagtaacatggaagtttgggaggcaatgttccaagcgttgccttaatctcagcaaaggaaataataattggtcataaatctcaaagaagaagaaagctttggtcgcctgttgcatggtgttgagagtttcagttcttgaaagaaagaaaaaagcactacacacattttcctgtttataattggcagtgcgcatctcagttatgcctgtagtgttgaagtgttctcagaatctcagtacagtctttcgtgtagtgttgcttctctcttttgtgatgagtttattgtgcttgtgctagcatttttattaatacatgaccggactttgtcgtacctgtaaattgaaaaaccctatgggaattttttttttaccattctggagtcttagatgggtaagtagcaagggtttggtcattttgtgagaggggtggtgtcatgagagggatcgagcaacattgttgagtccgggcgactaatagtcaatcaaatttttttatgaaaattgatggttattgtctacgttaccctgatacggctgggaaggagcgtatccgtatcagatacgtaacaagatacggatacgtatcggatacgctccgatacgtatcctgtacgtatcctccatttttccgactttcaaaaaaataaaataattaggatacttttttgatacgcacatgatacgggataacaaccctagccgcctcccgtctttttgtgcacaacggcgccgtcgtcctcgacctctgcactgccgctgcgcaacaagggcatgatgccgctgcgcgctgtcgagcacggacgccaccggcgtgcgcctctaagcacggaatcgccaccgctgtcaagcgccgccgagaagggaatcgcgccgccgccgtcaagcgcagttgagaagggaatcgctgccgctgccaagcgcattcctgtggttgtgggcacagcaccatcgctgcacgggttggtggttcaactgttcaagtgaggtaggcgtgagtattgacagttgagttaaatcacttatttgatctgcaatgatttttttttgtccttattgttgttctcctttcttgttttcggaacaaacaactgccatattactatttcagagatccgatagattacgaaattggaaactcaagagtactagtgcatccaggatcttaatgttggcgataacatcatttctttttttattttggtagctgtagcccccgtaagtaagtgacttttagagatccagtaagtactggtatttttttttaaactaatccagtaagtactgggactgcagtacttgaaagctatgctcgatatatctgtgtattgcttccttcagttatctctgaattgttggcatgctcattattttgggcttaatcagttctgctattttctttcaggagttcattgatttttattatttatttatgatgtatatatagacgtatccccgtatccatgatttctaaaaatagccgtatcctggtatccccgtatcgcgtatccatatccgtatccacgtatccgggtaacataggttattgtagtggaggtggcagcggcccgggtggccgcttggcctgtttgcgagttggctctgctgttaattaaggctctgttctatttcttcaactcaaatttcaccttccttattttccgttagcatattttttaaactgttaaacggtggttttttctttaaaaaaaagtttctatataaaagttgttttaaaaaagtaaataaatccattttcaaacttataatagttaatacttaattaattatgtgctaataaagtttctcgttttgcgtgcaactaaaattatcgaacagggcctaagagtgattaaatggagctactaaacaatgccaaatactagttattattgttattgttttttggaatgtgcaaaagttccgtgcttctctgtattaagataggggaaacttcaacaatttacctaaaagaggtgttaaaaccaaaaaaacagaactatagaagaaagaagacgacagcactaggctacgcctcatggtgttaaaactacttctaatgcaagaaaccatctctacacaagaaccaataatgaaaataaggggataggtgtataaaagaagagagaagagacatgattggatgagaatttaatttaacgacaccatccattggatatatgatttctagacactacatagtgtccatatgatatggcaagtatagaaactactggatagtttctgggttggggatgactcttagagtgatttcgggtaggagactaaaaaataattgatggtttctccttgttggtcgcaaaaggcacaggatctagggtgtggtaatcccctcttgctcagtctatctatagtcacaatgtgcgaccaaccatgtaaagtagtatttgcatttgagcggtgcagagctcttctaggtcggtgcagctaggaaggattcccttcctaattaataagaggaaattgttggactgtcatgtagggatgaaaacggagcagatagtttctgtccgctcaaaacgaatacgaatacttttcggatcggataattctcagatagttcggatacggatacgaatacggatattttctcccggatatgaatacgaatatggtatcggggtttccgtcggataataatccgtaaacagtgctatttggatatccacataagccatgagacataccccatttatttataactctatgaccttgaatatacatttttagattttaatagtagttcatctcttaacattagtccacactattaatattatttaaatttttaaagatattcataaattatattatattttatataaaataagctaattatatatgttgatacttgtttctattagaagttgagttggttttcgtgttccgagaaaaaaatgtttccgtattcgtgttcgatcatattcgattcttattcgtattcgagataatccgtatttgtttccgcattcgagctatccgtattcgattccgtcaggcacacaagcttacacgtatatatgcatcccaaccccaaagctataccaaatagaacaaagaacactcatctcccttacatactcagcgagccataccatataccaaatagaacaagattattgacccatttttatttctcggagcaagattgatcgacggcacatggatctatctcgtaactaagctctccgctgagcgacatttaactatttgccacttttaagattagatatatagctaggtctcgctaccggtttgtccggtggcggtagtggttttctcattgcttggagccggagtgatcgggattccgaccttgtcacgcccctgcaggggcttgcgcttggcgacggtcaccagcagcgtcccgaaggtgagctcggcctcgaccttggccgtgtcgtacggcttgttcggcagcagcaggcgcacgtcgagggagttcgccggcgtcgacgtctcgtcgccggcgccgccgtagctgacgaggagcaccgtgtcgtgctcgatccgaaccttgagcttctccctgtctatctccccgacgtggaaccacagcttcacgtagtcgtcgtcctccgtgatcctccacctgttgcctgacgtcggtgggaacttggggtgcaccagggcttatatcacatatgatatatatgtgccacatatcacatggcatatgaaatataaatgcttattagacttgcattgcatatacaacagggaagaaaataatagaactgagagaaattttatggtccttgagaaaaggatagaacaacatcggcggaaaccatgttgttccggccttcatactcaactaaatcaacaggaaggcctttgtcctttattaccttgtataatttagtcataaaaatatattttacactaaaaattattttggtatctcgaggtaccaagttctacactagaaaaatttggtacctcccagcacttaaaggatggtaagattaccctaaaactaaacttaaacttcacagatatcgtactactaaagatgaaccaaatcgagaaataaaattcgtatgaaattagaataaagttaggagctgaatataatgaaaactaaaacatattacagtacactatgctgtctataaacttaaaaaaattgtacttattttgaaatttataccagcaaatactataatatgctttcggaatatttacaacagagactcaccaaagggtgcgatgccaaagggatgcccagtatcagcagggcttttcggagaattattagcacgcaccaaaagacgcggagacttcctttggagggccaatgccgctgctggcttgcttgcggatcgcagggctgcaccaaagggagctttcagtaccgaaggcgccgtctggctcatcaggaggttgaaagatgtaaccatggacattgctgctcagtttatgtactaaatctgttagttttggtgtgctagctagctacttccaagggtagcttatatagagatcaggaggaggagatatatacattctttaactttgcttcgccctgcagaatgcttggaataactgatcaaagaagttgctaatgagcagcttagctagctttttctaaaggaacaaattaacaaagatgatgctaaacttgatgcaggaagtgttatcattctcacaaaagcaccagagaaatgtgggcacacaatgcatgtcttctctgttcaggtacaaggcttaacttattcctgaaatctaaaacgttaaaaaaaaagagagtacacttcacaccccttaacctaaaaatatttccacttttctttttgtcatatctcaggtgcttccgtgaaaacgaaaacaccctccgacaacaagtttagcatcatgttcccagcattgcacctttacaaaagctgcatggcaactatttatattcttgcaagcatatagttcaattgtatgagaaatcaatggccatagtctaatattgaagataacattaaataattaaactagaagataccccgagcattgctacaataattcttagctcaacgaaaattgaaatgtatgctgccaaatgaaatttatttatacagttattatataatgcatacagccacacataggaacatgtaaatcaaacagaggcagcaagatatataataagagttctaagttttatttttttatgttaaaaccatcttcagtgagaaccatggcttgaaggtgaggttgtaagagcttgaaactctgatagttattgtttgataacatcttccttctgcaatgtgcttgtacatgtaataactacttctgaattcagtccagaagaatccttgaggtttgcgattgcattttactgcaaatcatcattttcccagaatgtatcctaatttttggcctaatttttcttctgatgattgatttaacctctgataaaaagatagaccttggttctatttcatctcttcaacaagtttagtaataagcataacggccctattgtttcgatggagagaagaacctataattagcttttcggaaaatttccaaacgaacaatgtcaacaaaatcttcatatttgcagtaaatatgcaatcgcaaacctcaagaattcttctggaccgaattcagatcagtagaaaaggaaaacaccctccgacaaacctctattctccttgaggtttgcgattgcatatttacatgtaataactacttatgcacatgatgtagaaaaggaagaaacatgaagagattcctagaatgggaagcttatagcaatgcgaatggctaaacagagataaatcatcataattcattacaattgaactataaattgaagatccatatttagtacagtttgaattaaagcattatatgtaatcttgagctatactctcaccctttccatgtcatacaacgtacagtcatgaaaaaaaccacgaataaatttgtcaatacacagattatatcgttatatatcacttcatttaacaaacatacttaaactagatctacaaaaaaaaatgctggtaacatcctaacaattacattctatatttttttgatattttaataaactttatatcaacatcttcttttgtataaaaaatatatattcatcaaagatccttgagtttttttttgtggggatcaaagatcctcgagtttaatcaaattcttagcaataaatcagttaagctatacagtacagtatactaattagtttataaaggatattatatcaattctacatccatcccatgcctatgaattcaatcaaacatgtaagtgttccatatactaagtgaccaacatcaacaaaataaaaggatgccaccgaccattgaaaggacaataggtgacttgagggcaagtggcaacgagcttacggctaggtaatagcgtggtgtcaaaccttttcaagctgtctttgtctttaccctaagcacataggacacaagcgaggagataatgatggtagattgcacacattctctaaagcataatgaactcgataacggttgacaaatactgtattttgataagatgtcatttagcaacaattaattagacaatagacaatgacaaaagtaccttgcaatttttagtaatggtgtgacgacttggtattcgatgagcttcattttggtgccattgagaagaataatgtgatctgttttgaattggtaggaaacacccaattgggcaaaccaaaatatttattttaaataggaaaggtgtttcatttagtttggtgaattcaggagatgtaaatcatataaaactcattgattagaactaacacgacaaaatgtaatgtccataattagaactcatacgacacaatgcattttagtctaaaatacttgaaattttataaacaatcaacacacactttaaatttatatagtcattgtgttattttagatgaatttgttcttctatagtagtgaacacgtgaaaaaagaaattactcccaataacgtattgacattttatattagctagctgcgcagttgcatggatgatttgtaagggctacacatctcatctagtgagtcggtgactgaagagtaaagaattgtttttttggcacgaacaaaagcactaataatatatgtttatgaggtttctctaattctcttcgatggcgctgatgtcaacaatcctcgttccatcttccgtaggagccttcttcttgatggtcacctctaaccacactttgtcatcgaccttcttggaccgccactccaccttcttctcatcatagcccggtgtcatcaagaggcgcacatcgagaaggctcggctgttgcttcttctgctgctcacgatccctcagcgagatggtgagcacgtcgccatgatcgatcgcaacctcgatggcgttgttcaccttagattcgtcgccgccaacaatctccgtgaccgggaattgcagcgtgacgctgtctcccgcctccacgatcatctcctgtcctcccatgtttcttccggccttctccttctgcctttcgctttcgcgagcgggatgcaccagagctttcattgatcatcatgcacgcaagaccgagaaaacgttgtcaggaactcatcagaatgctgtttttaggatcatgtacatagagtacacattgagaaaaacaagtctgaagtttaatgattgtaactctggacatttcttcgagcatacaatcatatgaaatcactcaccatccggggaaaagtttatggcagcagagattggggcaaatcgatgtcgaggcagcccatacttgtcaggagcagtagagaaagggagaagagcagctggtgtcgttagtcgtcgttgtcgtcgtcgcatgctgggagaagagaagctaacggctgctgctgctgcctcaaggcagctgatgtagcaagagattgcagcagctggttgcatttctccaagagaagcatcaaatgtaatgatcgttatgtgtttgcaggtggtagcttgcatgagatgacattcttgtgcatatatataggggtataaaaaccaaattaaagcttgaggatttacctttgcttgccccggttggcttggcgaataaagaggctgtgaagctcagctagcttttgtgaagttggttgcaatagcaaatggattgtttaccaaatgatgactaatcgtaggaatctgatttctttttttctttaaccaaagcacgtccagcatgcatgatttgatgttatttgatttttcagcaattctaaacaatagaatctcctaaatattcaagtaatatgaaatatattaaccatatttttttataatttggagaaaaacatgattgtatttgaactctatttgctatcgtgttaaaaaattggaaacgtttgaccttttcagataaaatatttgaattgttctctaattatttttaaaataatatataaattgactaaaaaagggtctgatcaccacgatatataaatgggtaaccagtgacaccatgacgtggacaaggctatcgatggacataacgggtcgacagtggaagtcaggaatgtagctaatttcgcttcgcgtcaaatggtttggaacaaagcaccaaaatattgcgggcacacctaatttcctcgctgacatgaatggaccattggcaaatttgcatgcggataaaaaggagaaaagaaccactttttcagtgaccagccaccattgtccagaagctcattcctcttctcatcccctccagcttcttccttctccctgccccaatattgcaactccaaatccaccacacttggtaggtctttcccctgatgccacatgcttgcttccctagggttcatgtggtagatatcatcggttgccttaagggtctcttatcccattatgggtggcgtagttccattagaattgctggttgaatcttgtgaaatcaaaggtgttttttattattattctgtgatgaacaattggcattggagattattggttttgatatttga

SEQ ID NO: 27974 - DNA, 5935 bp, Oryza sativa
gatttcacaggtgatctacatgtactactggatttgtggtccggtcagaccgggcatgtgctgccagtcagaccagcttgtattgcccggtcagaccggcgcagcccgcggtctgaccggccgacgctgtgtcggtttcggtttcgggttgtttatttggatatctgtgattgtttcatatttatggcttctagattgatactatgcatatgtaatactgttgtttgctactaatgagtcaagttggagatagcttggtctcgaaatatggtttctttgtttgtttcatgtgtaggtgactcgatgcctcgggagagtatatttgcggtgatggaccgggagtcgacttggtgggaaggagatgtccgtggtggtcagatatcatgcgtgatacttaggctagagttcaatgcacgtggttggtgaagattccatatggcggatacgatggaggtattgtgtgcgtatgggatacggagtcgaatttggaaggagtccaaatttggtatgattggttatgtaaagtttgtttcttatacgaaaaggtttcctagggggattaggacttctagtatgagtttggttcatgcctttaggctgcctacctcatgtataaatagagagggagcgtgaggcttcccggtatcgcttttgagagcaattgagttgatagtttacttagggtttcgagtttagtcgagatttttgtaaggagtgctgttgttgcactttgtaaacacagagagaatcaataaagtcatcatccactttaagagttcttcgatttgtgttttctcgggtgtggcggtccaaccgacgagacaccggcggtcagaccggcgggcacacggtggtcagaccggcggcggcgacaggtgctggcgattgacctcggcggttcgaccggtgttacaacctcggtcagaccgacgtgttctaggcggtcagaccggcacgtctacttcggtcagaccgcgatccatcgaatttgagggtaacttttaattccgataaaagttttggtttttgggtataccaaccattcacccctctctggttggcttagttcttgtgtttcgatcctacaaatctatgttgtttaacgctagttaataataaaagggagttgggggtttgtctcattacctatcgtccctttttatttgttgaacaaacttatggttgtgtgctttagggcagaagccggagaaaaaaatatcatcagctgccacagcatcatgatactcacatggatcgatcagcttcctgtcctagaagaggtgtacttatacaaccgcaaccaatggtgaatccagaacaaaaattaccatgggtcatatacatatcatagcgtatataaaacgctaatttttaactattagagcctgtttgaatcataggaaggaaaaaaacaaagaaataggaaaacacatgattctgacatgaatataagtgttaacaagaggattgcaaaacacaagaatgattgtttgattggaccgtaggaaaaatacaggaatcggatgagagagatagagtcaaaggaaattttccaagagattggagctcttgctaagtttcctccaaaatccacatgcaatgagtcattacataagatttggaaaccttcaatcgtttgaatcaaagagccaaataggaaaatttcctataggatttgaatcctataaaattcctacataaattctttgattcaaaggggcccttaatgtagttaatataggctaaaataactaaatattgaaattctacttaattaaggtcctaggttaacataggtcactgccactgactgcaattcacttttggaggtagtgagtgatgatgaagaataaaaggtgtattgttgcccctctctctatgatgagtttgttgtactcgtgccatcatttttaagaatagttaatattgcaagacgatgtcccttgctagatcatatgcctttgatgttttatgagaggcgaattttatagctgtaatcaagcaagcactcactggtggggttatatcatgcatgatctgtcagcatggagatcgtttgtcactcaaagaaaacatcagatgttgtgtcacggtcatgggacacctgcatcaagaacacgatgaaccgaacggcttcttcctcctctggctctcttccttctctctgctattcctcctagctcaagctttcatttctctgatctcccggtcccctgctttccaccaccccaatctagcttctaatcccactctaaacccctgtttctcccaaattgtatccctgacactttgatatatggtgttggagacttggagttggatcatctcagttgtgcttgtgttgtcgggtggaaatcaagatgggtacgtaacaatatggtatgagagcaatcgatcccgggttttccggtgttaagatggtgtgggagagcaacttggtggtggtgtctttggaggagacgctgaccacctgttcggtgaaatgccggaggcgactcaggtgccacccttcgcgtctccgtgagccacattgtctacccagtgacttctgagatgctgcatctagtgtacaatacccatggagcagtttgatgctagttgtacgttcctagtccatccaataattggaaagccctggccatatataaaattcactatcctaaagatttaagcagagtgtccatcttaatagtaggatctgacactagtctggtatttacactgtacttctaaaagagacaaaatgacctactcctaatggttcttacatgtacagagctcatgaaacacttctgagttctgacatttaaactcacctaaggtctcaggctaccagcaatatctaaagatgatgactcattggtgttgctggatgatgcttgtgctgcagtcatgctttggctctgatcacttagtgtttgccagaagttcctgcgctgaccgcttgagctcaggctgtttgcagcaaggctgaggtctgacagaaatggttgaagtggtatgtgcccctcaagcaggctcaaaactttggtcatctttggtctcagtgttggtgctgcattggtgcacaggagggcaacattcagcatgaggagcgcctcttccgttgagtaatcggagcctaactctggatctaccagctccaggagatttcctcgctcatgtagaacacaagcctgcaactcatttaggagagaatacttttgaggtatgtacaatgtgaatgtagcatgaattgggaaatttaagaatttcggtttgatgaaaatactgtttgctttaacaactttctaattaaaatgcttgttgtgttatctttgaaataaacaatatgttggacaaaattaaaccagtaatggatgctgtttgtttcaaattagaaaaaaaatgccatcacattgataactaaagatctattcctttggttagattgttacataagtcaggtataatattagcggagtttggatggaattcatcaatgtccagaagaagtttaagagacaaaatgccggctaagattgagctaaattttagtgttcataataaggttcctataaatgtgcttccatggtcatgcacagaacattattgcgttaattggaaattgaccaatgtgccagtaactggtaactggttattctaagcatggtttaggaattacccaatcgagaagataaacaaaatcttcctttggcctgtagcttgtgttactttttccactaacaatttccaaagcaacaaccccaaaactgtaaacatcagctttgtctgtcaaataaccacgcattgcatactcaggagccatgtatccgctgcaggaagaataacaacaaaatgattgagtcaaatatctgctctgtagttgaatggaattatttggaaggggcatggagagaagaagtaatctccatcaatagttgttcatatggaaattgatttcagtagtaagaacattaattcctttgaattgttagtctacatatggtggcatctatttgttactgtttttgtgcaactacgtgccttgtaggatcctacattttatttcggttttttactatattagctaccctcagagtttccataaaccatacataaaggtcgcaatgttcatttttatctaagttctaactgtcatgtcatttaaagacttcctattgtagatcaatgagacttgggacacgatcgaaattaaatttggggggaaagggggtatggaaatcaaaaagaaaacttacatagtcccagctattcttgtacttatgtgtgtgtgatcatcatcgttaagctttgctagcccaaaatcggagatcttggcactcaagtctttgtcaagcagtatattgctagccttgatatctctgtgcacaatccttattgcagactcctcatgtagatatgctaaaccccttgctattcccaggcaaatcttacgtctcgtcggccaatccaagctcagcctgtattgttcgactgtacctaatcacagaaattgcacatgagttctaacatgaaataagttaagaggggaaaccaggaaattagaaagtaagattaccgaaaagagcacgcgctaggcagttgtttcccatgtattcataaacaagcaagagctggtttccttctgtacaacagccataaagcttgacaaggtttgggtgctggagtgcagatatcatgcctatctcattcacaaattctcgattcccttgtttagaccttgatgatagctgtttgacagcaataatggtgccatcagacaacagaccatgccagcagctcaaggatccatcataagaattgtgtacatttttagataatggatattcattaatccggaagaattgtgtacattgccttatcagactgccgagtttaagcatggagtcagtgatgatggctgaccttgtaaactgaaccaaaaccaccttcgccgatcttgttggccgcatcaaaattccttgttgccactttgatttgtctcaaggtaaaggatccagtttggaggtcaaaggctctgagatctaaagagaaagagacagggatgatttatctgttcccacataaatatataaatggtttgcaatgctagcctaactactttaactggcaattgtttgagaaatcaaagcatcctaggatgggttcgtctggtatagtgtaatctcttttttttttagataatggattttcattaatccggcctctatatccaccaaggatatacacagccaaaaggatacacgagcacttagactcacacctcaacaaggagaagaacacacaaccaaaaaagaaaagaaaatcaaacgacctcgacacatgcaatttagattgttggatctattgctagtattgctgaactgttggaacaagaaagatactccaatatgtggaagatagatgccactatgtcattcatgcaaattgaaataaattgagcaatcaagctctcatgtcacctttatgcattgagttctttctcctccatttaatccaataaatgccgacaaaaagtgctgcgcacattgctaaaattggcatggcaaccaggaatgctttagatatccttgaaagctttttgctacctccaatttgcggtggttcaacagccaaaggaacttcaaagtctgaataagcataatccaaaaccacaaggtcagtaaagaatataacatttttctttgaaaatcattatacaatcagtcagagttttgaagggcactgaatgtgttgttcaacgctgtaccattgctcatagtgattaatgaaacatgtcattcaaattcaatagattcaaatgtcaaaatgccatacttggtactactgatattgcagatatcagaggaccataatatcctctttttggaatgcctgttgtcccccttcctgcccaataaaaatgaatttccagtgtatgatttgtgacgtt

SEQ ID NO: 27975 - DNA, 1076 bp, Oryza sativa
ccactcaatatgtactgcgacaatgagccaacaatgtttatgctcacaacaataagtcgagtggtgctgccaaacacattgacattaagttttatgttgtgaaagagaaaatccaggatcagaccattagtctgagcatataagaacaaaggaaatgttagcagatctgtatacaaaaggcttaccgcccagtgtgttcagagaacacttaaccagcatgggttttataggaaagcttatgatccttggattacaaaagggcctagtgtttatttctagatgaggaggtgcattgtagtcgttgcgtttgatggttcaatagtgactatcggatgaagcgtgctctatgcatcaatctattgagaagtaaatgttaagtaagagaagtaagaaaggcggagatcaaaggggagaatgttagttgcgatctccgggggaatcgggaaaccgatttcccactccgtctacgcgccctgatcgggggcgccagccgatctattggtagtgggcccctctcacgcagcacaatataaagagggggtgccgctgggcgcgcgaacaaaacattcgctgcatacacggactccccacaaaccctagactcctaccaatctgggacgcgctgaagtgaggggaaatgccctcgttctcgctgccgctaccgccgtcgcctacaccgacatcgccgaccccggggacatctacgccgcgccgacaccgtcggcatgtccgagtctacctctaagggtgaaggtatgtgtcccacatctctctctctctctgtttactcccacaagcaatcaactataccgctatgagcttagacatcaacccctatgatgtgcacctagtgatcctacgatcctaacaatagcaacttcagctactcccttatctcaacaaatcacaactatcttccatttaatttcttttcacctacttccccatctcaacaaatgaaaaccatctcccatttaatttcacctactttcttaatcacagtgcaaaactccagaaatacttatattttgggatataggggatattcaacatggttcagacagaaaaggcccaca

SEQ ID NO: 27976 - DNA, 1238 bp, Oryza sativa
tgagtgtaggagttctctaccctgcttttcttgcttgcacaactagttattatgatatgaattttgcggtactcatgcctctcatgatcattttgcaatattcttacaggtcttgaattatctggatgataggtgcagagttcacaaggaaacaatcaatctctgcaaaagcgtactgcagcgtaaatccattgactggatttcagtgcagcgaaatgatatgtctaatccaatacatgatgtggatcttgtgatttctgttggtggtgatggcactcttctacgggctagccattttttgaatagctcaattcccgttttaggtgttaattcagaccctacttgtcctgatgaggttagttcttcagattattgtcaagaaccatatgatccatgtttgtcaagttgcttttggcatgcttccaagcagactgatgcttacctgtatgcttggttaggtttatatatagattattcctttgcaggttgatgaattaactgatgaatttgatgcaaggagaagcacaggacatctttgtgcagctacggctgcaaactttgagcaggtaactttccattgcaattttttttggagcaatccaattcttctattacaggaactcgtactaatctaaacattaattaatgatacattgaacatgacgattcccagatacttgatgcaacccttgatggtagtaggcaaccttcagagttgtcaaggatctcagtgaaactaaatggacttcagctaccaacttatgctctgaatgatatattggtctcacacccctgtccagcaagtgtatcacgattctcatttaggtattgccttcaattctttgcgttaattttttaatttttttaatcaattctgatgttattgccatctcaggaagagaagcaacactggagagagctcgcatttaattaattgcaggtcaagtggtctcagggttgcaacgcctgctggatcaactgctgctatgctatcggcaggaggattcgtgatgccaatatcaagccatgagcttcagtatatgataagggagcccatttctccaagggatgctgacaagccactgctgcatgggttagttaagcaaggtcaacacatacttgtcgtttggtacaatgaggaaggcgctgtttattttgatggttcacatgtaatgcattcaattcagcatggagatacactggagatctcctgggtaccgagctcgaattcgccctat

SEQ ID NO: 27977 - DNA, 13386 bp, Oryza sativa
tttaccccgccggagcagtgagaacatggggggaggcaccccacccggtactcgaaacggagagagagagagagagagagagagctgtgaccttgggattggatacacgcagcggcggcggcgggggcggaggcgaggaggcggcggcggcgagcgggcggggagggtagacgtcgaagggcttgacgaagaggagcacgcggcggagcgccattggagcccctcgtctcggcttccctgccttcttgtacccgcggttcgtcgcgttggcggcggcggcggcggcggcggcgccccccggcgtggcgtctgcgccgtcgggttgtgcggtctgtttctgacgacgacgaaatacgccttcgaatcaggaacacgtaaagcagatacggctaagatttgttttatcagaaaagcccctgcggtactaatttatcacacatggtgacgatgttagaccttcacagtgcatcgcccgtggcgttctgccccgaccggccacgttggagattccatgccacggatgcatctggtgcatccaacctgaagcccgcgtagccaaagttgggcacgcgttcttcatcagttttggtaggcatatgtcagagcgaggcgagaaacggggcgcacggcgcgttgggacagggcgtgaccccgtgcttcacccccaaaacaaagctggccggatttggcgacatcaacggcgtggcgtcggctgcctagggagaaaggaagatggcggtggtggtagaagaggagacggcggcggatctggctcctaatctcgttgttatccctgttccgcgccgtcaaccgtgtcgtcgtcctccgctccaaagccgcctcagtcagtccgaagcagcagcttgacggcggcctcctgagtccactccaccgccggtcactgcccacatgcaccgccagatccacattgtccgctccacgccggcgagcttcgcgcaaccccggcgaggcccagggcgaagcggcgacggagcaccggcctcggcttgctcctcactgccgccacctcgaggcctccgtcaccgaggccaccgtgcccgccatgggagagggagagagaaaggggaaagaaggagcgccaccactgaggccaccgtgcgccgccgccgccaccgtgtcttcttgcaaaccgcgccaccggtggaaggagaggaaggggcgggggagttgaggcgcatgggagcctactagtgaaggagagggagagaaaggggaagaatgagcggtggtggaagaggtttcggggtggagatgatgagattggaattttttgtggtggggcccgcatgagaaaaagtttggtggggtccacctaaagtcacgccgcagtgtggaggagtttcgcactgttctttcataaatagctgtttgggctcccgtgaaacgtgcggcgcattggggtatgagactctctcgtacccaaaacacatgttcatttctgcacaatggaatagcggcaaggtttccgagcctctaaagtctaaacggcgtggctttcagaaaaaaactttctatacataatttatttaataataggaaaaggtacgaattactcccctaaactatctgaatttcccccttccttccttccttcccccccccaacgaaccacgaaaccggacatcgtttaccctgaactttcaataccagacaaattaccccctctcgacccaatccagagcggttttgtcctacatggcatacacgtggcaatccagtcagcattttctttttttatagtggggccggcccacttgtcatatactctctctcgggccattgggcgtaagtcgagcggcggcgggcggtcggcgcgcacggtgccgcgtgggagctagtggtgggcggtggcgacgggacatggagcgaggggtggcggccaccacggcgggatgtgagcgaggtggcagcaaagacggcgggacgtgagcgaggcggcaggacgtggagcgaggcaacggcgccggcgagacgtggaccgaggcggcgttgacgggatgtggaacaaagcggcggtggcgacggcagcaggatcctccttccccaccatcgcggcggtgcggagctcggacacgccgacactgcggcggccgctcccttccccttccctgcgcagagccatcggcccccttccccttccccatctgccccgtcagccactcgagctaccacttttcatctggcagctgcccgagcgaccttcgtctctgccgccgcccgccggcacccaagcaagctccaccgtctcccaaccccgtctcttgtgcagggcagcggggcctcgaagacagcgagggggaagaaggatcccgctacccgtgcgcccgcaggacctcgtgcgccgcttccactgctgttgccacagcctcgtcccgccctgacgagagcgacaggggaggcgaagctcgcttgggcggcaaatggcgccgcgccgccaccgtcgtcccaccgctgtttcgccgtcggtcggagccacgctcactgccgctcaccacccaccacagagagaagaaagaggatagagtgatttaatatgacatgtgggccctatattttttaatttttctggctgattggattttcacgtcaacgccacgtgtataccacgtaggattaaaaccactttattcgtttgtaccttcaaatatttatatcaccaatcgtttatacttcctccgtttcatgatataagttattctaacattttccacattcatattgatgttagtgaatttagatagatatatatatgtctagattcgttagtattattatgaatgtgggaaatgctagaatgactttacattgtgaaatggagggagtatctatttagtattgagcctgttcggctggttgggttgtgggtgtggggtagtatttcactcacaaaatcagcagcagtgtgccgctgtagcctggctaccaaacaagcccattctgtttttactcagcacaaaacaacacatccacgttcgcaagcgtgatattcaatcaagtcatcgtcttctagatgatagtaataaatctgagttgaatttgacgcaacgatactgtatagctattcattaaagcaatgctaataatacaactgacttattggctatgagaattttttagcctttttttagcccacacatataatatttagctacttacaattaatactcacaaaatttcttggttcttgtgtccaagttgaccgtaagtttacagcccgcttctcctctctctcctctcttctatcctccacctcaacatttaaccgacttacaccctcctgttatacttgctcttagagttatagccaattgttggctctaaatcatctatagtcaacttaatagccaattcatataatagttacatataaacatatactacacaatcaatatctggtcccacctgttatacacatatgtgtcttagagtccatgctgcagctggctattaatctgtagtccgctactcttatatctcatcttttatctccttaaaatatgtttatatctggcttacagtctgctattgtgcctgctcttatctagcagttacatgctaacattaatgtatgtgtgatttcctttctgtgataatgttaacgaccaaatttgttgcactagagtagcagatctctcaggccagtgcgtgtttttcgcgtcaagagataccaggtgaaaccccactcgttgctgcgggagttcagtatgataacaataaataaaaataatatgtagcatagctaaacaatataaacttacataagcactggaaacaattgatgtaatatgacttaattagagaagagagaaataacattaaccaagtgatgatgaactacataggtacataagatattataagaaaataatgaagatatatattgaaatattatatgaattttgtgggatgatgatttaacatgctttcattttaaaagctctaaaatataataaattttaaattatagataatataacgtatttgcatgatattaaatgtattgattgttagtggatgatgatgtgtcaacttgttagtggatgataatgtggcatctttgcatgttaagctttaagagttagtgggttataactttatagtactattgggatgatgatttaacatgctttcattttaaaatatctaaaatataataaattttaaattatagataatatagcatgtttgcatgatattaaatgtattgattgttagtggatgatgatgtaacatctttgtatgttagtgtgttataactttactgtaagataggatttcagaagtatgatctaccgttttgaggttatctagtaaacctatttataaaaggaaaacaatgatatttttttcattattatgagtaagcatgctatgtaatagtgctactgtggatcactttggaaagcggtaagaattgaggtgttattgaattcaatgcaactaggataattaattattcccaacataactgaaatcaacaattttgccttcctttcaattaaaactaggaaggtagcccatgtgaatacgcgggcatgcgtcgtacactaagtttgagacacttgtaacacttgtaagagcgaaatattaaccgaagaacatctatcacgatttctccgtaaattgctttagtcggcattaattgtttttataatttttaacctattagctttatattgtatcatatttaagtaatactatctataaacaattatttataatctttttcatcatttgaaaagaaggtagacttattttctttagaaaacatgtcaacgaaaagtaagtgtaaagtaaaagtaaggcatttttttaattgcatatatattatcatggtttattcgagaatgaattgggtgggacatgaacctccactaaatgtatgggtttatatagcctaatatgatagatgtagtttgacagccagtccatctatgaacatttcatgtagagtgggtcagaggttccatgcaagctaacgtgaatacaataacgacaaaatataattgcgcaatagtacttttaaaatgtgatgtaccatgaatacacgctttcttttcttatataagatagatataacggttagaaataatagttccactggtttaaaagtcataggagtattccagaaatgtagcttaaatattatggttgttttaatatctaacattattacgaagtaaatgtagctcaactagttaggttctttgtggtggaacatgcccactcgggtgcaagtcctagacttgataaattctttcaatggtaggtgacgtacccgtcaactgtgaggtgcgtggcgactttgtcaatatcaaaatatgtcagtctaatctctcagaagtactcataggggtatatgcatgtgtgtggtggaacttgaccactcgggtacaagtcttagacttgacaaattctttcaatgataggcgacgtaacagtcgacaacgaggtgcgtggcaacttcgtaaatgtcaaaatatgtctacctaatctctcagaagtactcataggggtatatgcatgtatgcattaatagggggtgagtgtgtgcgtgctgtgagtttttgcgtttgtacttaggttctaaaaaatatcaaacattatttattgtttctcttttaatttaagagataaaacaatagggagtggacgacaatattgtgtacatgggagggtgaggaggtggtgaagattttatttttctatttttctaaatgatttaagtgaaagccggtgacagggtgtttcattttttctaagaatttctatggtttttcctgtttttttataggaggtgacacatggcaacttaagattttttttaaaaaaaaatagatctaatagttaaaaataataaatacgtcaatttaattactatttattacaattttatgacatattatacggtgatttatgagcgctctagagcgtgtttaatttatttttgttacgtacaatgaatgatttagtataacataataaatgatttagtataacataatacatatgtacaattaattttccgttgttatttagttgccatgttaacttctatgtagtaaaatatagttaatgtgatcttgatttatttatttataaataaataaaactataaatatttataaaaaacatacttttttttatacccggaaggtatggaataaaagtacaaagccgccggcaagtatatctatgtaccatatactaaaagatcattaaatattgtctaataaagtcattcaaatgttaccatagaatatattctagagcacttacgtagaagatcgtttggcactcttggattggattgtttggcactcttggattggattgtttcctttaactggcataactgcatttttcgatcaatcacaaataaagatataaaattataattgttgtggtagctagagtcaaaagctgaccttaaccaaatatgtcattttggatatgtattgggagtgaaaacataaagtaaacatcgattgtgccaatatagagcccgaggggcattgtatgtatgtacatacgtacaccatcgcccaacatccacccacctccgcctcattcatcccctctcccaatgtactgtctctcatgttttcatcatatattagtcaggaaccctaatttattataatgttttaaaataaatagctattttttatcgacttatgttgttggaccattattaactatattcgaacttcttaaataaatatgttattttttattacattctgactattttcatatcatttaaataattattagaaaatatgaaaaaaaaccaatgatatatactttacctgttgaaaatatttttggtgaattttctttacatctatgtaaaatgtaggatttattactattgaaataccaaccaaacagtttcgaaaaattccaaaatgatttgagaatgttaatatcacacaaattaaaatttaaattggatctacttaaaaaacacaactaaattacatggtttgcatttttacatagttcaaattaccgttgtatatttgttaagtaaaatttgataccataaagtatatagtttgatgcgggtttttttttgaaaaattgttatggagttaattaatacatgtcgatgtcatttgccgcaatgtattttaattacgtatttttattagtaagatgaataatcaaacatatgctcaaaagtcaatagcgaaaaagtaatataaaaatatttagggggtaccctaggtaaaaaaataaaagtggggtgaatgggaatagaaaaaagagtaaatttcacaaaactacacattttatggtccaagttaacaggatgccacgtcctcatcctaggtggaacaaccatgttatctcacaggtgaatccattcattgatagtgtggttttgtgaaactacactaccaaaatatatgtacttgagtgccaattgttaaagtgtgtgtggttttctgtaatttggtccacaaaacgtgcaaggagaggagaggaagggaggttttaatctaatctaatggtgcaaaataatggatccactagtttaaatgaaaattgagggctagatgtttcccgtctattaaaacgccacgtggcggtttaggagtgtttgtaggaagtttaacggactttagtatataataatagatagatttaactaaatttatttatatttgtgaagttataaattttattttttatattgtagaaatcatattttaaagaccattgatttttatggatgtatgttttttttgtctttttctatgacaaaatttctctcggtttagcgttaaccagcgatgaaccaatttgtgagaaggattgctacacgtgctgatgtgcatgcttgtttttcctcttaaacatgcatgtctttttcttccttcttataaagttttatctcaaattacttatccgatctataatccgattacaccattgtgttcgttacaattaaatcttcacaataagatcttacatgattatattacgatgaaaaaatatttatatttgtaaattacttttattatatgcataagttacttttatcatatatataagttacttttaagatttgactaagttaattcttagacatataaaagtaaattcaataaagtctaaaagtaatttacatatattataaaagtatcttaaaacaaaacggaaacatactattgcatttttcaagttgaaaggaaacactagatggagtacaaaacagctaccactagttgtgtagtcacgtccaatgaaaaaaagtcatgcattaaagttactttctttttgttataaatcacttctataatatatgtaaattacttttaagctttattgaatttacttttatatgtcgaagaagtaatttagtaaaatctaaaagtaatttacatatattataaaagtaatttataatttttcatcaaaatataatcatgtgagatcttcttataaagatttaattgttacgaacacaacggtgtaatcggatcgtagattggataaccagtttaatagaaaattttatttaaagtataggtagatagggtctctcatagatggggagtggtagctgatttagacaaaccagctatcactagctgtgtagtcacgtcatttttctatacatgtgcatttttttcttctacgaagaataggaaagctttatcattttgtttctagtcgcgtgggtttgtacgtacggaaagacaagaagtagtgcttgcatcgtgtagcgcttgtatgttataaacatgagaaaattattttttttaataataaatctaatctaatggtgtaaaataacggatccaccaatttaagtaaaaatcaacggtgagattatatagtgccatgtggcgacttaggagcatttgtaggggtacacgtggtggcttgagagcgtttgtaggaagtttaatagactttcagtatataatagatagatgggcatagtcttcaacttattacccaatgtgaacacctccaaacttatacaaacctgtgggctttggacatcaaaagatccaactatatccaccctgttagtgatctgtgttttctaatgcacttggatccgaagagacaaattaaacaccatgtgaacaacggacatacactatcccgctttaaatttgtttaactgcaacaattttacacgcggatgtgctctcttaattggatttcaatgagaatacgaatttgctgctagtctattacttcgagcgtatttatggatacgtaaagtttgttatctgtaattggaaaaaaaaaagcgtaggctagtgaaaaaaaatcatgttttaatgtaatccctccatcagtccactactggagaatgcatttattgggttagtcaaaatccacaatagtctcggcttgagcagtaaccgggagtaaagattcaaaagcccaagggtacttttggatctttagtccattggtaccaaccaggactaatgatcatttttagtcccggttcaaaaggttattagacgcgtgtcagttcctaaccatctttaatccctgttggtcaacattttaaaaaaattaaaaatagcgcatacttaactccttatgtttttttctctccctcagctttctccctctctccttatcttctgcctcaaccttctccatctctccttatcctttttctctcctcccctcttctcctgatccactcttccttgaccggggtggcggggggcggggggcggaaggcggcggccggcagcgctctcccctctcccggaggagaggcggcaagcagttgtgtcaggggaggcagcagcagcgagcgggaggcggcggccagcggccggtgtcgccctcccctctgccggaggggagccggcaggcggctgcgtcggggtgtgggaggcggaggtgtcgggggaggcgatggtggcgtgcggcggtaggcattgacgggcgggaggcagctgagttgccatcagcgtcgcgcccttgtcctcgccgggagggaggagcgccgggcccgggccagcgacagcgcggaggaacagagcggcgagcgcgaccggcaggagctctaaagaaagagatctctttctttttttgttattctcttctccgatgaacgcgtgtagttgtgaagaagtgtaactgtgaattagttttgaagaatatggatgattttgttgttattgttgttgtgaagtggtgtagctatgaattagttttgaagaacatggatgattttgttgttgaatttgttcattcgatctgtgatgatttgggtaatatgcaaatagcaaaaaaacaatgaaagaaaaagaaaaaaaaacctttagtcccgctaaagatggtggcgccactaacctagttatttcaaccatctttagtcccgagtttagggtcccgatttacaacccgggactaaagaaggttgcaaatcggaactaaagagggtttctccaccagtggtccatcctatatagagagagtccatttctagcctcttggtgggcagattagaggtaaagttaaaattcatgagaagatagcattataaattagtttgcggtggtggatactgaaaagataaacttcttaatttgtgagtcgagagagcatgtagaaaattattaagaagtatttttatttataaagcataatgtagaaattaatttattttataaagttttactgttataaattgaccaaatccattcttaaataattaagatcatctgcttctgaaaaagacatgaaataattagataacccccctctttctctctccatttgctgagaagctgtggacccccgtttttataataggaatcaatcgtgtaaacaataccatttccctggatcaagtagtctggtacacacgaattcatagctgaaataccaagtgcacatacacgagtgtctagtacgaattattacatcataagcccgcatgcatagtcttaaatcatcggaccgagcggtccggaatacattccaaaaatagaagtaggtaaggcagtggagttaaggcagcggcacgccattgccacaggcaacgaccgtaattaagacctactgagcgccatcgtcttcatcaccctcctggtaataggcatagggatcctccgaagcttcatctccggcctcttattaagtttgtatattgcaagggtgagtaccaaccatacttagcaagccaccatagcaataatgcatatcataggggtattcaaaggatggatacggttcttttgcgcaaagcaagttttgtaattcttttcacaagcctaagacctagcacagactgatcaaattttagtaccagtgttcatattaaacaatgacggttctgtccaccatccattgtgatcccaaggatagcttcccgccattgagtcgtcatggttttctgaggacgtccaccttcctgcctctcaagaagtggctccatcagtatagaaatcatcatgcaatatcccatcccacacaagttaagaatttagagtctagccaagtgtaatacatgtcccggtgctcaataaccgcgagcacggctattcgaatagatttggtttactcacactgcaggggatgtacactttacccacactccgcgactgcccaacacatgagcctcgtcccaacacatgagacgcgtcacggcaaagcttttcgataacctcgcattggcagtacccgctccatgaactttacatcctcatgcactctaggcgtacacggtttctagcagtgagaggagttctggcgcacccgggaaggaaagactcacacatgcattaagttataactaggtttaaattctcacatggcagtcctaccgatggcgacaccactgtagacacccgcctcgcggttctaccaatggctgccccaccgtagagcccctgtctcacacatcaagaaaccactatgcatggatactgcctccgctcagctatctattccgctaggtctatacccatacgagaagtgcggttgtacgagggtcatttcatgcttaacttcatggctcggtccttaattgaccggggacggtactagccttttccggataccacccaaatcctccgtccgccccagtcaaaaacagttgtttaattttatttctcctttcacaaattatgtcatcaacatcatggcaatgtggcgctcatgtctccacatgccgcatctcaattaccttcccaaaggtaattgcccaagcatatagcatttgataaatatgagtatgcatgattctagagtggcatctctaagcatttgtcatagttgactagggactcatacgtaatcatggttacaagggaataagggtaaacaataatcaaggtatggcatattcacaaataggatgttcatcattgcatacaattttatttgtaaacaaaataatttcgcaattgggatcaacatgttcaaagaatagtgatgatttgccttgctcaaattcttgcgggtcttggccttcacttggatccgcaattccctcgggctctatagttacgtgcgaaaattgatttgaattcggttagaattcaaataaaaatccaaataaatccaaatggaagtcgaatgcgaaagttgattcttttttattaactttactattcgcgaactagggcaaacccaatttcgatttatacatcctaaactatttttgcgggcataaatattttgttaccataagtttttaatttaatctacccgagcattatatccatataataggttagaaatttctatcgcgagctaaatatcggacaaaatcctaaaattatcttataatattgtatgatttaatttagtctatgactaaacgattaaatataatacacggctaaaattcctagtaattaaatccgaattcctactgtgaatcgatgactatagagattaccaaaaataatctataataatctataagaattcatctaattgtttagttattaattacatctaaattactaccaattttaatctaatccgatcaagaaacatatttctataattaacccagaattttgatcgaaatactattacactctaggaatttccaaaaataatctatgattaaccccgaccatttttatttcctaaatcctcctaatctctcccctaatttctcttctattttcaccttttattcttttcaattttcctctctttctctttctctcttttattttctttttctttctctttttctcttttcttttctttttctttctctttctctcctttcttttctttttccttctctttctctccctcccgggttctctccttctttctttcttctttctctccctcggcttctcccttgctctctctctcggctctctctctctctcttcctaccca

SEQ ID NO: 27978 - DNA, 24579 bp, Oryza sativa
tcgttgttttttttcccactcaaatttgcccgatccgtgtgtgtgcccgatctacccgaacggggggaatgaaggcccggcatgttgttccagtggcgcgatctgaagtgtgtgtgtgtgtgtgtgtgtgtgtgtgtgtgtgtgtgtgtgttttctcgatgtggtgtgtgtatttagtggggatgggggttgtgatctgatgcggttcggtttcgctgtttggggggaatgctcatcgagagggattgggttgatggtgtcaggtagatctggatcagcttagccgattgggttgtgtgcgtgctggaaatttaggtagggatgtgagctgcttgggttgtgtgcatgctggaaatataggtagggatgtgatctgcgaagcctcgtgaatcacacctgcgtttttggccgggttggtggtggagatgggcttggatcgcatgggtgctacctatgttgaattctgcgcgcccacgtgaaactttgattcgtacggtagttaattttcctttttcgttttgcttatagttcctgttccgttcgtgtgctgaccatgctacgatttaggcaagtttttttttgggtagcaactaattttgttgctggtgatgaagccttgtcagatgctgagcgatagtgcggagtatctgagttgtagtgattggatcatcggagttactgggcaaccgcaagggtcagcattccttggtgatagaatttgtgttgtatgcttttagacaaccgtatgtgtaatctgtatttctgttctcttgaatgagagaagggaagggaaggttattttcctttcagtagagtgaccagtgaatatgatggagtgaggagggaaatgtttacttatcgcgtcacggctatcttgtcccaattgtggttctttgtgagtcacagtgctagttttgtttattagggtgcagctatgctaccagataccagcaggacacaacataccacaataagctactttgtaaaatgcatcacattgaacacctaatgccatgccatccttatttgatgtgcttaatgttctaaaagtcagccctaggcatggcgtgctaggagctatgtgccatgtcgcagctgtgattttgcatttggtggtgcaccttccttgggggctctagtgctgatattttaattgtctttatttatgtgatatgtttgctaattgctaggaaacctcttgtcaagttgatcttaggcggggttaggtgtctgtaggtgctaaccttgctgaccacctagtcaccttattgaacattgtatgcgctatgatagccagcaatgttgtgactggcttgtgtgcacctgtggtttagtgtacacctcaccgccttggctgcacagcatgactcattagttatggtgcacatgccccaaaccgatgttcgtactttcctcacaggcctagatttgtgtgtggttatttggtttctgtttgtgtgatttgcatgcatgatttcagggagttacactcgggcagggatttggatgtgggatttaatgcctatttggtttgtgggtaggcgtaggccctctttgtttaggcttataagcctacttataagtcgaaaagtctaagtcaaaacaaacaagcagctttttcatttggcttttttgaagccataagccactctaacactattaagccaaaagctaggttggagaagcttttttggcttatatgagatagatgtatgactccaccactaaacttaggacattaaatccactggcttataaatcatataagccaataagctgacttaaaagtctaggccaataagcctaagcctaaacaaagagggccgtagtgtgattgcataattccctaggtcatggtttaacttgaactttgtatcacagtgtggagatatattcgttttgatgtatagatcatgatatggtaatctgtgtgccttttctgtctgaaccatattgaatatcccctgtgtcccaaaatataagcatttctggagttctgcatggtgattaaggaagtaggtggaattaaatgggagatggttttcatttgttgagatgaggaccttgctgtcatcccagtctcagctggagaaattaaacggtagatggttgtgatttgttgagataagggagtagctgaagttgctatattttggcacggagggagttactaagtggagaaaagaggtatggacttggcttgcatataattgatttactagggtagtgttcttgttttcgtttccaggtaagtggggtcattctggcacataatgttttcagtgaattttgcctgatttcttatcatgtgtggtcacatttcttaattccgaaaaacatattataaccaattgcccttgcatatgatgaatatgatcttactggatgtgtgttcatttatgctgtgatgtttactgattccttttacatatctgaagggacatgggaatggaggttgttggaactgaggctgcaccagcagaggttaaagtaactgatggagaagtgaaccttttccaagagaatgaaagtaaagcaactgccaaggaacgtgaggaggcggttctttttggttcagataacagcacagctacagcaaatggagccgcaaatggcgctgattttgcacccccaaggatgcagaggaggactggcctgaagctaggaaaacacatagcttcttttttgtcaagatccgcttacttgatgacttttttctttttatgaacattgatcacgcggggaaggagttccagaagaagattcaagctcgttctcaaatttttgaggctataaaagccaagaaggtatggtcctagttcttacagttctagtacatataaatatggtcaatcttgtttaaattttatcctaaatcagcaagaagttatattccttacaacttgtttaaaacgactgtcatctgctattgatgctagagcctagaatatgttgccaatttgagcagactacgaaattttggtgatatgtctgattttggaacttaatctgcagaatgagcgcttcggtattatctcagagctgaagccattggctgctgagaacaagcaatacaacgaagccgtaagtgagaagttgaaggcgatagaacctcttagaaaccgtttaggaaagttccgcgatgaaaacaatgctatccgggcacagggtgcaggcatatgttcttcaattgaagagcttgagaaatcggtatggcagtacggttaacctatgataatttatttttctgttcttcagtccaatatttgattacatgtttgtgccttctccattgctttgtcctattagatcaagagattgaacgaccgcatatctcatgagagcatacccttggatgaggagaagcggttgatcaaacagattagagagcttgaaaagaccagaccgaaagtcatctccacttctgctaaccgagctcaaatccaagatacagtggtcgaaagagacgccatacaggatcaggttaaagtaagtatatacaactaaatatttgtttgtgcatttatcttcttgaaaaaaaaatagaattaataatggccaaacattgtttgcaactgttacttcagatcatcggggagggcattgatggagtaaagaaggagcgacaagcagtcaggtctaaaattaaggtcctggaggatgagctaaaggctattgacatggagatgggttcgcttcaagaagatttaactgctgccaatgccagaaaggacaaggcacatgaatcattggtccaattgagacatgcacgagatgcctatgtaagtcaatgtgtctttaatgtctttcatgcggggcatcatgttttctcttctaatactatctacctggtatgcctggactaagaaggagcaacacctaattttttaaagttacttcagttgtgttgcacacagtgttacgggacacacgggtccaaagtttttgacatatcaacttgtttctttttgccaacatgtctctgactcgactcgactggtggtgcatcttccagcagagtgtaactggtagtcaaggcagaaacgcattgctttgttggggaggggaaagaaaaggcattggggatagaataatcaataagtgtgaaaatgaagtctgtctaggttgtttttttttgtcagcggccaactttctatcctctctagagacttttttgtggataagtggatggaacagttataaatgtcctgggctcctggtatggataaacagactagataattttctgtgtgctagaaaagcctagaatgatgtaccccctttcgtcccaaaacagtcccaaaatatagctacttgtcaccacctactcccccatatcaaccaattccatctctcatttaatctctaccatccctcttctcaaccaagcacaaccacccccatttaatttcacttctctccttaatcatcgtgaaaattccagaaagtgcttatattttgggacaaggggagtagaacatatgctgcgtacaagagattttgtgaaatgcttaagtccttataacagaattaattatattaggtgaatccttgactatttagcatttgctaaatcagatacctgaaaatccatgacggatacggattcctatgtctatgtgccggtaacactggatttacagttctcagcaaatacatatatttgcatgtcttcacataacctcagttacacgtccttgagctgtaagacagattaatttttgttttccccccaagtttggtgcttttctatgtatatactgacactataattaccaatcgaatttccttcatgattcattgatacctctgcataagggtaacctgttaacatgtggtgatgaaacatgtttttagtaattaattgtctcatagttactactccctccattccaaattgatctacatatttcataggtacaccaagaccaataaaagctaataactctctcatactatatttactctagcaacaaactcgatgtatgcaccatccccactatctcctagccaatagcaaatcaagatattgcatgtgggttataaatacttgtgtgcatggatgtatgcatcaatgtccatttactccaatgcacaaataacgaatagacttaatttatgaacacaaatatgtagatcatttaggaataacctcaaaaaaactatatgtagatcaatttggaatggagggagtatatattagcatgcttaagctagctgcttttgactttgaggatgtggagttcatttgtctttctactgatacctcttatgctcccatgtttatctagaacgcatcattccatcaaaaccgccaacttctgagcaaagctagggatcttgcttctaggagtgagcttgcacaagtgcaagagctctacaagacacaggtgtgtgcgcctctggagcattgttttaataactgttcatcttttacgacttaacaaaaatgtcctaactaaacttctgttgtactctttataggttgacaaattcgtggcagaatggtgcaacagcaaggccttcagagaggactacgagaaaaggatcctctcctccctcaacagtcgacagcttagccgagatggccggatgaggaatcctgatgagaaacccatatttattgaaacagaggcagcagcaccacctgtagaacaagagcctatccaatcaaaaatgcctgcaaaacaagccaaggaagcgcctgctccccaagcagaggtttctcccaaagatgagtcccgcgtgaaagcaatagctaagccatctaaggctaaatcctctctggatgctgatgatgactatgaggccgagtctcccaaggagaagccaaagcctaaagaggttgatgtagctaagttgaaagagatcaagagacaggaggagatggagaagaatagacttgccctggaaaggaagaagaagctggccgagaagcaagcagcgaaggcagcagcccgtgcacaaaaggaggcagagaagaaactcaaggtagacaagtcgtcgtcatcatcatccctcttcctcgctgccacattgtaaccatgtttatctctctcgctttgccacattgtaaccacgtcaatgtacttattttcagagagaggagatgagggccaggaggagggctggggcagctgacaccgaggcgtccactgaatcggacaacaggtctgatggagcagcggaggcacaagcagaggacgactccgctcctgcttctgctccggtgatgagagaacagagggagagtgtccggtacagcagaaacgtcgtgaccaagagcaaggccccgctgccgaaggcgatcctgaggaggaagaaagcccagtcgtactggtcctgggctggccctgctgctgcagtggccgccgcgctcgtcgccctgcttgccgtgctaggctactaccagtactacctcccagcgagcgctagcaactgatggaaggaaagcaggcagcccccccttgagaattgcttacttgaacaattttgcaggtgagaaacagagtgcgtggtctgctgagacgtggactgaaagactggagatttgttcgttttcgttctgttagtttgatgatcggtggataagagtaaggaaaaaaaaaggatagaagttaattttggttgggacttagaatctcctatatactgcgagtgatctcatgtactcttaaactgaagcataggttgccgttctgaaataaacaatgccgcatgctttaggtttacttatctgttcctatgagccagatgaattgctgtgttgttccgttttgttccatgagcaatcgatgatcgtcatttgcatgctgcttgcggatgtgggcgagctaatgtcagtgtgtagcgtgggtttacaaatccccaaatctgtctgtatcgctctaaggccccgtttagttttccaaattttttccctaaaaccatcgtatcgaatctttagacatatgcatgaagcattaaatatagataaatgaaaaaactaattgcacagttaattagtccatgaagaaggaaatcgcgagacgaattttttgagtctaattagtctatgactagccataaatgctacagtaactcacatgtgctagtcctgcggtttccaggtgagttatattttttcattcgtgtccaaaaaacccttccgacatccggtcaaacatccgatatgacacataaaaattttcttttcatgaactaaacaggccctaaatcctgggcggggttcgcaaaattgtctcgtcacaaaaaccgcttcccagcagtttcatcgagaattgtgattgacaaaaaaaaaagttcgcataaattaacacttatgaaattataatggcatgattctaaatagttaaatagtaatgatatatttttaaaccgtaaaatttataatgacgtaaatccaactaaccctacaattgtacacccagcacttcagcacaagtctcttactttttggtgctcaaaagatttagtaaaattcaacaataacatggaataattttattttaagtttatatttcgggttgtttgtgtaaaggcaaagacccgtagattacgcatgtgcaaagattttatggaggttcaaacgctcctttagataaatagccttaagcctgttggtttgtatatattagttcaaaattcatgatatataaataaagccagctatatattgtgttgttacggagcgagttttcccattgacctaagggagtccttcaatagttgagcaaagaagttcaggtacgtgttttaatgcttcatggaagaaccaacaaggagatctagacatcacttctgattgggattaaggtaatgagccctatctgatgtcagtggggattgtttacagtaccgcagcaaacactgacgtatgggtctggacccatatgttagccaccgctactgcatcagcagtattgcagagaatttgcatcagcagtactgcatcagcagtattacagatgggggtgcacaaagccgggtcagtttacccaactaccttcctcctcttaactataacttatattcaatttatgtctctcgaaaatagatatgaacatacttttttaaaaaataatactacatattgtgaatttgtgatccttacctttacatttgagttatgacgaacaactttatcgattatataaaagaaaggatgacttcttatccaaacaaatcctatagtaatgtctttttaactttcagtgactaacatataaaccatcaaacgagtccatattaaaggataatactacgaagaattgtcatcccacatttttacactgccactatcagttaaaactgaaaaccagctcaccccaagctcaccaagaatcttcgagaaacttataaactccgccgaaaaatctcggacaaacccgcggcttcacacgcctccacgcacccaaaccccaccctagaatatcctctccttggccaccgcgccgccacatcagcctccccaatctccccgccccacgcgcgagcgccaatcgcgagccgcctttagatttcccaagataaggactcgatcccccctcacttcccgcgctatttaaactcccgcgccatctccaactcccaactcacactcgctcgctcatcgccatctctctcagctctcacagctcactgcatcaatggccgcggccaccatggcgctctcctccccggtgatggcccgcgcggcgccgtcgacctcctccgcgctcttcggcgaggcgcggatcaccatgcgcaagaccgccgcgaagcccaagccggcggcgtcgtcggggagcccgtggtacggcgccgaccgcgtcctctacctcggcccgctctccggcgagccgccgagctacctcaccggcgagttcccgggcgactacgggtgggacaccgcggggctctccgccgacccggagacgttcgccaagaaccgggagctggaggtgatccactcccggtgggcgatgctgggcgcgctcggctgcgtcttcccggagctcctcgcccggaacggcgtcaagttcggcgaggccgtgtggttcaaggcgggctcgcagatcttcagcgagggcgggctcgactacctcggcaacccgagcctgatccacgcgcagagcatcctcgccatctgggcggtgcaggtggtgctcatgggcgccgtcgaggggtaccgcatcgccggcgggccgctcggcgaggtcgtcgacccgctctaccccggcggcgccttcgacccgctcggcctcgccgatgaccccgaggcgttcgcggagctcaaggtgaaggagatcaagaacggccgcctcgccatgttctccatgttcggcttcttcgtccaggccatcgtcaccggcaagggccccctcgagaacctcgccgaccacctcgccgaccccgtcaacaacaacgcctgggcgtacgccaccaacttcgtccccggcaagtgaagtgggggaccgtagcttagcagtggttaattgtggttggatggatttgtggccagcgagttcgttgtctttgggttggggaagatgggtttagtgcgacgagatgatgatcgagttggtgttgtgtacactaagaagatgaagaagaagatgatgtttttgcaataatgattttattcgtttcccaactaatggtctaggtacttatccgtggtgttattctgattagcggatttctcatctctattagatcggaaacaaatactccctcgatcccaaaatataaccatttctggctatgtatagtgtaaatatgtagtctaaattgtttatattgtggcatggaaggattaattagtgctttaaatttacgtatacaatagattgggtcgaatctacgaagataatggatcctctgatttagtgggttaaaatccaaagcgtttggtcttaaaaaaaaaatccgaagcgcacaataaaatgagtctgctgctacaatatacaacttgttcatattatagcatttcacagtaaaccacgagtggggctgctatacaacggaatcccgttctaataggatgatatcagttaggtatcagggtcctgatacctacctctgagatatcatgtcttgaaacctaaccggtatcaagtgatatctatcagatatcagacgatacttatcatgattcctactacgtattaggtgatacttatcaggtatcagatgatttccaccacatgtcgaatgatacttgcaaggtatcggatgatacctagctaccaaatatcaagtgattcctactaggtattaggagtcgagcactgatgcgtcatcggcagtggccccaccctccacaccccatgctggagcttgtcgccggcggtcgcatccttcgtagtccatgccccacgtcggaggtcatcgtcgggggctgcatcctctaacatccacgtgcctcatgtcaaagctcatcgccagcggccatgtcttccatattgagtaggtcctccactatccacgcgccacatcagagctcatcgccagctgctgccgcgagcacgtcctccaccgtccacgtcacaccggagctcgtcgccggtggctttgtcatcctcgctccacatttgtccgacaactgctccatcccggccgttgtcgcagcccatgtccaccggcttcgactccgcgttcgaccactccggcaacaactccatccctgccgcagctcatgtccgctggctcagactccatgtcggaccactctagctacagttccatccccgtcgtagcccacatccgccggctccatcttggcgcccggacattcaggcgacaactctgtctcggttgccgccatagcacatatccgctggctcttggcaacgtatacttattgtattgttgttcgatgaactactcgtgacaacaacaaactactgagttttgtaaaatctgctcaaacagtacataacacgatttaaggctatataaattttagcaaccgtcgatggttgacaactataaggtagaaacgttgatgacgtgcgcatcgtcacaccgtaccaaccgagccaacgctagagctaacagagggcagttgtcttcaccgtgaagagatcaccgaaaaccaggaaaaaaattaacgttattggcaatgcaaggaaaaaaaaaacaattttcttgtccgagctcgatctgccaccgcgttcttcactatcaccaaaaatcttgtaaaaaggttgttatcagtagaaaaaaaaattcttccgctgtccgagctcaacgtcgtcgtctctgccttcgccactggtcgctcgtacgggtggatgcattgcatggtggccacttgtacatgtcagtttcagcacacgcacccatgccaataatcccgacaattagcctctcaacgttcgaaaaccagccgagtcgagtcgagcccactttggcaccttgcttccaccacacacacacacacacacacaaacaaccaaacaaacccaaaaaaaaaaaacagagagagagagagagagagaccatggtaacacagccaaacaggccacgttactactagtagtaggtaccaaccggcccagcagaaatatctcccggaatccaccggcggagaacgtgacactccctcggcgtctactgaaattcaccgcgaaaaactaggcaaaaatccggtcgccgctcgctaggcgcttggctccggctctggcgccgatcgatcgagagctccgatcctagccaatgcgaggccacgtcagccgcctcatcattcacaaaaaaaaaaaaagaaaaaaaaagaaaagaagagtaaaccgtactttgcacaggcagattgtgtcttgtttcactttgcatcaggtttaccatataattttactttacatcaggctggattgaaataagttcataaaattgaaggaaaatcttgtgaaatccaaatgaaacctttttgaatttagatcgaagtttcattcaaatctcaaataaattatgtacgtttgatgatgtatcctagagtaaagttaaagtacgtgctaaacctggtgtaaagtgaaagatacaatccaccagacatagagtgcaatttactcaaaaaatatttcagcaaaacaaatattttttttataaaagtgtatttacataattggcaagggggatatcaagtaccagaagcacatatagtgtgatggtaaagcatgcacagttgcgagaatgagagggtgcatgactatgcccatcagtacttaaaatcctgatacgaacaaatattatgcccgtgctgcattaccacgcttttcatagaattttagtagtgaggtaagtaattgactcttatctcgctctctttaagcgtgcgttagaaaacatgctcagaagaactagagaagaagtgagaagaggatataaaaaagaaggatgaaatgtgggctgcagattgaacctgctcactacaacaagcagttttcctataggctcgttcctagtttgtactgcttccatcccataatttggacaggatatgtcacatcctattctaggttgctagggccaaagggagtagttacgagtaccagcttgcaatggagtttgtaaaagtttgtgcacaaacacttgtccagcttactgaaaaggcctgaaactattgcccatcgaacagagtaaacctgaaattcagtaacctcataattttcacaagttagttcagctagtcctcagttcacatactctattctgtagctcattgaacaatgctaaagattctgcccatagcttcttggccacttcaacgttgtatgacaactgagaagacgttatggtccttcctttccctccaaagaaatactttccagatgagtcctaaagcccaatgtaaaaattcatcccgaaggttaaccggagaatacagtacatcatgttgttatttataatgtaattgtttgctaggattgaacaggaagcttacaggtggtgccaaagcggcatcaaggacagcatcaactcccgtatcaggttgttgtaggagattcaggaggcgcagaacagaaagcgcaagccaagaaagacatggaggaagctcccgcattatgcctgtctgtactacacctggatccgcagccctgggagcatgaaatgtcatacttcatatgaatagtaagcaacttcaatttcgaactggtaaaataagttgcattctcataaaaaaaaataaagggttggcatgaatcacaatagttttgataaactgccaagagcgtaatgtttgtcagtggcattgagatgagccatcctaatctatccttgcacttgcacaggaaacctatgaagcaatcaagtatattcttcaatgatttcaatatagtttcagtagaggttgacttggtgactactggacagaagttcttgtaaaattttaatcatctaaatgaaaaaaaaaatcacttccatcagcaataatttggatttgttcaacaaagaaaatatgcaaaagaaaaaaaaatgcatgcaaccaaaatcgatggcacatacatgacggagacaccagaagataagtgaagttgtcgatgaagctcgtatgagaacatcagtaaacaaactggaataagagaaagtgagcccaaaggaaataaagttgcattaagcctattcaaaaataaaagtgacgtacatttggtatactcataagtagaagctaagagatagcttctcctcgctggccaatgaccaaaccttactccgctcaatcctttctcagacaagttaatttctgacactggagatgtgaaatttgcaaatattaaccaaaatataataaccaaaccacatgtctagttctcatggagaaagaaaggaagcagatataataatggtaggatctgtctgaaatgcaacttaatattttgatatatcatcaattttgagctactataagagcatatgccaaacgcaagcaatttgcaaacatatgtactgattcaaaagtgtggcagagaaacgtctgtccgacaagatttcaaaaaatgcaatttacagcaaacaagatctgcgtagcaagggaaaaataattggacaaattgatgccaattaatgtatatgcaattaaaattattttcaatctaatccagatacaattcacatagttttcttgctatttataatagaagacttgacacttaccacatctgtgtgtgaaagacgttagattaaccacccgagaaggtgttgagctgttcttgagcaatggtaacagaatgttggtcaggacaaatggaccaatgtagtttgcctgaatcattctggaaatcgtgtgtggtaagtttcactcaaacagtagattaaaaaatgtaataatgacataagtaaagcatgtataagaagaacattagaatttcttctgcaaaagtactttcaacataaacacctactcatcaagaccgtcctctgtaattcgatatgactttgctaggatcccagcgttattgaccaaaagctgaatagagtgctccatatttgagtccttgatccactgattcagtgaagtttcaaacttctttattgacttgtaggatgacaagtcgatttgaaatgcttcaagatgggcatcaggttgttgatcccgaatttgttgaacagtctgttttgcacacatcaccacaatgatgacaatgggtaaatgataagataagacatctagctaaaagctccaaataatacctcagataacaattgtgaagaacgcccagctgacacaaaatagaatgcatatagtgttttagtccaataataccaagcgaccaacaaggttgaatcaattcaacaacaaaatcaaggaatactttctactccaaaactatagcaattggcaagtaggaaacaagtcaatatgaaatgaagtaacatctacaattgtagatgcaaaagaagaccaactaaccataggacaagtaatgaacattttaccaaaagattgcatacacatttgcgtattcaacaaatgaaaagacgcactacttttggattggaaaggacctaattaatgaagaacaagagcataagcttctacaggttcaatacttcacgaaatcaagcaacagcaaggaaattagtgctacaacaaccccatgatttggaccgttggcaatgctcgagtcaacaaccaaagatgcacacagggtgttcgatgaaatgcccacacaagcaccgaaaaagaaacaggcgacccaccgaggatgacgtggtacccctcccgcgccagcgccgccgccgtcgttttgcccagccccgacgtcgtctgcacacgcatacacacacacacaccccacccaccatgagctgagcacatcacaagacggggagactcgaaagagagagagaagcgactccatctgcaagcaagcaagcaagaaagagcggaggcgagagccatcggttaccccagtaatcacgcagacggggcggcggcggcggcgacgagcggcgtcgtcgtcgggctcgggcataggtcggaggcgagggacgggggcgccgcggcggaggaagaagaggaggatgtaggagtagaggagggagacggtccacaggacggccattcgccagaactcccgcgagcacaccatgcggagcgcttcgcggtccatggccgccggcggcggctgctcggcgagttgtcaagttgccaccgggaaagaggggccacaacggacggttcggattaggggagaaaattgagattgtgccgtcttcaaaagggtttcgctttcgctcaaatgccatgctgaaaataggattagttaattaaaatgccacttttaactgaaggttgcacgctataatattcaaactgacaaaaatattctgttgctatcttttttccgcctttatcgtcgacgacgcactgccgcaagctgatggggccgccttcgtctccaccttcaccactcccaaggcgcatagctaccgctccctacggcaggggaaccggatccgtccaccggcctcagccgcctccgccttcactaagcccaccaccaccgccgttcgggaagaaaagggaagaaagaagatggtagctggcatgtaagtcccacatttttttttctaacgacctagctatgggatctaaattgcatagtttgtatagctacgggtgaagatttatggaatcaaggatacgggtgaacttatttcaagtagctaatacgtgatggtttgatgggctttccatggctggtagtacttcggctgtttttaatgggcttttgacatttaaaagctagtggactgcctccctttgctcaatacttcaggggcccgcgagtgaagatgccaccctagccctggccccgcacgatccgcggatagatatttggccccggccccatagggggtggggaacttcggatccgacagggtaattgccatccctaggcgagatctgacggtagagaaagttggacttaagaaattaataggacacaactacgaaactactagtcgttggtttgttttagagcagtgaccacaccatctcaagtataaatccccttttagcttaaaagaaatacaattgtgcatatcttttgttaaccttttcaatgacttaaatcttttaaatcacatattatttttaagatatatttgcatccgtgtactccactcaaaatatttgacaaaagagatccatgttgaatatattcaaacatcttattaatttaaaagcattttatttaaattgtagaagtaacttagctatgcaatagaagtaactcgctatagcattagaagtaattacattatgagtgagtgaaattagaagttatgtggagtaaattcaaaagcaaagtttagagaagatttttaagtaaatacatttatcaaagtaaattcaataaatcctgaaagtaattcacataaatcataaaagtaacttagtaaaaaatggaagtaagttgttatgaaattagaattaaatccgttgtagggaaaaaattatgatctatccagaaatcataattagcacaaattatagaattgactaaaaacaataataataagtgtaatcaactcaaagcattataaatatattagaagtaatttaatcaaatctaaaagtaatttttatatatgataaaagtaacttacgtatataataaaagtaattcataacataaatgttttttcatcatgatataatcatataagaccttcttataaagatttaattacaatgaacgtaatgttgtagctggatcatagatcaaataaataatttaagagaattttctaagaagaaaaaaagcacgcataacctaatagaaaaaaaaacttgcatgtctgtagacgtgtagtagtacttctctcacatatggctggcgtcgctcgttaagcctaaatcgagaggcccctcgaagtagattttgtgaaattaataaccatgtgtttggtttggaatgggataagttaggtcatcataggttgcccatatttcctaataagacaaaaacggtttattaggaaataaaaattaatttgcagttaaaacttttatgtgtttttagtgataagtcaatgctgaaaaagaagctatgtgataatatcctaaaatcaacttgaaattaaatttgaaattcaaattttgccttttttttttcctttggtttattagagcaaccaatggggtatttaggtaaggatgaatttttttatggcgtttgattcgggacagataaggtgggatgatcactaaaaggaaaatattattccctcaaaatctaggttagctccatacgactaatcaatttaacacacttgctctttatcattagcatacaaaccacacccttttacagcatttcttaagaaatatgacaattttatctctcatgccaaaaaacacatgaatactacgatctttctctacctctcactgtgggatttttcttctttctttttttgttgccgatacttttattttattattgtcctttttgggttgttgtggataggaaaaagagaaagatgaggtggattcgcgaaagggcctgtagcctagtggttacaagagcctcagtaacacctgaggtcctgggttcaacttcccatgggagtgaattttccaggatttaacggcgttgtgctttcagtagtaggcgacgtacccgtcgacagcgagcggtagggtttacgtgcgtgtgttcacaggggtgagtgcgcgtgcgttgtactgtgtaattcgtgtaattcttaaaaaagaaagatgaggtggattcatcattttataggccacatttcctacccatttgtacagtttctcttccttttttcttgttggccacatttcctaaggagatactccctccgtttcacaatgcaagtcattctaatattttctatatccatattgatgttaatgaatcttttagatgttaatgaatctttcattagaatgacttgcattgtgaaacggatgaagtatcaggaggaagaaaaaaaatcctctttattcaggaggaagaaaaagaaaatcctccttgtaataagataaccaattcatgaactataaacctcccgtgcgaatgtcagagcttgttgatatgcatttgtcttcgcaaacacaaaaagaacatgacagctaaaaagcatatacgaacagtttgttccatctaaataataactaatgtacaaaacagctccttctatcgcccctgtttagaacaaagaaatgaaaaacacgagaatatggaaaaaaaatattgtaaagtgaaaaactatggaattcaaaactaacacaaaaacaggagatgtaggaaaatcccacggggaaacataactataggattttttttataaaattattttttggtagcatcatagaaaaagcataggaattaatagtcaaaaggaaaagaaaacatgaggtctagcctcatgttaattctccaaaatcagtatgaaatgagcaattcaatataaatgtaaaaaggattttgtagaaattattcctttgttccaaaggacaatgtaggaatatatttttttcaatggatttcaaatccctcaataatttctccagttttcttttgttccaacggagatcacatgaaaaacctaggagatcaacaaagtgacaggggtttcctttcgctcactccatagagtggaggattagcttcctttcccaaggaattcaacatcttccatttgtactgacttccaaacaagcttctagggaaaaaattccaaaggaatgcaaacctccagaattcctccaaatgtaccttgttccaaacgggaatgggtgatttcataacgcagatgaaaataacaagaatcattttactccagccgagaagataatgtaggacatggccgagcaaaaatgttccccacgaaaataacacgaatgcaggaaccagatgccttgcataatgatatactcaagtccaacgcagcaagtcacaccagtacaaaacttattcacaagatgggtatatctgttgcaaactacagctactggaaaaatacacacatgcagcggcaaaggtcagcaaaagaactggattagggtaaaacatataatcataataataaacaaatcgacctgtaagtaatcccccccccccaaaaaaaaaaggaaaaaagaaaaagaaaagagtaccagcatatttcttggcgccactgaacagcatgtgatagaagggccaagttgctgaattgaactcccccgttcaaatcaatcgcctcagataaggcaaactccgcagtggtagctttacaatggtagtgttcctcaaaggaggatgtgacaaaatcattccaaatcctgacttcctcagtgggtttcatgattttgtttccagaaaatgtacatcgagttcatcagatcttcttgggaagattataggttttctttaggaacttggtagccgtctcatcataacggtagcacagaactcgcaggactgtgttgggttcgttcgggctccagtgccctgttgttggtggcaatggtaacctattcttggctccagatcgattagactcagccatcatgcgtttgaatcggtcaataaggctctcggagtctgttcgtaggaggggtaggacattcttgacctgggaggatgccttatcgaccaattcctctggcaaaccatcaccatctgctaaaaacaggtctttaagggccttgaagtcatcctctattatctgggagtcttgacgggtgaaagcacgcaaaggcccaccagcaagaagcaccagcaagaacccatcaaaagtggctttcatcaatgcggttatagcacggttccgcactttgttatgcaccataccagatatggtctctagtatagggtcgagttctctcaacaatatctcgatcctacttgatgcaatgtcaccaatataaaggatatcccagagaacgtgccccaaatcatagaatgtcaccttatatgcagttgtctcacataactgctgaatgccctcttgacaggctgtctgacaaagctcaaatttgatgtccaatccatcggtaacatctgcctgagctgactcgacattccgcaagcctgtttttatcttcttctctaagttctcgagttcacctcgcacgaattgaagcgtattcaagcgtacacagagttgaggaagggctaagggatcagcgccattggttgttccattttgtgatcctcggtactgtggattctgtggcttttcctttttcttgaacaatatattcgatcctacctcgcatcgtgtcaacggaggtagttggggcataaaagaattccttgttcctgtaattaatgcatgtttaaaatatgaacatttgtaccctgcatctgaacaccatgttatagaaaaatgtgccatgagctcagtacttaccacagccagattttgctttagacacaaaaagctgtaggcttctatcaagtccaaacatcaggtcaggaagaagaactggatgcattggaatgggcaattggaaaaatgcatctaatgtttcaccaaccatccgaagcatctccacacaagagggagcaatattctctctgttggcagctggattccaagtctgcatgaaagacattgacagacttagtggaattttagaacaggaaaatcaagctaagttaattcaaacacaatatgtcaagaacaagttggactcatcattcaagaagaatattcaggacaattacatctcacaagttgactgagccaatctaacatttggtttacacatagcatgcatctggatgtgactcaactagctataattttttttccattctgaaaaactggtgtgatgtcaaaattttgactgcaaatcaaacaaatgcggcaattttggcagccatagttgggataagatgagagaatgaacatatatcagagcccagattggagattgcagtcatcaatgacacatggatatggacggttcaggaaaaatagcagataatgtttacaagtgttatgcatctacatgcacagagtaatttagtcttatcgtaataaaaatcacaacaacatgcatcatcagttactaaattaagatagtttctgtttataccaaaagaaaaaaatatgtactgtgaaataaagtaagagcacctcttgtttcaaagtccgatcaacccatcccttgagcctgtctatcctttctttaatccaaactttcaccaggttagcaattgcattttcagcttcatatggtggcatctctctgattaatgacttgcctccatcatcactatccacagaatcttcaactgcaatattaacaagatccttctctaatttatcagcagccttaagcacttgaaccgtatctggggtcagctctgtaagtccagctatgaactgtttcagctcatttccaaagcaagaatgaagggtggcaacagcaacgcctgaagcaaggggatgccatgtctttaaaattgggctgtacaaatttttctccttaattgctaggtcaccaatgtcctttgcaaggatagacagaacaggggtagggtttcttgatgaccgcttggaatctgcttcttccattctctgcaaagtgaaagctgtgtcacattactgtgctactgcactatagaaaagacgtacatgaaaggatcaactagcaagatttgaaaagttcaaattatatggttcaaaagaaacaaaattactaataggatggcttgagtttgaacaaaacagtttcttgtggttgattaccaggaatctactttctagcttttcttccccaaagcgcattagccattaaaagtaaagatattgcaataatctaaacaaggcatctcagcataccaaagtatggaatataacatttaatcaatatgaatcagagtgagaaataatagggacttacttgagcaaaagctgtacggagtgaagaccttatgtaggtctctatcctgctgcgagctacgtcagtctcttctttcctcctccgacggtattcatgggatatatcttcaacaagaacccttgcagctgacactccaattgacacaataccttgcatggactcaatgttacttgtattgaaggtctcatggtaagccagaagtcttttctctgtccaacccattattgagcttaaagttgaactcaacactttgctgtaatttggatcttttgtggttttggcatcctttgcaacttcggccaactgattctccgcagcagagagcaactcaatatctacttgcccggacataacaaaatggttgaacaatgcccaagcaaagcaaaggttgtgaagcatctggttaattcccagaataccccaggtcttctttaagagctccatcacctcatcaatctcatcaacaacagtgccatcatcattatcaaagcaagcttctaccaacatctggtatagatggagattcaaggggaaaccatcagcccagtggcatccgtcagaagtcccatcatcagacctaccagcaagggacatgacagcactacgtaggacctgcattgactcagagtttttcccagtttcaagtggtctatcgtatgctccacgtataatttgccgcagtcgttgtgcagaaacatctgatttgttcaatggaacaagtgggtgaacaagcaaaccagcctcaagaagcttcaagttcctactctgccatgcctcgtactcttgaggatcagggatatctgatgccttgaactgctgtaggaattctaagggcaagaccatagattcagcacgcctgccaagctgtttcaagaaaaagaaaaatggagttcaaacttggtaccaacaattacaggaacaggcgttaagtcccgaacaataatagagcagagtagagtatctttgatatgatatatacaataagatcatgtttggcttgttgacatcaaacatgctaaaagtccagaaaacacaaacacacattcagcaacatgtcaatacttagctatgtgtttgtttaaagtttaaactgtccaatgttgttgatctgttaacacatctatcaaacagaccatgtcataggagggtatataaaaacataaaacatatacaataaaaaaaataatcaggcagctaaagctaaactgccaaacttacaatggtcatctaaagcctgcaaatttgctcttttggggagaagacttggcaataaagatctaaatatcatcattcagcacagtttaactaagaaacctactgaagtggagatggcaatgaatcaaccattttcagaatgcatataagacaacttagagcatgaaggcaaggcaggaagcttaacactcagggtgtagatttaggatgttttggttatgacagagtagcttctgcaattaagataatccagcaattaagataatccagtagataccctcgctcctccctcctcccacactcagtacgctgcactcagcactaaaatcacaaattttacgacactttgtagaactatctttcttcaatactgcctctagtacatggatgcctctagtacattgctcatggatgactgcagtacattgccatatactgtttccattcctcaaaactgcggtaaaataaagatgtctttgttttgtagtgagcatgacaagaataaatggctaattgtccttttgtggagacacatccaatctacaaacttatgagcatgcataagtaaaatagcaaaaaacatttccgtcactttgtacttatcaaaaacagtccgatgataacattacgaacccatttcagacacaggaaaaatcatgtgtgaaatgaattaatctacggtgaaattgatataaaatccatgcattcgaacaaaacactaaattattgtccttgttgacattataagatatgctagcaacaaccatttggatgtgactctatcgagaagagttggtatgtatagctttgctttgtacaatgcatccgagtatcctactactgaagcaaaaccgcagatcaagctaagaatcatggtattgaaacagtcatagtaataataataaaaggcgcacataaaaattatcttgagaaaacgtatattgactaagttccaacttccgaggctatatgataaacaaatcacagaaaataactggatatactccggctgg

SEQ ID NO: 27979 - DNA, 14910 bp, Oryza sativa
cctctctctcgctcatttccccttctgttgatcggacacaacagcggtgccgacgccatcaccgccccatatgcccgcaacgctgatggtagatcgggcttgcttagccacaacagcaacaccgatgccattgctaccccacatgccggtccaccgagcaacatggagggcaaggcggtggttgtgaaggggaagatccggtcgctgttgactcaagcgtctcccatccctcccacagcgacgccttgccgcctatcgcttctctccagcagcgatggtgtggccaccgtcgatgcaaatgacctggccactaatatatgtaggagacgaccaacatgcagagaggtgcagtagcaacgacctcctcaacagctaggcgcgtgaggttgtgatgtatgtgaacaagagtcggcgcttcgctgctgcgctagccactgcctccctcggcggcaccctccttgtcgcccgtcgcatcaagtggagagagaagaagggaggatggaggaagatgaaattgacatgtgggtcccacgtctagaggtattttggtctatatgatgacaaaaaacgtgaaagcgatggcatggttttaattttacatgtatttcgacgatatggatacgaatagacgaagagcaatgacatttatctaaaatggcacatttataatggcatgatccaatttacccaatttcgaatggttttcgagagttcaaatataaagaagaaatttggacaaaatttgatcaaaatttattaaaaattggcgaaacttgtcatatgctaggatctaaatccagtactcgattagaaaagtgaaccctgatacatgtataaggttttcttttgatttctgaaatcattcactaggttaatagctttttgtttcttgtacttagggaaagtttttctttgctatatataattgcagatatgtaagctcagacagtttactgatactaatttgatcaagtgtggcactatgatagtacaacttgtctagatttatagaaaataaatctttatatttgtagacagaggtagtaatataagtttaacaattggctcgtttgctgatgacgccatcattaacacatctttaatgctaaatgattaaatttatgccattaacatcggtgatcatggttggatagcttagtgttgttctctttaccgatggcattcgtgatgacttctaactgcctaccgatgaaacaaagatggagagttagcatacggtgacattaacgatcaatatggtttaatgtttctcattttgatgtaatattctactacagcttgtatgaatattgctcaacaatataatattctactacaatttgtgccacatattcatgcctaatgatgcgatactcatttcgatactcatttcgatgaagtttcttatattaggacatatatacgttctccatccaaaaagagaatctagactacagtcaatatagatttatacgtatttaagctcattatctgaaacggcgtatttttagcgcaatattgcaatgactaagggcggagataggagtaggacagttagggctacaactctactcctgagtctaaatatctatattagctagaattatactttaaaacttcaaaaattagaagattaaaggcgaagctatataaattacattagttgagctccaggcttagaagaatcttggttctgccactggcgacgacgtatttttggaagccagaagttgtcaaggcaaatgcaataatggacacatgtaatcttatggggtgcatttccaatcgtaaccgcagcaaaaagttttcggccagtgctgatcgatctccattaccgtatgtgtcaaggttaagcaaggacttaggtaccatcaactaattcgtaccagttgtcacccagtaattgcatatagacccttacagtaatactccctctgaaacaagttacaagacgttttaactttggtcaaaggcaaattactttaagtttaactaattctatagaaaaaagtagtaatatttacaataccagcataatttcattaaatctataattgaataattttttataatatatttgtcttaggttaaaaatattactacgtttttctataaaattagtaaaacttagagtagtttaacttttatcaaagtcaaaacttcttgtaacctgaaacggatggagtattttatatataaggaaaaaaaagagaaataattgcctagaccaggtccttcgaagaatcgtcaatctgtccagttgtctggtgaaccaagtccacgaggatcgcaggaagtgcaggtcctacgtggcaggtatcgctggttttatttcaagtgtagcttcaagttcaagagattccagtttgattggaataagaaaaagatatgtaataaagtgttctataataagaaagcagatctcgtagttttaccatatttgataagaaaaaatacatgccgttataaaaaaaaagtacgagcgaaggaaacgatacactataatgggcataaatataatgggcatagttggggttttctctacggtttttagaaaacaagtttaaatgagaggtaagaggcatataaaatattgttaaattgtccttttaatatctgccatgttgttggcaaattgaatttaatgaatattgtctaggctttgaagtataatcattttagtttatcctctccacgtactttccttagagagctttttaaaaaaaaattgagttaagtgggttttgtctatagcaaccaaactgtaccagttgactgttagaaagcatgtccaaaataagaaacctctatgattgatactattatgcatgcagcaagtagagtaaggaaagttactctaggataaaggagaagtttattttataactctggtctcctaaaaattatggaaaattcggattttgggcaccccctaaagtatcaaaatatgttctaatagttttaagtcattactgattgtccattgtttaatgggctttatttagaaaacgtgcacttcattaatgaaaaataaccactttgatataaagtttattacatatagcgatttttttttgaacaatgatagttgtgtggattttagaagtaatatgacaaaatattttgtccatactcttgaagtagtgggtcaccaaactatgcttatggtggtaattatgttgctattttgatagatagggatatctttacaaaaataataagatcgaattgaactatcaattgcacatgatttatggaaacacaatgtatagattaatgtgttatgtgccaaccaaaagtaagtatggcactagaagaggtaaaccttatcagagccgaaaaatcatcttgtcacggaaccataaaaacttcaaataaaacctcttagagtatatgagttctcaggttcacaaaacctcgtatcaaggcggatccaccacccgacaaacttagactagctagctggatgcacaatagaatttgactgtttttgatgaatcacaaagaaaattttcataacaaaaacacattgatataatataataggatcaatttggccatgctttagaaatctttctaattttaaggtcggccactgcctacggttgagttgaaatttaaacgacctatgcgttcacattcctaatcccgccgatcctgcaaatgttaattaaatcgctgtgagttttttatgtataagacacagctgcaaatatttgcatgtatgaatttcaaatggacgtacgcgttaaattaaatttcaacgcctcgtgaaaagaacaattcaatttcaacgatttcacgagaagaaaaaaaaatcacggttcttagctgttaaacttctccgatccgatggtagacgcgtgatcgtcgtacacagacgcgtgaatataatgtaggactacggttctcgtacgagatacaggaggaccggccgttgaaatacatttgaaacttttttactgctctttaattaccattgcgcaatataatggagaattaccgcggccgatcgaaatgaccgggatataacggttatttttacagtcacgccttaggccgtatttagttccacgtcaaaattgaaagtttgactaaaattgaaagtttgaagaaaaaagttgaaagtttacgtgtgtagaaaaaaattgttgggatgaaaaaattgaaagtttaaagaaaaagttaggaactaaactcggtcttatctaactaaacacaggattaatccggtggtgattaatgaagagtgtgctgatcaatgcgcaaaattagagcacattgtattgacatggtacacgaatttaagtgcaatctagtatataaacttgtaaaatacttattttttatatgaatttgttaggtgtgtaccaaccaaaaaaaataataagactaattttgctaggctctcatcggatggcctgttcagccaaagaaaaagttaaattttaaattttcaaacttaatttggaggttgattttgagatattttcaacgtaatttcctttttatattagcttttaagtcaccaataacacatatataaaagttttacctacaaattcgtttttattccctaataagccggcttattagggaaaaagccaaccgatggggaccctaatttaagtgttaacatatcctctcttataacccactaactctttaagtttgacatgcaaagatgccacatcatcatccactaactatcattacaccatatcatcatccattaacaatcatgacatttaaacatcatgcaaacatgttatattagctataacttttaaatttattaaatttaagatcattatgtttacataatatttcaatgtatatcttcattatgttttataatatcctatgtatctatatagttcatcctcacttagttagtgcttaaatgattaatgtatgtacaaattatctatatcatttcttctctaattaagccatatcacctcaattgtttatagcctttaaatgattaatctacgatgcaaactatcttcctacttttcctctttcataaattcgtaccaccttacgtttacatttgaatcatcaatctacatactatttaaatttaaattatcataaaccacactaacttacttaatctgatattatctagctattttatatgttatttttatttattattgttatactaaattcctacagcaacgtgtgaggtttcacctagtgttatatgataagaatgctacctatacatataaatgttaaatagagatgattaattagctggtatagttatgggcacacggctgggccacatgtatgtaacccccaagttggttaatcaaataaatagtatgcgtgattaattggctctatcaatcatatggtctgatcctacggcgcagatatatatatatatatatatatatatatatatatatatatataggacactcatatggggcaccatggtgcccgggcaccatggtatctaatgcacaaaattactcaaatttttcaaaattttcaaattgtgagtatatacctagttataataatttgattcatacctatacttatcaacaaaacaactcaaatttaactttatttcacaatccatgattacatacctaactaattatatatatggatgctatatacctagaatcaaaatctaacaaaaacaagttcaaattcagttcaaacttgctttaaactagttagtaaagtagttaatgttaatacctaagtaattgaaaaagtttcatactcatttgaattgggtatatactcaatttcaacaatggtgcccgggcaccatggagcaccaaacaaatttactatatatatatatatatatatatatatatatatatatatatatatatatatatatatatatatatatatatatatatatagacacacacaccagctggaacgtgccaataattagaaaaatctctcgatcaagtcaagcactagtgtactacagctcaggcatggcggttgccaagcatgcgccagaatgtttctgcgagggagaaacatgggatccatgggatgcccaaaacgatggcgaaataatctgtgtgcattaatttgacgaattttcggtaggcgaaactgacacgcttgatcaagaacagctaattacaaagctagctagggccacatcctctaattcacacatgtacaccctgtttagaagagtttaccttttaaaatatccagctccactaaacagcgcaaattctcacatatattctgagaatatatatgtaactataaaaatgagaaaacaaagtaaaagccaaaatctagcttttataaattctcataagttactaccaactgcatatagagcctgaaaagacggaagtggactacaataattttgaagtcgctaaaacaacttgaaagcacattattttaatcaggcggtattgtatttttatgcattttagctattttttctagaccgaggggttaattcgaagagttttttttagagtgataaagttgctagaagcataaaatgcacatccctcaacagatggccgtggtagcctggtaggcgacgcacttcctccgtcccaaaatataagcatttttatcattgtactaagtcaaccattttaatcatgtaaaattgatgttattagatttatcattaatcaaactagcataatatgtaacgctttttatttaaaatattttatttttataaatattgttggttaaaatagtatctcaaaaactatgtcaaagttaaaaaatgtttatattttgggatggagggagtaccgtttacagacttgggggaggtgtttacagggtatactcactctattctgaattgatcaccgcattccatgtttacactgcacaaggaggagaagattgatccctaatccatttgatcaacgcattgaagaaaaagaaaaaaaatgttgctttggtgaacgcatcattcactacaggatatgaagggatgcaactatgctctgtatgcatgcacccaaacatttactttacgtagagaaatgaaaatacgctgcgaagaaatacctaatacgctgatcatttcttaaaacattgaaaaagtactatataatgaatatttgtgaatgaagggactatataatataattgattaataaaatatctagtactctatccgttccaaaatatatataaattctagcatctgatcgaaatgaagggatgcaactatatatgctctacatgcatgcgtcgaaacatttactttacatagagaaatgaaaagacagtgagaagaaatacttaatacgctgatcatttcttaaaacatcaaaaaaatttatatgatgaatatttgtgaatggagggagtatataatataattgactaataaaatatctagcactacatctttcctaaaatacaaattctagaattcaaaatttgctccaaactataataaatttttcacccacactcctttctgaactaatcacaacatttcaccactttctcttatcaatcaatcataatctttttatatttaattctatttactttctttaatactgtgtccattaaaactcttcatattttaggacggagaaagtatcttataaaagaataatttaataaactataggatatatgacactaatgattgaagactaatcgctttcaagggccaggacaacgctgataagtgattagatattgtgccttattgtttggcatattcatatgcttatcaaccaaaatttaaattttcaacgttaaatttggagttgattttggagtattttcatcgaagtttatttttcagcctttgcttttagatcgctaagaacccatatataaaagttttattcacaaattgattttcatttgcaaatatgccatttggcacgatgaggctgattgtatctgttctgggttgtcgtcactatcgtctagctgacagtaggtacagtgctgatattttaggcccacctgtcggtgaaatcgaaactcgaaaggttgttgaaccaaggttgtttcagtacctctgtgttggctgcttggtgctctatctctatggagagctaatgggcactcggacttgtccattcaattcagcaaaatgcttgtacacattcttaggtaaggtcaacttaattgctcaatccatgagagattttttttccttttcttcataaaatctttcagtgtgtctcaaaaccgttttataatcacttaactttctaaatcaacattccaaaaccgttttataattccaaaaccgttttactccatacgggtatgtgtgtgcacggtcataaagagtatgcgcccgttgtgagcatctgcgattatactgtgtttccccaaaaaaagttgattttcagaaaaattttctaagaaatgttggtgaagatttttcttttaaaaaatgacaacgtgctaaggtctcaagagttttgctcacgctaatccggtaactataatcagacaagaactatcttaggttgtgttcttccccattccccctcctttcccaactcacctcactctttttccacacgtaagcttatgaaactattaaaaggtgtgtgtttttttgcaaaaaaaaaaatctttacgaaagttgctttaaaaatcatattaatcctttttttaaaaaaacttagctaatactaaactaatcatgcactaatgagtcactccgttttcaaggtcggagagattagttctcaaccacaggaaacgaacacaacctaaagctaaagcattgtcttactgttttcaaagctaaataagtaaatgtgtagttaaatgtggaggtaaacttaagatcaagctgaagcgcatggaaacgttattattaaagagtccaaaatttttagtagtataaagaaaggtccggaattttgaatcaaagacttcttgggagaaaggcagcatacaattaacaatcagcatacgtgcaaacagttccaacagaaagaaaaaacgacgagacacaataaaacaagaagttataggaagcaaaaaagctccaaaagatgtgagtgaagcaaatcttgaaaataaaaagagagaagaataaataacaaaacctaaaaaaatgaattctcaaaaacaaaaatgcgattgtttaaaaaaaaagggaaaaatgaaaacaaaaaaatgttgacgcccaccgtggggctcgaacccacgaccacaaggttaagagccttgcgctctaccgactgagctagacgggccagcttgtctgaatggcattttttatgttattataagtaaaagttataaaaagattgcacaatttttcaattgcatttcgtgaggttgggcaggaacctgaatactgataagaacaatgtaccagtgcagaaaagcagacgaaaatcacccaagccgagaacgctgagcattacgaattttccatggaaatgtggaatctcacacccaacacaacgcatttaaaaagtccaatcctgttagttcttggaggtaatatgctcttcagttcagtcttgactaatccccctcttttcctcccaaattactgcacaaaatttggccatcaagcagccccacgaacagcccctaactaggttcggaatttgccaaagagggttgaaatgtaccatcaccgggggggggggggggttactgtactcatcaatgagttctgaaccaagcaaaaagtttagcccctaactaggttcggagttcctgttagttcagcattagcgcatacggcaagaggcaagaggcagatgtgtatttgacagtttgacacaagccatcaggagtgctttggccgccgggacaatcttctcaggttcaccctctcctggcatcagaaaaaaaacagcaagtttatcagcatcaagctaaattatatcatttgcaggaacggcatatcatttgtgatttaatggttgaacattcgcaggaacggcatatcattttttgttctaaggatacgtgggtaggattggttgaaattacctgggttccatcatggtcgtattcgacaaggaagacacatctgcacccccttatatcatgttgtttccgctggatttccagaacatgcgcatcgaaatgcaatgcttcatcattgctctcctaatgaacaaaatcacaatgaggaaaggaaaaacttcaataaaaaatacattttaaaaaaatcaataaaaacgactcgaaagtagaaagttgcagcagtacaacatattgtatagcctctcagttatagtttcagggcaaaagaaaaagggaacgtcattaccctttaccctaccttgaaacagaggacaaggtctccttccctgatgagtttgcattctgatgattccaacgggatggattgcaggcggatagccttccggacattgatccattcatcctcttcagccccaaatccttgaaatctcactcggacttcctagaacaataatgaagaaatagagttttcaaaaatagatctttaatttgtacggtgcgaacaattataaaatgcaataacgagattcatgtgatcagacctaagaagaaaacgaatatgttatcattgaagactctccaaaatccatgtggttcaaacttaagatcaagctgaagcgcatggaaacgttattattaaagagtctaaaatttttagtagtataaagaaaggtccggaattttgaatcaaagacttcttgggagaaaggcagcatacaattagtaacataggggtctgagacattctaaaattcagggcagtgcacaaatacttttgaggaaaaaaaaaaagaacacatgacatatgctagcaagccgataaataaactatcagctgaagagacataaatgcaaacatatcctacaacatcaattattctacttacaaattcaccagaacttaacttcctgtatgctaagaaagtggcgatatcatacctgcatagcacagaaaatcatgtgatgactatggcattagtgttggcttgccaaagttaagaaacaaaacaagataagaaaacttgaaattagtcagtacatgtacaaacattaaacttccagcttcatacagcagtactaagtactaagaacactgcacaaatgcccagttgcaaagttaactgagatcactaccacagttctagcattctaggttctaacgtaccaaactagcataatcaggaaaggagcaagtgatttgtcatggcaaaccttcccattgatgggaattatgtctctaagtactcctaacacaacaaacttgggtacaactttcaacagaagttaaatatattgcttgatcctgcatgattagcattaaaattttgaagacaaggaaatggaaagtatatgggagaaagggtcaaaggaaacaagaattgtatccccacaaagtaaaagggtattcaccaagcaaaatcctttgaagacctagcctcgaactgcatgtcttcaatttcaggaagcttatctatgttgtctgaaaagaagtcaacacataagaaataatgcacgaagcatcatgctttaacagattataatatttgcaactacggaactacctataggtaaatccggcgaaacctcgcctatatcatttgaaatgcttgtatcaacagctaaagcattttcttcagatgatggaggcttttcttcagaaaccggtgcacttgcttgggaggctaaagccttttcttcagagccagtaggcaaacaaggaggtataacagttgatgcagggaacttttgacggaaccattcttgaacctgttcaagcagatgttattatagtacacaaattgaaatttggggcataacaagagtcagacggtataacctgcacagcctgtagtgctttacttccaactcggcctggagaacaactgcgcacagcagaaaatgaaataaaaaaaaccataatcattagtttgaagctattgcatgtcaataataattcacaaattaaaaagaaacgtttttgcaacaccagtattcatacagttagacaacatttaactatttaagacatatctgcttaaggagaacaacagaagacacttcgatcctttcataagcttcttgcagaaaactacgatcgaagcctatagtctctactctctacttattgattcagaataaaaataaaggaaaattaaatgtttgccaatccaaaagattgataatctaaaatatgccactccacagaatgtaaatgctccaacgtgaatactattttgccattttgagccttttttagaataatacatgtctttttcccaacctgaattgccatttcctctttcctagattcttccccctactcccatctaattttctctcatcatcggacatgacaccgcacagttcagtttgtttgttacaaattacgaattaggttagtgttgatggcattaagctatcccaaccatactgttatttaaaagataaaggaccaccgccaccttataacactgacattcatggcaaagatgtgccacacaattgacctattcttgcacccacggtcagcaagattattggttatccaagcacctatctccaatacaataaaacatgaatctaaattcctcaaacatgactggactggctaatgcctcgcagccactgctgtcatgcatggcacacgtgagcaccaagccaccaaagtccttctgacctgctactcctcataatgaaaccacgcgcagatggaagttcgtatctgctgaggacatcttatccagacccagactaccattctcatgtcaccacaggtcatctagtcatgattcaacactctgaacaacttcaccatcatcaagtatatgtaatgctcggaccatctcgaccagacatcattggagcgctatccctgagcaagcccaactgcaaacttttggtcataaccgctggccctcaccaccacatgctggccttatgtgacctggagctgctcgacaaggatgccaccccattctggtcaccaaggataagaagagcgctacagcgtacaagggcaaaattaccgagcaatgtgtgggtctagagtctagaccaaatgattgaaaaaaagactgaaaagggcaaaaatagaatagatcctctcttcacagtggcattagaatgattatatatagttgagtggccttttgggcatgtcagccttggcaatggtaaatgtcaaagttttacctacaataaaaaggtttagaacaccctgtaaggttgtaacactgtgggactcacttaaattcttctgcgagcttccggcagaaaatttcatccaagacttgttcctttttatgtgtaaccaacttctccatccttgcaatctgcacgaggaagtatttaggttaccatggaagatgcaaactagcatagtacaaattgtatagctgatttaaccatgataatacagcatgcagagggaaagactgtgtactatactagtagttcacttaggtacagtggttgggatcatttgagccccatctcctaactttaaaaaaaatggataggatctcctttgtgttcccatttctagtcattacatgcatagctaaatagagattgatttacaactagagaattcatgttgaatcatgaaactacgtaaagctaacaaaggagcatttactttcccttcttccttcctctgaaatggataggcaacacacaaatgatgaactatagagtttaactcttaaaattggccataggatgcaaaacacagcaatctaataagtacacattgtgcactactaaaagcccacaaaggaccatcgaatatccttttctccagtagttaggatatattgaagagtggaagaacaaactcaaccgaagtgtttttcccatttacaggagcaaagaactgaaaagaataagttattctgcttcagttacaagaatattaagtttaacaaagaaggaagagttggcaaaatagcaatgctgaccagtggccacagaagaatatctgaataggaggatagccacttccttgactcaacctcgtgactttgattaggactcacatttagctattcttgggatcaatatgaccgggttaaatgaataatgcaatatgccagtattttattgttgcatgcattgatcactacatgcagcattctagccaaaaacatcagtgcctcatgactcttcatatttatgaaaagagtataaacttctaccaggatcacccaatgctaaactgaacattttgttcagtaagcaaaaaagaaaaggaacaaatatacactgtagtcaagattagtcaacagatgctgaataactatagtacatcacaagcctgcatgtaatcacctgaatgcgcactagcaaataaagtcgccatagcatcaaaatcccaatcaatttcatcatacacaaggggagagaacttcccatggcccccacaagaaccccgaccaaaacccaccaagaaaccacaccacttgaacgaaatggagcgtggggaggcataaacagcagcagggcgaatccgatcccccgaagaaccagagaaatttctcccagctcaatcgcggagatgccccggcccgttcgtctctccccaccccaacccaacaagaaccccggagaagcagcaccaccccaagcggaaccccaccacaggggcgccgacgagaggggggaatggatggggcgcggcgaggcctcacctcggatggcgcgaagcgaacgctcgatcgccgctccatttctcgccgccggcgaggtctccgccgccggaagaacggggaagacgccctcctcccaacttgcagcaaagagtagaaaagaaaatgaaaaggaaaaagaaaaaaaaattaaaagagaagtaggggaagtggttgagtgggccccaccagataatggccaaggaagggactggttggtgggcccaggaatcatcctgcc

SEQ ID NO: 27980 - DNA, 5215 bp, Oryza sativa
ttggaattctggccctctttagggtgtgtttagttaaagtttagttgaaattggaacgatacgatggaaaaattaaagtttatgaccgagtttagttcaattggaagtttgaagaaaaaaattggaactaaactcggcctaagatttcaacttttttcttcaaacttctaatttttccgtcacatcaaactttcttacccacacgaacttctaattttttcgtcacattgttccaatttctttaaactttcaattttagcgtggaattaaacacagccaaaattggaagtttgatttataattggatctatgccactataaatttgtttgtttagaaaaataccactacaattcacctaataggaaaagggaaatgctgaacaccggtataccgtcccgacgggataggatagacaccaaccaatccactcttcttctacctagctattctttctacaacatctctctcacacgtgctgctgcaactaagtcaacgacgagctccggcgtggcatgggtgtggatgacggaggacgcggtcaccagcgacgagctccgacgcggccgcccccgacgagcccccggcatcgcggactccgacgacgagcttcagcgtggcgtgaggcacggacggcggaggatgtggccgcggcgacgagccgcgtggcatgggtgtgcatgacggaggacgcggtcgccggcgacgagcttcgacgcggccgtccccgacaagcccccggcatcgcggactccggcgacgagcttccgcgtggcgtgaggcacgaacggtggaggacgtggccgcggcgacgagcccggcgtggggagcgacaacggaggatgccgccgacagcgacgcggtcgccggattgctgcttggagctccagcaccgccacccgccatccacggcgccgccgttaacgcccacctccggctccatccgcgtggctagccggtgcgccctccgccagcgccccaactctgtcacaggccctctctagtcgtcgccttcgtcgctggccgctggccgtcgatcccgctgtgagtccaggccttcatcctatccatctgctgcttcgagggagcaaagagacaagacggggtgtaaagagcttgttgacctggtcatggttggctgtggagtgtggtagaatcatcttctacatggtaagaatcgcataatacctgatagatatcatcttctacgttgtaagaatcgcatgatacttgataggtatcatcttttatgttgtaagaatcgcatgatacatctcgatacctgataggtatcacccgataccagctaggtatcaggacctgatacatcgcaagcatcacccaccacgtggtaagaatcacatgatacctaataggtatcatctgatacttcacaagtatcacctgatatatggtagaatcgcatgatacctaataggtatcacccgataccggctaggtatcaggacctgatacatcgtaagcatcacccaccacgtggtgagaatcgcatgatacctgataggtatcatctgatacctcacaagtatcacctgatacgtggcagaaacgcatgataccggttagatatcaggacttgatatctaaccggtatcatatcgtttttgaatggaattgcggtatatagtagctatgatactgggactgataaccaccaggtatcgtttatcaagaccgatgcccagcatgtatcaaatatgatacttggccatccggttatctggtacttgataccaaacggtatcacacacgatgcctgttatgaggcatggcacccactcggtatcaggtgtgatacctgataatagacttaatgctcactcggtatcagatgtgatacgtacccagtaacagatttgatacctggtagctaggtaggctactacttgctatactaaactagcttggctatcacatgaagatttttttgcgtatgcacgtggacaaaatgacaaatgatgggtcaatgggggtgacatgacacaccttttgagacacgatgacaatatacatgacatactaattgaacggaaggaatcgtccggctaactgcttgtaggcctgtaccgtccgaacggtataccggtatatagcagccctctattgtttaggtattactgaaattttataaatttagaacgatgccatcgccgtgatgttttccatcacttccgtcttcttccgtctctttttctcatctccttcctcttctcttcgtttcttctccccgtcggccagccatgcctcagcgtcgtgctgccggcgaacgccatgtccacgcgcaggagcctgagccgaaggagactgtgtcacaccctgaaaattcaaaatatataaattgttgtttaaatggaatttttagaatttattttaaaagcctagaagagaagatctaattttaattaataaattccaatataaaatggggccagataaaatttcattaaatactttgcttaattctataattcctagatttttctgggatttatttgagctaaggaagtattttcaataaatggaattgcatttaagaaataatttaaattgaaaaaggttttaaaaagtctcttttggctttgggccaaaagtcggcccaaaaccgctctctctctcctcggcccagtccggcccagtccgccgcagccgcgcgcgtgcgtccgcccgctgacaggtggggcccacctgtcagggccgttgtcaacctccggccgccgccgcccgaaaccctagtttcgcgccgccgccgttcctttccaaatccggccgctcctttccttctccggccgaattgatagaggggaaatgatcctcgggatctcctctaccttttctcctttggaaacatcggctaattcgttttggaaattgttggaatcgagttcgaatcggattcgtctctctcctccgaaccctaaaccttccttctcgtcgccagccgccgtgggccttcgccgtcgccttcgagcccctttaaaaggttccccggtgtcttctctacccgccgccactctcgccttcgcctctcgtcgccggaagagctctagcgccgtgcaacctagcgccgccgtcaccgccgtcgctccagccgtgcgccgccgccgtctcggtcgtcgtcatcgctcgggaaggccaccgtcatgatcgccaagtcgccgccgttctcgtccgctccttcaccgccgccgaagaccgccggaacaccgtcgccgccgtcgacccgaagtttgccgccgcttcctcctcgtcgccgtcgctgtctgttgatcttccgccgctcttttggtcaccggtgagttcgccgcgtcgcgctctacccgttggtgctctccgttcgtgccgaagtgccgccgttcgccggcgagcatgcgcgcccgagccgccgagccgccgccgccggtggtgacgtcaccgccgacgtcatcgtcgccctctcccgtgagccggtcgtagaccgatcgatctcggccgtccgttttggatggatcgatctcggccgtccgttcgcgtgaaccgtcgcccgtgcgcccggtccaccgaaaccctagccgctgacgcaataaacccctttttccttttcaaaaataattcattattgcgtcataattcaattaaaatcaatttaagtgttttaatccgattaaatcttcaaaaattcataactaattcatcttagctcggatttagttggttcaagtctctaaatttttctaaaattgagatctacatgttaaaaatatccacatgtactgttcatgcttatttatatgctgttttggtgattttgcttctttctgcttagattccgccgtttccggagagtccgttttcgcaggagaagaatttgaagagttccaaggccagcaaggcaagtcacacagatcccaaacaaccctttgagcatgttgatcctatttaaagctattgtttctattcaactattgtatttattttcgaatgtcattgggtggaattaacctattctttgctatagcccttttgtatttgattactttattccttgataccttgggttattacaatttgactagttgagctttatttatattggttcaactagatattagatataattgcttagccatgcttagaaacattagctcactattgggataacttatgactcattattatttaatgatggcttaatgatagttcacgatggtcaatcgtgattgtttaattatttaatgtgccaactaaaacctgataaaggtgggttgtgagcacatgattttgttggtcgtgctcatgacaattaaggaccggttcacgagtttcggttgtgaaacattaaccgtgccaaccacaagccagcgtgggcaacggctttatcttttgtatagcatggttcattgcggggcaccagactgagaagtggcggagataagcccacgggggtcgctggggagtccatgccttatttataagggggtgattatgatccaggaaaggtgcgctgtagtggattgtgttgtgcaaggggtattgtcacaactcctttccgaggtaccgtggtggtattgaggcacatggtgacatgatgtggggttgtgtcttgtgggtacagtggtacacctctgatcagagtaaaactattcgaatagccgtgcccgcggttatgggcgggtctaacaatatctttcgtgattagtctcacccttctcaccatagtaagtgatgctttaattggtaataatttgattagctcctggtttggaatggtatattcctggtttggagatagaactgtgcagccgggatggttgttcagaatggttgggcctatgcaacagggtatgttgtatagcgttggattaatattgtttaattattactcaactgttttattaaattctcaaatatttgctaaatgctgcttttgcaaatgaaaccctactatgccatcctttgttatcctgtgcacttgcatatttgctgcgtggcttgctgagtatgtcatatactcaccttgcaatcattcatcataggaagggttctacaatgatgctgatggtgtggaggattaagtgtagccttggtcaagctgcttgtggagtggagccgtctgcgccgtttattttattttccgctgcttagatctttattgattgagaggaactatctacctctgtaatgacattttgtttcgcttattaattagcgtcataattg

SEQ ID NO: 27981 - DNA, 1637 bp, Oryza sativa
cctgtggagtggagccgtctgcgccgtttattttattttccggtggttagatctttattgattgagaggaactatctacctctgtaatgacattttatttcgcttattaattagagtaataattggactatattatcaatttgttattgtgtgcctcggctgattcctggacgagggttcacacacatgtaagcgtttagaattttggatagaaattccgggcgtgacagacggcgcccttgctgaggtagctgacgcgcgggtcgaacacagggccagcctgccggtggcacgacaccgagcacaaggagcactgcagctaggtgagcgatgagcccatgtcgacgaccatcacggtagaaggtcgccggcatgccgaggcccaggtgggtgacgtagttgcctacggctaccgacgcacccagcgtcagcggcacggacgacaacgacgcctgtgagccgcgccgctggccttcttcttgtggtggccgtggaggagagacgaccacgccgtgcggcaggaggtatactcattggagcaggagaacaggaactgatgctcagattgacatggccagaattttatccagcaagaaagaaaatctggagaccgcgggatcaaagtgcaagaaggatagcaagatgctcttcagacattagtcatctatacaatagaaaaataggagacttgatcaaaagaagctctgcacttgaagatcagcttgcgactgccttggcgagcacagaacaggcggagaatatcatcgttgtttggcgaggcacgagacgaggtgggcgatgcgtgcgtcatcgtgtgtgatgacgacggagacggcgggagccatcaacccgatctacgctgatgtcgtcatcgacatggtcgctgcccattcgtccaggacggcggtggccgtcgtcagcgacgatgacgatggcgctcctccagcgttggtgtggcggcaaggggtggcgccgaggacgggctgtgggaggcgatctgggcgacgagcacgcgcaagtacccgctcagccttggccacttccgtcttctgcggtggctcggctacggcaacatatcggcagcgtgtaccctcctcgagctccgtggcggcggcggcggcgccctcttcaccctcgtcgagtttgtgcggaggcacggccgaccgacggggaggagaagaaacaaagagaaggaagaaggagaggagaagaagagaaggaacaagacggaagggatggaaaacgtgacggcgatggcacagtttcaattttgcaaaatttcaatagcacctaaggatatcatgaatagtaatggtatttttctaaactggcaaagttgcaatggcatggataaaattaagagacaatccattatacgccactgactttatcacacgtccacgatttgccgctgactttatcacattctacaatataccatcaacttttgcttaacttctacgatttactatcgccgtccggttagtctcctttaggactgtacaaatttgtcaaaatgaccaaaatacccatgggacaaaaaatttcaaattttggataaaaattctgaaatatcaaaatttaaatttttggccaaagtttggatgtttacaatcttatgtttataatatgatatt

SEQ ID NO: 27982 - DNA, 4273 bp, Oryza sativa
ggtggcaaatcatatacgtgcgacaaagtcagtggcatataaggaattatctctataattagccctaggaaaaacaccgtgggaatggtggaagattaacttgccacctcatcaatattttcagaaatactgtcaagaattcgacgactcttccggcatctcgcctagttgaatcaggatttcgctagggatttggattggagattggggaaagggatgaactgaggagggaaaggtagtttagtgacattcgatttctttcatttcttcgatatcgtttacagacaagggatttccccttaaatggtcacatgccacagcacacacacccacctgacgcgtccgccggcccagcacggcacgtcagttcactcacacactcttggcccataactggcccacacaggcaagccttgatgaactacagttgtcatgacaatttccctccccttaaggagtggcttgtcccaaagccggtgcatcaagaaagtggtgacgctgttgatgaagattctcccatgtcgcaagctcatcagggagactagtccaacgcaccagcacttgagatgttgtagttcgtcctgattaaccagtcacctgttcaatatagattgcggctgagcgtgctctgtaccattaacacaagcatgatgtgaacttgaacataccatgaactcctgattgacagcctgtttaagcctctatacatgtacgactgggtgcaccagactgctcactggtaagtccaagcgataagccaccttcccaaccttctctagaatcttgtacggcccaaagaagcgaaaactcaacttctgacaagctcgattgaccactgatagttgcacatagggccgcaatttgagatagaccatttccccaaccgaaaactgtcgttcttggcgatgcttgttagcctggcttaccatccgttgttgggcccacaacagttgttgatgaatcaatccttgcatcaatgatctctgctccaaccaagtctgcacatctggaacagtactctgtccaagatccaccaccccaaagtgcgtcggcttttgagcaaacaacacttcatatggtgacttgcccaacgcagtatgaaaagctgtattgtaccaatgttgcgcttgagacaaccattgggaccatttgtttggagttgcatgaactgaacagcgcaagaaggcttctatacactgattcagcctcttaggttgtccatcagtttgaggatggtatgaggaactcatattaagcttcacattagcaagtctgaataattcctgccacaatgcactggtgaagattctatcacgatcactcactatctacttaggcattccaaagatgtcataaacattagtgataaacgcttgggccaccgtcagagcagtgaatgggtgagatagaggtataaatttggcaaatttagagaatttgtcaattaccaccaggattgtgtcaaacttgcctgacttaggaagcccttcaataaaatccatgcacactgtgtgccaggcttggaggggaactgacagaggttgtaacaaccctagagttcttccatgttccacttttgctctctgacaggtctcgcattgctgcacaaactggtggacatccttcagtaagcttgaccaagtgaatagactttggggatcctctagagtcgacctgcctggcctgaatgccccccaataccactatcatgcagagccaacatcatagcctgtttagctgcaacatgctgtcctaaccaaattttgccattcagtcgaattatcccattcaccaatttatatccaccttgtccttctggatgtaagctaagtgcagctagaagcttcttggtatcagcatcctgttggtacccttcctggattatctccaaccaccttggaacactgatagaaactgccaacaactcatctgagttacttctcctagacaaggcatctatagccccattgtctgaacccttttagtacttaattttatactgcaaccccatcaacttgacaaaggccttatgctgcatgtttgttgtcaatctttgctcacctaaatgacttaaactcttatggtcagtcagaattaaaaactctgcatgctggaggtatgccctccacttttccacagctaacagtattgccatacactccttttcatatgttgacatcatctgagaccttttactgagccccttgctgataaatgcaattggatgcccagcctgcgttagtacagctccaatccctgtgtcactggcatctgtctcaaccacaaattggtgagaaaaactggcagagctaacactggggcctccaacaattttgatttcactaactcgaaggcttgttgctcttttgttccccacttgtaactcacatccttcttaagtagggtggtcaagtctctggtaatcaccccatatccttggataaatttcctatagtatccagttaatcccagaaatcctcttaactgtttgacagttttaggaacaggccagtcttggactgcttttatttttgatggatcagttgccactctagaagctccaatcacatgcccaagatattctagatgttgtttggcaaaagaacacttactctttttgacaaacagttgatgccttgctagaatctctaacacaatcctcaactaactaacatgttcttgtagggttcgactgtaaatcaagatgtcatccacaaacaccatcaccccttttttgatcaaatgggcaaaaattgtgttcatcaatccttggaaggtggctggtgcatttgtcaatccgaaaggcatcactctgaactcatagtgccctacatgagttttgaaagcagttttaaactcatcacattcttccaaccttatctgatggtatcctgatctgaggtcaagctttgtgaaccactgggctcctgccaattcatccaacaactcttccactactggcatgggatatttgttcttcactgttacttcattaagtgccctgtaatcaatgcaaaacctccaagacccatccttctttttgaccaaaagaactagtgaagcaaatgggctcacactggtctggattatgccttggtgcaacatctgagctacttgtttctctatttcatccttcacattcactggtttaacatttggcagcaagggaattctatggtcaaactgcgtatgaggtggcaactctgttggctctttgaacaaatgttgaaattctgttatcacctcattaatttggtctgggacatcctcagcttccaccaactcctccctcattgcacaaagttggaccacttatgacacagccccatctttaagcatcccctttagttgctggcttgtaacctgctcacaggattttatttcctcctttactcctaccaaagtgatccttttccccatttgagcaaacctcaatttctttctcctccaatctatccacattggactaaactcctctaaccaatccattcctaggatcatgtcgtaccctcctattggcaacacttttagtttatcctggaatgtactaccttgacaccaccattccacctgaacacatttgtcacaagtcatctttcctccatctgctatggtcactgaatttgcaggcattctttctgtgggaagctgcaatttgctaaccaaactctctacaataaaattactagagctcccagaatctaccagaatcagtacctcttgatgctgaatcataccttgcagcctaattgttttctttcccattgttccagcagctgcacactttgaaagtgttagctcttcttcattatcttcttcttcttctttctggatgtcagcagttccatcctgtaacatcaatacttcaagcaactcatctaacacatgcaattgaactgactttggacatttgtgcccaggtccccatttctccccacacttgaagcattcaccccttgctcgcctagcagctttgagtgattcatatatgtcttcccacttgggtttctcctctcctttcttgttttcctcaggatgtgcccccaatattcccttggcaacatatgctggcttgatgcctcctttgaatccttctttcacaatcactttctgttgagccttcgatgctgacaattctcctagcaactcctcctgcgttttagccaaagacagagccagatcaacagttctaggtttatacaatttgaaagctattttgacttcaggtttcagtcccctcacaaatttggtaacaaagagggtaccgagctcg

SEQ ID NO: 27983 - DNA, 8765 bp, Oryza sativa
agttcttcctgctccgccgcgacagcaagacggtgcacgcggactacgtgcaacaggtggtccagttcgcgcggttcgcggaggagagcatcctcaggatgctggccttcgtcgacgccgccactctcgccgtcgtcgaggaggacgacgacgaccaccgggtggccgaggcgctcccggggatgttgcaggtgtacgcctgcatctccgaggcctctccgaccgtgctcgccatgttcaaagaagcatccgatctcctcgcttccggctcctcccgccatggccaggaggcacaggttttcgacggcatggacggcatcttcctgcgcaagaggaagaagctgagcgacgcgatctgggacatgatggagaaggttcgatcctccttcttgcaggatggatgctggcaagtctcgccggaggcatcagcatcaggagtccatgagaccaccgtgctgatgatgaactacatcgcgcttctctggcgcaacgacgacgtcctcaccttcatcctgcaggatcaccacttcagcgtgttcgtctctcacacccagggcttcagctcggtcgtgaacctgatcaccgacatcatctcttgccttggccacaaattggaggaaattgcctcctccctttccaattccatcttggacccagcgttgcgttgcattttcttgctaaacaattggcagcttgtgttgcaccgcatcgaatccctggacctgccatcttgggccttgatagacagatgcaggacacggaggtacatagacacttacattgacgtcttctggtcgcctctgttgtgctgcatcttcatcggaaattcttctgatactcctcgaaagaaaacctacagacctgctttcggcttccgaagatacctgtctcttgaaaattttgagatagaattcagaaaaacctacgcgaagcacaagtttttcaaggttccagaccctaagcttcggcagagattacgtcaagccatcatccagaaaatcattccgcattatagcatgtatctggaggagcgagcagcaaggggaatgcacaatcgacctcccaaaattactcctgagcagttgaaggagctattagaagaattattcgaaggttgaagcagatgaatttcagtggaataaatggctatatatttaattagcactcaccgttttgtcaccctagcttgggtcgtaggtttgaaggtttgtgctccggccagcaattaaggtgtggtttgtcttctttggactttggtgattatggtgagagtataattcaccaagttcctgcaaacagaaacttggttagtcttgccttattcgccggagaccttacttagtcttgcctgcttgtgaagatgggggttactaaaactgttgaaatgagttttacttaaatgttacaaatttaattatttccgttgtacagataatctattatcatcttcgtgtactctctttggttttgtcgtgcatctacttgtactttaatattgtggtgtaccagtaaagtaataagaagtaatacgttgtgagttgtggcatcccaaaaataattttcttgagatgttagcttacacttacagacgacctgttctcgacttctagtatatactttattttgttgtctaggggcaagatctactgtaacaaaataaatgtaaaacatgtaattttgacagtttatacaatgcagtaggagcatgcatggaagtataaatcaattgttaacaattggaaacatcaaacaaagcgtccaattaatggtttcagacgccgcctcatccccaagcttcacactctggtcgcctcaaaccagagcgcattcatcaaagatcgctgcatcccggacaactttacgatgttctatcaatcaaccaagcgtttgcacgagagacggcggccggccttgcggctcaagttggacatcgccgaagctttcgattccatctcttggcagttcatcatcctggaagtcctggagcacaagggctttggacaacgttggaactcctggattgccatgcttctgcgtacggcaagcatgaagatccttctgaatggcatgccgggggatggtgtagttcatcgccgcggcattcggcgagatgacccaattatatcccccttgtttttcatcttggtgatagactccctgagctccctctttgttaaggctcagaatgaagggttgcttcaacctctcagtgtccctcaccgggtgtctttctacgttgacgacgtggtcgcattcatctagcctacagtgcgagagatcagggcagccacggagatcctcaacatcttcggtgaggcttcgggcttatgggcaaacttcgccaaatgcgcggccctgccgatacaatgctctgaagaagacctattactagcgcaagctgaacttccttgcccacttgcagctttcccgtgcaagtatctggggctccctctgtctattttccggctaaagaaagaagatctgcaacactcatcgacaaagtcactaaccggctaccgacgtggaaggctgagcaaatggaaccgataggtcgcattaccatggtaaaatcggtcctaagcttggtgcccatctaccacctaattgccattgatccgccgaagtgggtaatcaagggaatagacaaaatccgctagggttttctctgggcgggcagggccaacgctcatggcggtcactgtcaggttgcttggtcgaatgtctgctcccctacaacgtatggcagtctgggagtactgaacctagagctcatggggatcgcaattcgttcatgctggatatggtcccatcgcacttctcaggaaaagccttggcaaggtctatcaatcccctgttctccaaaggaacacagcttcgtggctgcgtccatgatctgccgggtcggcaatggtgcttcggcgctgttctgggaggaccgatggttagatggatcctgtatccgctcgctagcaccggcgctctacgatcgtgtccctaagcgaactcagcgaggagaacagtggtggagggactgctcaacagaagttggatccgcgatattcaaggagccctcaggacccaggccattctcgactacctcaacctctggttgttgttgcgtgcgatgaacctcacggactgatgggaccatttttttcgtggaaatgggaaagctcggcactctactcttctcgctcagcctactaaggtttgttcctcggtcggattcccttccaatgtgtgccgatttggaaatgactcgcatcaccgcgatgtcgctacttcctatggctagtcgctctcaagtctcaaccgatgctggtcggcggataggttgcgcatcaaaggtatgccaatcccatcctccgcgtcctttgcgatcagcatggagaaagcatcgatcatattttagtggctgctgttttcggccatcgggagcccagaatgcttgcctatcaacgaagtctccttccatacttggttgtgcgacagtaggaaatccttcaccaactcccaacgatgaagtttcgacaccattgctacactcgcagcgtggacaatatggaaagaacagaataactgggtgttcaaccaaaagcagagaagctagatggaagttgcaaagggaatggtggaggcggcggcgttgtggcggctggccaatgccgccatgccggccatccacctatagtgcccttggactgcttaggtcgcatcttgcatctgtgagattaggctttagcacggtataacctatcatgtccttccgtccccttctgttttttctttgatctgtacagacttttactcctcttaacaaagatgcacttcttgcatattaaaaaaaatggtttcagacgtggtggaagtcccaggagtagcattatcatcaaggatatgaaagaactggaagtcggtgctcaatacatttagtatctctcgacgcggctcatcttaatcatagacaccattgagaacacataaaccaacaataatagatagggaatcaagccaaaagcaaatccaatcgtgtgcacattcacttcaaaatgatggagcattttttttttcatcttaggaacacgtatacaccttgcagtgcaattgacacacaagctactccctatgttggacctaatacactattacttaggttaattatccaaatatttagatgattatattaaaaaaatgttgtagggtataggccactggccatgattgtctgtcttgctgacgagagaaacgagcagtacaatgcctagatataaaattgttccatgatcgatcgatgagagattgagagtgctagcttgctttcaattcatccccatgcatgccaggagaggtgaatgagcatcgggttcagaattcagatcatgcttgggcccaactcctccccggttatcgtctttgccggtggggttttctccccgatagccatgcccgtctgcgaaaataaaacccctacgtcaccgaaaatgctttttctagtagtggggattgaactcgagcatgagataacaccgaacatccatgcatccatatatccgatgagtgatcgataggcattttttttgccgggacggcccaaggcaggccgcccaaattgtattaaggagcgagagaaggtttcaaaaacttttacaaatcgacattaaacagtcgaggagaaccaaaaagaaaaggaaaacaagcacaccgccacaagcgggatctttagctgacttctctaaaaatgttggcctctctccacactacaacttcatctttgatatctctgaagagttccgccgcctcgataggcattggacaaccgcaacattgatctatctatctcccatgaacatacaaatgcaaacccgctatggatgcggatataggctacgagcataaatgcatgcatatgcggaaccgggtatagcgagttttctttaagtggatcaacaaataatttttaatagaaagttaatgtatctaaccaattattttatagaggtatctagttgctaaaggcgatttcagaataaaaaaagtaaaatcaaaatgatttaacttattctctcaatttcaatcgaccgctattagtataagaagtggtgatgcttgcagtaatatatgtcgaaacatgcatgcgtccttcggtcttcttttttcttcgatcaaagttaaaaatcttgcaaattcttgatcttccgatgtgaattctaagcttcccctccaacttagacaaccttgatgaactaggatttaaggtggaagcaagaggtaggaggggtgagggatgaggagaggggaagttccccaactttagagggagatatgtggcagcccaacaatggtcaccgacgacgggagcatgacgagccacagggactgaagagggtagtggacgcaaggaaattttggccatgtgattgggtggcgggtgctgccggagccggaagagaaagacaagcaggggcggagcccaataggcctgggaggggggttcccaggcacccgggccgaagcaaaaaaaattagctattaccactatgaatccaccatacaggcaccccttgatccaaaactcaggaaccccctcgctagccttcagcccaaaatctgcaaaacgccaaggcccaacaaggcccaacatctgcacttcacaggttaatccaacgtcgatcgttgggcacggcacgcatcgtcgttccatcttccacctcttcctctctctcgactcagcgttgcggcgccgccgcctgttggccagaatcgccacgccacgccacgccacgccgtcgcccattggctaaaatagccgcgtcgtcgcgttgtgccatcgccgtgccgatttcgtctttggctgctgcacttgaatcttgattaggtgattttgccttaatattggcttgttggctagggcgagcactctaaggagagtctaagtttgtgattaccatctcctcgtggaatggctggacggcgtcgccttctccaacagcccgacatggcaagccaatgatgccaaccgggcactagagcaaatgagcagatgcaaggtccttttatcccatgtcatccttaactccttttgttttcagttaatgtagtaagtaccgacataaagcttgaaaattttcaattaatctcgaatagttttttctctatattttaatgtctggtttcaagttgaactttcaaaaattttgagtatttgaccgtactgttgtgcatagttcgaatatataactgtttgtatttgtaaatgatttcatgacttattctttacttaaaatttaagtatgatcctctctttctttattcagtcctaatggatgaatgaagacagtgatatcacattttttatgatatattttgtgatttgtgactttcttatacgattgacaaattatcaatttcacaaatatttttagctgattttataattcaggtacacaatttctgtcctttttctcaacactttcttttagtataatgccctcaatgggagaatcgatgtttaggatacacaattatctgcataatactagtgttagctcaccagccgatctcattagagatgagagtgacaaatccttaattgacacttataagagtggcaattagtaaaatatccccacgcttagaagcatcgggtaggccatcgaatcaattcttttttccaaaaagtttgatttgtatgaatgttaatttcgtgtcatatattctctattcaacttaatagatcactttataattaagcacgtcacctttacttctagtagaagaaaacaggcgaagttgtatgagccggaaaaaggcaaacggactcgcatattagccaggtagttttaacatgcaacgttgcgtgcttacacgcttgctgagctaaacctcatgctacagcttaaatgcttaatacaatgtaatcaagggaagacgaatataacaattaacattataaaaaaatttagtgcacttcacacatacaaatacaatgcaagatattagactgccaaatttcaaaatccagaagcaaagaataaaagaagcattagtggattagtccataatttctaggaatcagaaagagagggattagtagagctgattgtcgcaaaaaaggggataatatattcagttccaaatgactaaaactgatcccaaattatggttactacatagtcaaaagaaagaaggctgcggaagacggatcgatgatggccatgactgtacttgaaacaggacatataccaccataacggcctgaaaacacacgcagaaccttaaacgagtacctcattttcaaataagtcaggcaacctaaactgactttaagctctccaattacatccataaacagccgggcgagaagtactttcatttgcaagaagatccaactattggcataacaatgtcctcaagcaacggtatcaaaaaccaaagaaaccaagctcagttgccctctctttctcgaatgtctcgaagtactggtagatgatagtaacagcaagcagaataccagttcctgaaccaatagcacccatgaaatcagctagaacagtcaatgcaccaatgcacactccaccaaatgcagcggcagtggggatgtatctgttcaattccttctgcaagtttgactcacgatggccaggcatcaccatttgctgttcctgttatagtgacatagaaatggagtttatagatggcctttgagtaaaccaatatagactattagatcacctcaacactaaatatcccactatatatagattcctcagcacaaggtcaaaagtttctaaatatccactaaaaaggttccagcagtttcagataagataataatagttaagaaactttggataaggcttcatggaaaacattgaacgctacttgaacaattcatgtgcttgaatgactataatgttgcatggcacaacaatatttggagttttatgtatacagagttcagaggttagcatacatcaaaacatgtgcagatgggatatcagacttaagacatcaccacacatgcaatgtaatgagttggactataggtaaacaggaacaataactagatagaaaatatgtatctacatctttaccttcagctgtttagcaacatcctttgcagatgagccagatacttcaatccatgtctttgagaagagagcacaagctgacagcatgaagaccacatagaacaacgcatggaacggatttgcaagaacatcagccaaactgcatgtttccaaacatgaaaggtaagaacaaaaacaaaaacataaaatggtgacaaaaacaaaaggcaagaccataaggatagaatggtgacatcaaacataacgattattcaccttgatggagcagttacatagtaagcgagaccaccaacaggaaccgaatggccagagtactcagattccttccatttcccaagaaggttaaccagaaaatttccactgtacctcctgtagagaagctgcaacaaaataaaaacatgttaaaaacttgatcagtaatgtaaatattactgcggcactacaataccgcacgcacctgtgatatgaagtagaggttggtaatcagtgcagagtgcagaatgatgggcatgtttgaagtgtagaacaacttaattggatatgagccttgctgccccctagcattctttgatctcactggaagcacaacacggaagccttggaagtagatgactatgaggaagaccaatacagttgcaagtaaatttgtcacattcggaaggttctgacggtaga

SEQ ID NO: 27984 - DNA, 6283 bp, Oryza sativa
ctttccaccaacacaaaaaaaaaaaaaagaaagacgaattacgcatagtagtttttttcaagaaaaagggtgaaaaaccgcaaaagaaacaaaaaaaattccagctcatcatataaaataccccaactgcctcgcttccccttcccctatggcttctactagtactcctgcatgcacgcccctaaccccgcctctttccttttcttccttactcgccgcgcgtgcgcctctagatttggcgaccttcactgccgccgccggcgccagatcggagcgcggcctcaccgttgtcaggtgagcccggtgatccgatccttccctcatgttatccttgtttttccccatcagatttggccgatccgtgtgtgcctgatctaccgcgccgcgggggaatgggggcggggcgcggtgttgcggtcgcgcgatctagagtgtgttttttttttctcgatgtggtgtttggattcagtggagatgggggttgtgatctgctgcagttcggtttcgctgtttggaggagggggaattgggttgatggtgtcgggtagatctggatcagcatgcccgcttaggttgcgtgcatgctggaaatttaggtatttaggtagggatgtgatctgcgaagccttgtgaatcaacagctgtgttttttggtcgggttggcggtggagatgggcttggatcgcacgggtgctgctacctgtgcagaattttgcacgcccatgtgaaacttggttcatacggtagttaattttcctttttcattttgattgtagttcctgttccgttcatgtgctgaccattgctgcgatttatgcaagtttttttttttttgcaaattcccgtaatagaagaattggattgctcccaaaaaaaattgcaatggaaaattacctgctcaaagttaagtttgacatgtcaacctagcaagaatggtaactttcgcaacgctcaattcctatcaaaattggtaaaattgacttggatccggagtcaaatttagcatatatctacgcctaatcattattattattattttccttcaaaccaagcatgtcagcaacgtcacgaaacgaaaacttgtctatttaggcagggatgtgatctgcgaagccttgtgaatcaacagctgcgttttttggtcaggttggcggtggagatgggcttggatcgcacgggtgctgctacctgtgcagaattttgcacgcccatgtgaaacttggttcatacggtagttaattttcctttttcattttgcttgtagttcctgttccgttcatgtgctgaccattgctgcgatttatgcaagtttttttttttttgcaaattcccgtaatagaagaattggattgctcccaaaaaaaattgcaatggaaaattacctgctcaaagttaagtttgacatgtcaacctagcaagaatggtaactttcgcaacgctcaattcctatcaaaattggtaaaattgacttggatccggagtcaaatttagcatatatctacgcctaatcattattattattattttccttcaaaccaagcatgtcagcaacgtcacgaaacgaaaacttgtcccagaatccaagcacaaatccctgccaaccacctaaccaaccaaaacatcgctctcgatcacatacttcactagcatcgatccgatacccgccggataatcacaactaccaacgaacacaccaacccaggatccatccatgcgcatggatctggacgcccccacctactcaccaaaaaaccacccgcaccataatcaaacgcatccatcccgcagaaaaccaaccaaaagaacgcgacacggatcacacacaccccgcggatacagtacagatcgagcatgagcacgggccacagatctacaggagaagccgcaacgaatggacccgccccgatccgatccgacggcgagaggaagaaacaagaggagagagagagagagagcccgagctgctgcctcacctggccggcgccgccgccgaggcgagtggaagcttcgccgccgccgcgggatcggagggcgtgaaaccctaggcgaggagagagagatgcgggggcgcgcaagagcacgagacgggaggagatagtactagtagcagttgaagagaggagtacctcgatgggtcgctgcgggtggagcccacctccgcggtgatctgacgtggcgcgcggggacggtggggccgagcggcggatggaggggtcccctgctaagcagatgaaaatcaccaaatttccatggaaatgtgaaatcttaccccaacacaatgcatttaaaaaagttcaaatcctgatagttcttggagccggtcatattatcgtatacttccttcatcctttaaaaaatacttaacctataagagttccttcgtccttaaaaaaaacttaacctattaagagaatatgagtcatgtgatcccttctaagacaacaaatctggctaccctttatctagaatctagatcacatcccctcctaggttgagtttttttttgacggaggaagtatgctcttcttaccatgtccaaaatttagacatcaaggacctcacaaacagcaattcaaatgggaatttgcccaagtgagtgggttgaaatgtaccatcacatggggttactcatgagttcataaaacattttagaccctaactatcggattgaggggctgtttggttggcttctaaagattgccatgccaaaccttaggcatgccacaatttgttagtacagtgtttggttggttgctacacttgtatcatgcctcactttacaaaatcattgggcctacacgttatagactcaaattcttaccaaacttagccacacttgtggccaacaaattgttagcctcactttttgtggcataacacacttgtgacaaagtgagatatggtaaacttagccatcaaccaaacaaccccataaagtaaggtgtggtaaacttagccatcaaccaaacaacctctcagttcctctcagttcaacattagcgcatatggcaagaggcacacgtgtattcgacagtttgacacaagccattaagagtgcttcggccgctgggacaatcttctcaggttcaccctctcctggcaccagaaaggaaaaaaaacataagttttttagcatcaagctaaattagttcgggtggtgaggttggaaactcacctcccgcgcacgcaaaatgaagcaacgcattttcttacgattaattaagtatttattaaactgttttaaagatggattaatattatttttaaagcaacttaaaaaccttttgcaaaaaaaaacgcaccatttgatagtttaaaaagcgtacgcgcgcgatacgagggaggtgagttgggaaatatggggaagaatacaatatcattcgcatgaacgacatatcatttgtgatttactggatgaacattcgcaggaacggcatatcattttttgttctaacgataggtaggaatggttaaaattacctgggttccatcatgatcaaaatgcaatgcttcatcattgctctcctgatgaacaaatcacaatgaggaaatgaaaaacttcgataaaaattacatttaaaaaaaatccatcaaaatgatacaaacgtagaaagtcgcagcagtgcaacatataatatctacggtattgtatagcctcagttattatttcaggaaaaaataagggaaatttattaccctttatcttgaaacagaggacaatatctccttccctgatgagtcggcattctcatgattctagcgggatggattacagtcggatagccttccggacattgatccattcatcctcttcagccccaaatccttgaaacctcactcggacttcctataacaataacgaagaaatagagctaaattaaaacatgcaaaaggtttaaatgtttctcaattctttaatttgctttaggatctactaacccattagttcacatctcggccattgtgagccccttaacgggaataactaaggctcatgcgagagagaagatagatatagcacttgcgatgtctgatatagttttagctctcaccaagtcttgccccatgagctattgctccagtgagggcagaaggtgagagtgaagatgcttttaacaagagaacgttggacaatgctccaatagtacagaagtacaacactgatcgtgcgaagtaggagtcatcaaaatgcaagtgcttgatggtgatcaagagctccattgtggaggcaataaggggagcaatcccactgccatagagtaccttcaatgggtggagaatcagttcactggttctttaaaggcctgtgcgaaatccctaacaagaggttagtaaccatgtagtatacgagcgaaggggttagagagcatattttgaagatgagtggcatcgcttcaaagctcaagaagatggactttagttcttcctgatgagttcctagttcaccttaatttttcctccttgccttcagtttttgaggcttttgttgtgaactacaattcattgcccgaaaactgggactttgagaagctcattgccaagtagtgcaagaaggggcactatcagaaggattgccctgaattcctgaagcatcttataaagaaagggattccgtacgaggaggactcttcaaagagcagaaagacgcaatagtaatgtgaatgttgtatgcaatgaagtgaatgttgcatgcaatagtgtgtcttcctcgtctacgaatgtaagaagtaagcgcaaacgatgcaatgaggaaaccacggcgaaattgtggcactgtcgtttaggccacattttgaaggggagaattgaacgatttattaaagaagaaattttgtatccgttagacattacggattcagaatattgcatagattgtattaaaggaaagacaatcattatgatctaaagattaaagcaataaggtccaaccgtgaagaagagtactactatgctcggcataccccttatggccaaatacctggaccttttgcaaggtttctacaggaaaatggcatatggcatagtagcccagtactccgcaccggacgagcctcaatagatcggagtagcagaaagactatggatggaggtattaaaaccgcctgcccatattcttaatcgagtaccaagtaagtcggtacccaaaacaccgtatgagctattgacaggaaggaaattcatgctaaattatgtacgggtgtggggctatcaagttgaggcaaagttatttaacccaaatattgggaagctagatcacaagacagtcagttgccatttcattggctaccctgagaagtcgaaaggttttcgtttctactgtcctgatagacacaccaagttcgtggaaatgagacacattgtttctggaggatgagatagtcagggggagcatggtaccccgataaattagtcttgaggagaagcgggtacatctaccgactccgatgattcaagaaccctttttctcgatacctgttgatgtaacaccgacaacacagaatgttgttgtgacaacacctgatgttagttctcctgtgacaacaacgaatgagcaagaggaacctgagattcaggatcctacagaactagttgtcacacaagaggaagagcaacatcagccccaaatagaagatgtaccacaacttagaaaatctcaaagagaaagaaagacagatattcttagtgactaccaagtctatgctagtgaagaagttcaaacacagggtgatcccacctcgtttgaagaaaccatgagaagtgctcattcatcgaagtggcttgaagccatggaagatgaaataagatcaatgagtaccaacaaagtttgggacttagaagaaattcctaaaggagccaaaacagtaggctgcaaatgggtctacaaaacaaaatgtgactctaaagggaatgtagaaagatataaagcacgacttgtggcaaaagggtttacttggagaaaaggaattgactataatgagaccttttctcccgtgtcagataaagattccttagggatcgtaatggcacttgggcatattatgatctagaactacatcaaatggatgtaaagacgtcattccttaatggggatttatatgagaacgtctacatggcacaacccaagggtattgttgtggaaggaaaagaataaatgggatgccatatgaagaaatccatctatggattaaaacaagcctccagacactccagacagaggtacttaatgtctgatgaagtaataagaaggtttgggtttaatgagaatgaagaggacaattgtgtt

SEQ ID NO: 27985 - DNA, 791 bp, Oryza sativa
gatggaaaaacgtgatggctataatatggttccaattttgtgcgtattcggatgatatagatatgaatagacgaatagtaacagtagtaatgacatgtatccaattcaccttttcggaatttcactccaaatctactttcgtcctcgaaacctcaaaattgcatggttgtggatcaatgctctgtactccctctgtcccaaaatataagagattttagatagatgcgactgtctcacgtccacccaaaatctattatattttgggaccgagggagtatactacctacctagtggctatatcttggggtacccgttgcaattagcacgctctctttctctctcctcatcatccctccgggacaaaaagcggcacgcacacctcccctcctctccctttctctctcctcctcccctcaccacgagagcgagcgcggggagctccccacccaccaccaccaccgacggcgactacctccgccgctgccgcgatgtctcgcctcttccgcgagtcccgccgcgactcctcctcctccaacggattctccgccgccgccgccgccacgggctccaccggcggcctcccctccccgttccccgacctcggggtccccctctccgccgccgacctccgcgaggccgcctacgaggtgctcgtcgcctcgtcccgcaccacgggagggaagccgctcacctacatcccccaggcgggggcatcggcgggtggtggtggtgggccggcgtccccggcctccgcctcgtctctctcctccgcgaacgcctcctcctccccg

SEQ ID NO: 27986 - DNA, 678 bp, Oryza sativa
aaaaagtaaatcttttattcaaaccaatcaattatcattagacgctttacttaaaccttttaaagaacaaattgatggttttcaaaagcgggtgaatgaagtgcatagtgagtctgtcaaaggtaacacaaaccttgaagcagaaattaaacgtgtgttacaaattggtatttcaatgtcaacagaaactcagaatctaaccacagccttaaaaggcaataataaagtcctgggtaattggggcgaaatgcaattagaaagtaccttacaagctgccggacttttagccaatgaacattatgtcgcacaagaaaacttccgtgatcaaacaggtaaacgctttgcaccggattttgtcattcatctacccgataataaacatttaattattgatagcaaagtatctttattagcttacgatcaagcggtcagatcagaagaaaaattagcgataaaccaagcattgactgagcactgtaaatcactacgaacacatattgatggcctttccaagaaaaattatagcagtttaccgaaagtctctagccctgattttgtcttaatgtttgtgccaatcgaaccggcttatattgaagcaatgaagcaagatccacaattattcattatggctatgaacgtaatgtcgttctcgtttcgcataccaccttaatgcccatt

SEQ ID NO: 27987 - DNA, 685 bp, Oryza sativa
agtgcttgtgtcgttgttgccttacaaactgttggtgcaattttggtcattacgatggtaattacgccgggtgcaaccgcttatttattaactgaccgctttcctagcttggtgattattgcagcattgattggcggtttaacaagtatgttaggcgcttaccttagctatttcctaaatggcgcaaccggaggcttaattgtttgcttgcaaccttagtctttttatttactttctgcttttctcctaaatatggcttgctctcacagtatcgaaaacgtttagaggtgacccacaatgactgatttaattaaatggtttagcgagccttttcagtttgaatttatgcaaatggcattattaactgccgtacttgttgcttcagtatgtgcggtattatcttgctatttaattctaagaggttggtccttaatgggagatgctatttcacacgccgtgctacccggtgttgtggttgcgaatcttgcaggattgccactggctattggcgcctttagttcaggtttattttgtgccatctctattggttatctaaaagaaaatagccgcataaaagaagatacgttgatgggtattatgtttgcaggcctttttgccttaggtattgtactttttaccgcattaccttcagaacagcatttaactcacctattatttggtaact

SEQ ID NO: 27988 - DNA, 526 bp, Oryza sativa
gtacacgactaatcaccagttcattttcggcgatattttttgtaatagttgcaccggcaccaattgttgcgccatctgcaatgttcacgggggcaatgagctgtacatccgatccaacaaatacattattgccaatagtcgttttgaatttatttgcgccatcataattacaggtaatgactccggcacctaaattgcaattttcgcccacttcagcatcgccgacataagctaaatgattgacttttgagcctttaccaatgtgagcatttttaatttcaacaaagttgcctacgtggctttctgcttcaagcttagctccgggacgtaaacgtgcgaaaggccctacttgtgctttattgccaataattgcattttcaaaaactgaataaggtttaatatctacatcatcacccaccacacagttttttaaaatacagcccgcgccgatacgtactctgttacctaatttaacttcaccttcaaggattacgtttacatcaatttgaatgtcttttccgtattg

SEQ ID NO: 27989 - DNA, 709 bp, Oryza sativa
cgtaaaagattcgctcgccctattgtggataaagatcggccggatattcgtattcacgtttatttagatcgtgagaagctaattgtatcgctagacttaagtggcgaagcattacatatgcgaggctatcgtgaagataccggtaaagcaccattacgtgaaacccttgctgcaatcattgtgttacgttcaggttggcaaaaaggaacgccattagttgatcctatgtgtggatcaggcacgctattgattgaagcagctcaaatgcaagcgggtatcgtaccacaattacagcgtaaatattggggattcaacgcttggaaagggcatcagcaagcgatatggcaacaagtattagaagaagcacattcgcagaaaaatactcaaattgacccgcttttttatggttttgactcggatcatcgcgtccttgctaaagcaaaacagaatgctcaaaatgccggtgtagcgcatttgattcattggccacaagcggatattgcagcgttaaaaaatccgtgcctagatcagaaaggtacattggtatctaatccaccatatggtgaacggttaggcacaacacccgccttgattgcgctttattctgtatttggtcaacgattaaaacagcaatttgctggttggaatgtttccatttttagcggtgaaccatcattattgaactgtttacgtttaagatctacacgac

SEQ ID NO: 27990 - DNA, 827 bp, Oryza sativa
gtgagtaagtggattgcttgctcacttttttagtgagcccaaccgttcttatttgtttttatccaaattaacaaagatgaaggaatttgtaaaatgaaacaaaaattagaccgattacttgtgcaggcagatattcagttaactgaacggcaaaaagaacaacttattggctttgttcatttattgcataaatggaataaggcttataatttgacctcagtgcgcgatccagaagaaatgctagttaagcatattatggatagtttagtcgtcagtgttcatcttcaagggcaatcttttattgatgttggtacggggccgggattgccgggtattccgttagcgattgctaatccagataaacagtttgtcttgttagatagcttaggtaaacgtattacttttatcaagcaagtattacgtgaattagccattacgaatgttacaccggtgcttagtcgggttgagcaatataccgcacgtcagtttgatggcgtattaagtcgtgcgtttgcttcattagatgatatgttgaattggtgttatgccttacctaacgatagcggaaagttttatgcgttaaaaggtgtgtatgacggcactgaattgcaagcggttcaaaagccgattaaattagttgacgcaataaaacttaatgttcctcagttagtgggggagcgccatttaattgtattagcaaaatagattaatttttgtaagattaaccatattttctaccgcattaagcaggcttataatactgagtaaaccattacttacttgtatgaaattgttgaataattgtattaaaatataccaatgtgttg

SEQ ID NO: 27991 - DNA, 564 bp, Oryza sativa
ttaaatgcgtttgatctttataataagcatcttcagaaataatatcgatatcattggaatttaattcttctttcagttctttataaatggtagaagcaataaggcttttacctgaagcagaagcacctgcaatagcaataacgatacaagcttgattttcaatggtttctggcatagaaggttcctagtgtcagcgtataaatgagtgaaaaagtagcctattataccgtatttttgtaagtttttagctataattgaccgctaatttagcatacagaaacctaaacaatggcaatgctagtaattttccattgaatttataaaataaaaaacgtccaaactatttgtctgaacgttttttatttagattcaattataaataaaatttttcaatgaaatttaatttgctgtctaattttaaaactaatggttgacctgttagaatctcaaaatccataatttcagcatcagaaatcccgataatatgtttggcaagtgcgcgtaatgaattaccgtgggccgttactaaaacgcgtttgccagataataatgccggggcaattt

SEQ ID NO: 27992 - DNA, 655 bp, Oryza sativa
ctatttaataagctaaataagccccttatccggcatatacgggggattttattgcaaatatatataccattaattgttactatcctgttttatttgtcgaatgtaaaggtaaacggtatgacgagagatatttaagcgcgtacaacttgattaatcgcgtctttaatatcaaaaatgcctttttcatagagtgaaatcacaatgtggcgatttttgttgttatttaatatttgccgatctaccactgtttcctcaatggttttgtcaatggtttgtgcaactaattcatctactgaactagcaaagtttacgctgttattttcgtcatcttgtgtgcgtggaataaaagaagttaagaattgtgctgttggtacatctaaattaatattgatgcaaatgaatccgatgacatgttgtttgctattgcaaatagcgatggtgattgatttcatcaaaatacccccttttaagcgggtaaaatagggttttgaaacgctatcggtttgcatttgatgtaatgattttagtgctttatcggttaatggtgaaccaatttttcggtcagtgttatggccattagcgatataaattgcagagttttcaaggaattctagtgaatgtagtacaatctcacaatgttcaccaatcagtgcag

SEQ ID NO: 27993 - DNA, 1423 bp, Oryza sativa
acttcctatccaaatataaaaataattaattcccacttagcgcgagcaacacacatcaggcttagttaacctagtccttgaaagtgtgaaaaagaacaatagcttagctactgcgttttttcttcgctacaggttttttagtgactgacttattagtttcagtggctttttttgcaacttttttagttttctttaatggcgcgactgttttttgttgttctcgccattcatttaacttggctaataatacacttcccataggactaggatcgccggtaaataaagtagctaaaccattattctcaataatatgtcgacgcaatgctaaacggttccgtatgtttttccgctaaacgtagcgcacattcaatatattcatctacagtatcagcaatttaaccactctggtaaacctaagcgtttaaacagtccttcatcaatatgttcatgtacttaatcaccggttttacaaatgccgaccagtcctaaagtcaccatatcaataatgccattagtattcccaaatgggaatggattaagcatcatatcgcaattatgtaacacggttaaatattgatgataaggtgcgtgaggatatgctgtcgctgaatcgcctaaataggatttaataaaacgagcaatatgaggatgagtaacgccggtcgattgccctaatgcaaagtggaagtgaattttaactttagctcgatcacgaatcacttttaatgcatctagaaaatatggattcaacttcattgtagtggcagcaataccaatattaaccacttcaagattttcgcgttgcagatattttacttttttaggggctaaccccgatggtacgtaaggtaaagcatcttttggaaagggtataatgtttcactaaaacaagcctctgaaccaatataatcttcttcagcaatcacataatcaatgaattctgaatatgttgtggctgggtggcataatgcaatcacttgtatcggtgctagacgcgtattactcacaaaaatagtgcttaaatccattccaacgctaggcatatacagtactgctgctccgttttgtttataaatagaacgaatatgatctaatttatctttcatattgtcatcttctaacaaatgaaattcatcaaatactgcttgtccattagcatcaactgctttgctccccaaaccaattaaataaaaatgttcacgagcagcaatcattgaagttgaatgagtgtgataaatagaatgggttgaatggaaatgctctagtaacaccaccatcacgggcttatcattccgataaccaatgcgagttgtatcacgatcttgccaaccatattcattaacaacatggcgacgaataacatgatttaaagcttttttaaccgcatgcttattttctgcaatatcataactacagtgcatat

SEQ ID NO: 27994 - DNA, 753 bp, Oryza sativa
ggtttcaaatctagccctaaaagaaagtaatgaagatatttcagatgcaattgaacctcaaactagatcaagaaaacttgatgagccagagccgatttacggtacaattaataaatcaccagaagcaattgcacgagcaaatgcaaaagcagatgaggccatacaagctttaggctatgatccacgaattaaaccggttgtgcctgaagaggcacctccagcattgccgccgagaaacttgcaaactaaagctattagtgattacgatgatgtttcatatgtacctgacttcaaagtaagaaaaacagatgaaccagagccaatttacggcacgattaataaatcaccagaagcaattgcacgagcaaatgcaaaagcagatgaggccatacaagcttcaggatatgatccacgaattaaacccgttgtgcctgaagacgcacctccagcattaccgccgcgtacgcaatccttgatagattcaactgaagtaccaagctatagaagtgctttagctaatgtaaaatttgatgatgcatccccatggccacaaccaagtgcgttacgtagtaaggcttttgctgatgaaccttcatcagaaacgcctaagtctcgtggtaagcgtggtatttctaagaagtctttatcaaggacagttcaaccacgtagtagaaagatttcagaggaatatagctcttttggagcgtttaccattgcgtataatagataatgggtcagactatgctgaaatat

SEQ ID NO: 27995 - DNA, 602 bp, Oryza sativa
agtcgtcagacaaacagagccagaagtgatttatgaaaaaatcagagggcaacaagtagaagtagatgacccatcatcgttgtatgcgaaagtgaatagaaacagacgtttagataacgtagaaggtttttatccaccggaacagttacggacaagaagtgacaagttagcaaagcaagtgagtcgtgtaccgacaacagagccagtgtatgcggacttacgcttcaaatcggcggaggatgattacgcaccggcgctaccggcgagacggagctgggtaatgcggctggttttagaaaagcgaaggtaaaaggtgaagagagtgaatctacatggagtcgcttgaaacacttatttagcagggagagtggcaagaaagcacaagtagaaggaccggagataaaacacttaggcggagtggtagataaagatgcgttctacttccccttggataagatagtgacacgtcgagatgcggaaggagaaatccgagtgaacatggataacatcaagaaagcgtttaatccacgagacaagcactataacagccaagaggcgagaagcttaaggtcgttatataatcaagacccaagtatgtcagg

SEQ ID NO: 27996 - DNA, 790 bp, Oryza sativa
  unsure (1)..(790): unsure at all n locations
ccattagaaaattaagacggattggaacaatatccggaccccgcatganaaattctcgagtctcccacgtaaagcgcaatctgatttaggtgagaatgcattatcttatggtttacaaagaggcagacnagcattaatcagtaaagcgaatgcggcagataaagaaggcaaaaatgcgatattagcagacagttacataggcaaactgaatcttggttttgaatttggagaattaccaaaatttgcaaaacaagtgaaagatggcaaagtanccgagcaagatatacaaaatatcgcttcatttaatgacgaaacagctaaattagcgcgaagaagcgaaccaaaaaatcgtattaacgatgctaatgtagatgataaccaacgaattattcgtgagttaataaataatgaagcggcagttgatgcattaaaacggatagctacgctaagtgaccaagaaaaagcgatgcacagtacattaagagcaaacgaaaaatttgatatggatgaactagaggagtcccctaactatactactgcggaaaataaatcgattcgtgattataaagatacccagaaagcattaaatgatgcacgtatggacttctttaccgagaagacgaaatttatcgcgaaagaaacgctagaacgaggaggacagctttactttgcattagatggtttagtgacaaatagcccaggttttagagctgatacgcagattaatatggataaattgaagggtaccgagctcgaattcgccntatagtggatcgtcactcactgccgc

SEQ ID NO: 27997 - DNA, 681 bp, Oryza sativa
aaattaccgcctgaacaatgtgtcatcacgcgtaattgcggtaatgcattacgaatttgctcagcaatttgaaatgcctttaacgttgtattatcgccagcataaacaagataaatatcaactgcttttggtaaactcatcgttttatttacttcttgaacgagtaatactaagcgttctaatcctattgcaaaaccaacgccttgggttgcatgtccgccaagctgttcaactaagccatcataacggccaccaccacaaacggtaccttgtgaacctaaagcagaggtaacccattcaaatactgttttattataataatctaaaccgcgtactaattttgggttgacttcataacgaattcccattgcatctagcaactgacataattgtgcaaaatgctgacgactttcttcgtctaaataatctaataacttaggcgcatcatttaacactgcttgcaaagcttgatttttagtatctaaaattcttaatggatttttaactaaacgttccttttcttcatcattcattaacgcggtatgatttgctaaaaaatctactaatgctgcacgataattagcacgagcagctaaagaaccaatggagtttaattgcaaagaaaggtgttgctcaatgcctaatgcttgccataagcgcgcagttaagagaattaattct

SEQ ID NO: 27998 - DNA, 570 bp, Oryza sativa
tgacattaagctacttaggtgctgaacgtgcaattcctaactacaatgtaatgtgtttagctaaagcctccttagaagcagcaacacgtgtaatggcagcagacttaggtaaagaaggcattcgtgttaatgctatttcagccggtccaatccgcactttggccgcttcaggaattaaaaacttcaaggaaatgctctctgcatttgaaaaaacagccgcattacgtcgtacagtaaccattgatgatgtgggtaattccgctgcatttttatgttctgatttagcttcaggcatcacgggtgaaatagtacatgtagatgcccgttttagtatcacagcaatgggtgaactaggcgaagaataaataactaaaatcacaataaaaacggatgcaatagcgtcggttttttatcatcactatagccaaaacacatactaatttactcgctatttagttcattttattcagacaatttacaaaaaaatcctttataatgagcaacaactactatcgcacttttgtgtgctttttatacataaataagagaaattatgttccaaaacaatcc

SEQ ID NO: 27999 - DNA, 1856 bp, Oryza sativa
  unsure (1)..(1856): unsure at all n locations
acccaatttctcagctagttgagcattattacctaattcaggatgaacatctaacggcaaatgatagctaaataaattaatatcattcaataataactgctttatccgcttgcttttcattccacgaatacaaggcgattcatttttccaaaaatagccatgatgcactaatattgcatccgctttcttagcaattgcttgttcaattaacggcaatgaagcagtcacaccggtaataatgcgttgaatgttggttttaccttctacttgtaaaccatttgggacaaagtctttaatagcataactatttaatttttgattaataatctgttctagttctatatgggtgagtgccataatctttccttgtattgagaaaaagcggtctattttttgcaaaatagttcacaaaaatagaccgctttacctaaaatgtattaaattattcaagccagagtggtagtctagtttcaactcttaaaccaccaagaatacttttcattgcttcaacacgacctttatgttgttgagcagcatttgctnnnnnnnnnnnnnnnnnnnnnnnnnnnnnnnnnnnnnnnnnnnnnnnnnnnnnnnnnnnnnnnnnnnnnnnnnnnnnnnnnntatattctgattctggtacaccttcaccatcatcattaactgacataaccaattctttatcatcaatgtaaatcagtacagtgatactttgtttagcataactttgcgcattacgaattaatttttctacagcactggcaagaataatttcatnaccgttaataaaatagccttctacattatcaattcgttgctcaataaataagtctatttgattctgttctgcctcaaactttgcatcttctaaaatatcatcccaaattttattaattgagaagacttctcgcattagatgctgattaatttgctgacgtgaaagagaaagcaaatcatgtaccatcgtatctagtttcataatttggttatcaatacgcgttagctctgcagaatctccgttacgttgacggattagcgctgttgctaattgtaagcgcgcgagtggtgtttttaactcatgcgaaatatcagaaagtagtcgttgttgatattccgtcaactcctgtaacgaagtaatcatttggttaaaactacgacctacctctctaaactcatgaataccttccgtttctaattttgggttaatcgccaaattacctgtggctaccgcattggcacagattcgtaattcttttactgggcgcgcaattttccacgaaagccaaagtagaataggcacacttacaattaatacgatcataagcattagccaaggcgagtcaaaaattctattaaaaaactcttcctgaggatccactatctgtgcaaaatattgcatatattcgcgcttattagacttaaccaaaaaaggaccggaaatttctaaactaccaaagcgacgttgtaatggttcaagtggtgtttgtgcacgataaaggaaaacttggaatgattgaattctattagagtcagctcccgctccaacgaaaatgcgagttttggggtcgaataaaataatattaaagccattttgagtggctacagaaaggcgacgttcaaaaatttcatctaaattatattgtaattctgtttgacggctttcttgaataaaaaattcatgttcacctttttctaaacgtgagaatgaacgcgcatcgaaattaggaatggctaaggtaatagctaacataatagcaaatgttaagccaaaataggcaaagagttggtaagctagataatttctaacagattttatcttttttaaaaatttaggcatatattaaatactttaaaaa

SEQ ID NO: 28000 - DNA, 595 bp, Oryza sativa
aattaaatttttagcaaggggttgtttgataatagaactacgtcctgaaattgtgccatctacgcctgcaatagggaatgtttcaaataattgtaagttagcttcattatttgcaatatattctaatgcttgtaatagcgtttttgcattcacttgattatgtcttgataagcctgaaccatcgactaccacactgttattaaattgtacgccagcttttgattttaataactgacgtatagtttggctagcaaatggaaaagaagcggggcgatttttttgttggttagcaataatgcgaaataaactatcggcaatttgatttatccgattttttcatcatttttctcagtaaggttggtaatggttcagaattatgttctgcaagtaaatgcccttgttgtttattgagtgattcttgaactttgccattaaacgcaatgcctaaacgagttaagtttgctttgattagatttgcaccatatgctacaggatcttgcacagaaaaacttaaaccgaaaggttgcgtttggcgagccatacagccttttacgtggtagcggttattatcatttaccaccacatctaattgaca

SEQ ID NO: 28001 - DNA, 1015 bp, Oryza sativa
tttgcttatcaccaagcacgtgctaaaaagcgtgtagtggctgaacaaccatttgaaatgccagtaagcaaaaacgcatttgccacagaagcggatattgaagctgaatttgagtttgttgcagatgaagcgacccaaaatttagcggcattattaaatgcgacagatgaagaataagcgatagcgtttatttgaaaaagaaaaaagctaggtaatttacctagctttttttatgtctgaatgtaagcctaaatatctctttaatattaatttatttcatttgaaatatagatcgcattaaaaatttttcgcaaattttcctgatttagtgggcaatatctcttacattgctgtaacgaaaggggtacactaatcgtctaatataatatgcaaacgattatctattaatataaaaaggtagtgattatgaataaaactttaggcagtacattattggtttcagggacgatgattggtggcggtatgttggctatgccattgacgtcagcaggtattggtttttgtttaactttagtattattggtcgtgctgtggatattgcttacttatagtgccttattatttgtggaagtatatcaaactgcagaacatgatgttggtattggcacattagcggcgcgatattttggtaaaacaggacgagtcattgctacgttagtattaatggtctttttgtatgcgttgttatccgcttatgttacgggcggtggtaatattttagcgtcaatgtttccagctgcgcctgatcatttaatgacagagaaagagaaaattgcgatagtcatgtttacgataatttttggtgcttttattgtttttggcactagaagtgttgatggtattaaccgttttctgttttttattatgttagccggtttagcgttggtactgtttgctttaatgccttttattcagatagataatttactcgcaatgcctgtggataacttattattagtttctgctagcccgatctttttcaccgcttttggat

SEQ ID NO: 28002 - DNA, 682 bp, Oryza sativa
tggcgagtgagtggaaaactgccagcttgtatcacttctatttcacctaagcgcgtaggaaagttttgcataatggttaatgctaattgttcaggtgataactgtgttagttcggcaatccgctgtggtgcatcgtaccaaacgacacaaccattttgatctgcaagcggtaaaaaagcacgtggacctgttggaaagaattgttgccaagtaacagattgagtgggtaaagcagttttaaccgttgcgagtaaacagtgttgccgatattgccagctagttagtccgatacctgcccaatggcgaacttgagagttagcgccatctgcggcaatgattaatgaggtagagaaagtttgatcgtcaaccgtaatcgtccagccagctgaatgatattcagcagtaagttcggcaaaaccaactatttgttggcagttggaatagaggttaagtgcctgccataaactcatttgaatgagcttattttcgaccataaaacctaaggtatctagaccaatttcctccgcagtaaagcgggtgctaaagccttcaacttcccaagtttccaagctatcgtaacggcaaacacgcattgcttggatctgttgccatacacctaattctgctaataaatttacggaagcaatgctaattgcagaaatacgtaagtcataagcagaat

SEQ ID NO: 28003 - DNA, 771 bp, Oryza sativa
aagcaaatgcttgctcaatttgtgcggaatcaacaacatctaattgaatacattcaaacccttcagcttgcaagcgctcaatatctgccgtttttctgcaacttgcaatcactcgccaaccctgttgttttaatagtttagccgttgcataaccaatgccagatgaacaacctgtaattaaaattgtttgcatcacatgatcctattacaaataactgacaaaaccctctgtattttctgtttcacgtgctaatgaaataccatctcttgcttccttaggcgatccaactaacaataaccctattattttatctcctgtttgacaaccaaaagcctgtcgcaacattttgccttctacccactgattactaatccaaacagtatcaaaccctaacgcattcgcagctaattgcattgcataagttgcacagcctgcactgatcatttgctcccaagcaggcactttttcagattgatgatctatttttgccacaatgccaatcataagcggtgcttgctcagcaattttatccgctttaagcgcatttttttcgtccatctcaaactcaatggccgcatccaccaaacacgcttttaacattgacatactctgtttttcaatcaccacaaaatgataaggcttcaatttaccgtgatcaggcgcacgtaatgcggctttaaacatatgttgcaattgttctgcgttaggcgcaatttgccctaattttttatttgaaaaaaaaaaatgtaataactctaatgttttcatgg

SEQ ID NO: 28004 - DNA, 892 bp, Oryza sativa
cgcacttaatgatttaaatgccgattgcaaacgttttaattttgccggtacatctggacgatttgcgatagctgaaataagtacattcatatcaaccccttgcaattcaactgacaaaatcgctgggtactctattggcaaaggctcatttggctttaaattcaataagttacgtaaggtttggtcccccacttttagagtagtgcgatagccaatcaaaccattacgtgcattcaaagggccttgcttggcttgttcaaccgctaagtgatcaattgcccccacttccattttattttctagaatatgattaatctgttcataatttttaatggtttgttcactaacattaatcacatctttcaaataggcaatttgataatagctagccacaacggcattaataatagaaagtcgagttgcttttaagtcttctatcgttgctttatattcccattccgacgcactagcactatcagctaaacgacgccataaatcaagcgtataacttaaattgaatgaggcattgtgtacaacatttgacgccttggtaacgctattagatgattgtaatgagccatcagaaaccaacaattttgatgccgagcttgaaccactaccactaaaagttggtactaaactagcaccaactaaattcgcattatatagcgctttattaaccaaaatagcacttttggctaagttaacattattagctaaggcttggctaacaagacgatttaactgcggatcgttataccctttccaccattcttcatcaatattaaactgcttagtcaattcttcatattgctggtagctggtttttgcttgttcaagcgagccatcttttgtcatactcgatgtacaaaatgacaaaaagcttgctaac

SEQ ID NO: 28005 - DNA, 929 bp, Oryza sativa
aaaggcaggggctgatatcttaaatgatattcgcgccttaacagaaccacaggcattaacaaccgcagtcaaactagcgttacccgtttgtttaatgcatatgcaaggtaatccacaaactatgcaacagcgccccaaatatgatgatgtgctagcagaagtcagcgattttttaaatcaacgcatttttgaatgcattacatcaggcattgccaaacagcatattatacttgaccccggatttggctttggtaaaactgttcaacacaattatattctgctaaaacacctaaaagccttcgccgattcaggctttcctgtgcttgctggtttatcgcgtaaatcaatgatcggcgccgtaacaggcaaaagcgttgaacaacgcacagcaggatcaataaccgcagcattattagccgtacaacatggtgcacggattattcgtgtacacgatgtagcagaaacagcagacgcattaaaagtttggcaagcaatgcaagattgtgaataaggaaatatatgacaactctcgtttatggtatcaaaaattgtgatacagtaaaaaaagcgctcaaatggttacaagcaaataatcagcaaccacaattacatgattatcgccttgatggcttagatgccgaatggcttgcacaaatggaagccaaatttggatgggaaacattagttaacaaacgttcaacaacgtggcgaaacttagatgaacaactcaaaaatagtttgaatcgttcaaccgctttacaactgttacaacaacagcctaccttgattaaacgccctattgtaattaaagacgatattgcgttgattggctttaatgaacaagactatcaacgcttaataaaccatatttaaccgcatccaaaaataattgaacaacaaaggtaaacctctgcaacatttcaaccgct

SEQ ID NO: 28006 - DNA, 756 bp, Oryza sativa
attagccgccattgaaaaactagcaaaagcagctcacaggtagtattccagattcattaagtttgacagaccaagcgattgccctaagttataccaatattacattacccgatagttagcgaaatgttaggcttaatcgatgatgatcaaccgcttgaattagtgatggctctagcccaagcaaatggcgatcaagttatggctattatccaaaacattgcaacaaaaggcattgactggcaacaattgctaaatgatgtggcagaaaccttacaccaaattgcaatgttgcaattgcttaaacaagaaacaccatcagacacgccattacatttgctcgcaaaacagataccacctgaagatgtgcaatttttttatcagttaatgctcatcggcaaaaaagaattagcttatgcaccagaacaaagtattggtgtagaaatggtatttttacgtgccttagcatttcatcctaaacgtactgaagaaattaacaacgtgcgcaactaaatcaagcaaataacgaacagtcggcaatggttgacaatacccaacataagcttgaacagctcaaagccaattttacacaagtaaccacagataaaacaagtgcacaagcggtcgaattttcaagcaaacgatcaataaagccggcgcaacaaactgtgccggctaatattacagatagcacaaataatacgctaatctcacccgcacttgttgcaatgcaagcgcggaaacaattacaacaaaagg

SEQ ID NO: 28007 - DNA, 631 bp, Oryza sativa
cataaaagaaattagaatggcaaaaaaatccgttttattgacccgctttatcaaaaatattttaagctatggcctgatctttattgcactaagcgtcataattgattggtatcgtaaaccgactgaaccacatcagtttgcccaacaagtactatacgatcttgatcaacaaccacgcattattgcacaattaagccaccaacaacccatgctactttatttttgggggacttggtgtcgctactgtcaatttacttccgctgcagttcaacaattagcgaatgaaaagattcccatattaaccattgctcttaaatcaggcgatgagcaagatatctctaacaactacttaacccaacaaaaatatacttttcctaccatcaatgatcctgatggtaacatcgcaaaaaattggacaattcaagctacacctacgattatctttataaaagaccgcaaaatcgttgaatatacaacaggactaactagctattggggcttaaaaagtgcctttggctagcaaatttaaactaaaacaagcggtctactttagcttttttgagcaaattagaccggttaatatgatgagaaaaaaatgatcactgttcaattatcaacaagaacgcgaaaa

SEQ ID NO: 28008 - DNA, 1955 bp, Oryza sativa
tcctctacgctttactgctctcgagaaaagattcagattaaaaagctgattgtctgtagattgttttaattcctgtaacttattaagtaagtttgttaagtaaggatataatgcattggaaataggtaaggtatggtaatcatggtttttatttatttcaggaggtatgtaaattattcttttttcaagatcaacatcctttatttttagttttattaattgagtccgacgaatcgctgtacaacgaagtgtcataataattgtttgtacaaaccaagtaggacgcagatattcaggaatgttagcattttcttgtataccacaactcaatttttgtaactgttccgggctatatatcttctttctatgttttccctctttaactgataacttattaaatggatttttctccaaagaaagtatttcgtattctataccaaatttgaagattgtttttagttgtcgaatgtagctattccaagttacagggctaatagatttatctacaacgttctttctccactctaacaaacttgtaactgtcagatcatctggatattcgactttgcagtttttctttaactgccgtattgctttttcatagcttttgtattgctttttcatagctttttatggtgtcaatacgcaaacgacgatggaaaaaaatgagtcaagtaaaatatcgaatgaggctttatcattctgtttctcctctataagtgttaaatgtagattgtcaatgagaacctgtttaccgaagaaatattcagtatctttaatgagatatccacctacctttgaggattttcttgggccaattaccgaacatttccaaaagttctggctatctttattgggtagatgatatcttttgtgcaattttaaatcttgaaaagcatattgcaaactttcaatatctttttttgtataactaactcccttgctattaaaataatctgtaaaaataccaggcgttactaaaaataggtgattcttcacgatatgaagtttggcattttttacgtttatagagagtctttttgttgcaattccttgtcttaaccattcaataaacgcttgtcctgacatgatgttggggttaaccatttcttcttccggtaaatcaattactgtaccgttttctatattttcagatatcatttgaatgggtttaactatctctatagtatcgttactacttagattggttgtttgctctgaaggtgtaaataattccaaaacaaaatctgtcatattttcattttttttcgcttcaacttgattttcagtctcgtctaatatgacttcactatttgttgtttctaaatctgatgatggtacagcctgttcaggtttgtttgttaagtctgcctcagtagtcatagtttcaatagatacttttccagcaaagaagtctgggcgatcgctaacattttcccaaatagtttccggctttattttaagtagagtaaaaggtttcgggggacaccatcctgaatctgctttttctgcaatgccaaattgccatatcatcaggtgttgactcaataacattgagcgattgcatttcactaaataatttagggttatccgatggtgcagatataccttgctctaataagtatgcccgaatttgatcagctgtcgatttactcattaaccaaagtccgtctatggtataccaaccatccgcaggacctttaggggtatttatctttaatttatgttgcaataagtagagcaatgcaatgattaattgtttagcaaatgatatagttggacgctgtgctaatttcgttacatcgccaccgagagctaaagttacgctgttttggtctgctttttgtactatttcagatagtattccggctttatccgggtgatcagccattgcatacattaattatgaaaacacttcaggatattgtgtcagccaatcaaaggcttcttgggga

SEQ ID NO: 28009 - DNA, 595 bp, Oryza sativa
gtttctgagttacgtagtattttaaaatgggcaagcttattacatgaaattgggattgtaatcaatcataatggtatccataaacattcagcttatattattgcacatcgcgatttaccggggtttgatgttgaacaacaacatttattggcgattttaatgcgattccacttaaaagcatttaaatgcagtgatattcgtagcactaatcgttatcaacaccgcgatattttaaccttattacgtttatttcgtttagccgttttattaaatcgttctcgccaagcggctgtttttcctcaaatattaacgcttaagacagaaaaaaatcactggcaaataagttttgatttagattttttaactaaaaatcctttagtgttagctgatttagaagaagaacagcaatatttagctgcattaggtttatatttgcagatcacttcgttaagttaaaatttgatctagttcgtatttttcctttttattgcttgttattttattaataaccttttaacctacttcaattggagtaggttttcattaattgcaattttatggagcaaaatgatacaaccatattccattattaatt

SEQ ID NO: 28010 - DNA, 628 bp, Oryza sativa
ggtgtgcggattatcctgatgccttgcaatttattgagcattttcattcacaaagcccagataataaaacaaactaccataatgtagtggttgatcaaagtttagaaaaattgcaacttgataatttatctgagcaacaacgtcagcaactgattgagaaggttgttgaacaaatagacaatgatattgctattttacctatgttccaatattatcgtagagtggcaattgacccgacagtcttaggcattgatctaaataataatagcgaagttatttatagcaaacacttatatcgaataaaaccaaaggattaattgatgaatcaactaaacggacagcaattgaatgacattatattggtgttgcaaaattttacccattcaacactaaaaaaagatttaattagcttaaatgcctttaagaaagcggaactaacttgcgggattttaaggattgaattaagtatgccttttgtttggcaaacaggttttgaagcattgcaagcggaagtagaacaacaacttaaacaaattacaggtgcaagcggtgttaaatgggtattaaattaccaaattgctacacttaaacgggcaaataatcatccagcggttaatggtgttaaaaa

SEQ ID NO: 28011 - DNA, 564 bp, Oryza sativa
acttaattacctaacgctacctgtgcatttttattctcgataaactcaattttatagccatcaaggtcttcggcaaaagcaatcactgttttaccgcctaataccgggcccggctcacgcgtgattttaccgcctgctaaccgaaccgcttcaacagtggtataaatattatcaatacctaatgcaatatgcccaaaagcattacctaaatcgtagtgatctactccccaattatacgttaattcaagcaccgcattttcactttcatcggcataacctaaaaaggctaaactatacttatattgttcattctcactagtccgtaacaaacgcatacctaatacttcagtataaaatttgattgaacgttctaaattccccacgcgtaacatagtatgcaaaattcgcatagttaaatcctcattagagttaaaaaattgtgcttattatggcataattctgccttaaaatcatttttcacgctttgtactttatgtcacacgatcatagttctgaaacaaaatatgatatagcctgctatgcattgtaaccgatgctcttaat

SEQ ID NO: 28012 - DNA, 770 bp, Oryza sativa
  unsure (1)..(770): unsure at all n locations
gattttccaataatgccgacaatgccgcacataattaaaaacctctctatttagtagtagtcgtagaatttaaaaaacttgaattagcttgtaattgttcaaagaaccatttcacaataaaatcgaaatgcggaataagttgagattcctgccataattcagtttggtttgatgttgtaaaagtatctatgaaaaataaaatagcggctacaatcaaaataccgcgtaatgctccgaaagcaatgcccaatactcgatctgtcgcagataaacctgtggtgttaataattttacttagtaatgcattaacaatcccacataaaattaatgtgataataaataagatagccgcctctataccattacgtaagtattctgaattttgaaaataaactgaatcaatttcatttaagtgactgctcaaatnagaagagacgtactcgcgacaaagaagcagaatccatcctgaaagagaaagtacttcacttataaatcctcgccaaagactaactgagatagaaaaagcaattaagctaatgataattgtatcaatcataaaaaccccaaaaggcgaatcgctatattttacaaaaaaagaaaacgtttgcgtagtgcaaaaacaataaaaaacgaaacaaatatgttacaaaaaaataataagcggtttatttctgcaaattcttagcaaaatccaaccgcttgcatatatattatgcgggctgataaccaacatcttctaacgttgggttatttgcgccgagtttagccag

SEQ ID NO: 28013 - DNA, 1255 bp, Oryza sativa
attaagtggtattgcacaatctgattcagtgatttggaaattatcagacgctgattttttgcttaataatgcgttacgtaaaatggtgcttgataatgatattgataccaccaaaaaattattattagaggcagatgccatattagcacaagtgccaaatgataaagtagcagacatacgagaagcgattagaaatgactgggagctactagccaatatgaatgtagtggatcaaaatagcttgatgcaacaactaacgacattagcaaatagcttagatgatttaccgatgctgtctagtgggcctacagaagatgatccgattaccaatagcaaagtgagtgattcgatcaatgattggcaacaaaatattgaaaagagtgcaagttcattcttagaccattttattcgtgtcactgatcgtaacaaagcagatgccaaagtatttattgcaccgaatcaagaaatttatttacgcgaaaatatccgcttgcgtttacaaattgctattttagccgtgccacgtcagcaaaatgaattatataaacagtcgattgatgcggttagcacttggattcgtagctattttgatacgcataatgagaatgtgaaaaacttcttaaaagaattagatgatttagctgaacaatctgtttatattgatgcgccaaaccgcttaggaagtttagttttacttgaacaattactgaataaaaccccaaaagcgatcgataaaattgaaataaaagctgaaaaagcgttgcctgagccgacagacagtgaagttaaaagaggtgaagcaaatgcagaagctatcgctgaggatgaatcaaccgaagcaaatcattcagcagttgaaatggacgtagaatcagaagcttatccatcatctagatcagccgagcaaacggctcaataggagaaagttatgtttagagtgctgtttttaatgctgttattgcttgcaggtttagtcgcaggcccatatcttgctggaagtcaaggttatgttcgaattgagactgattcgaaagtaattgaaatgagtttagtaatgttggtcgtattctttattatggccatgtcaatggtttatattattgaatggaccatcattcgtttttttcgtttaagtaaaggctcatatagttggttctttcatcgtaaacaaaaacaagcccaacaagaaaccttggaaggcttaatgaaattccgtgagggggattattctaaagcggaaaaattgtttagcaaa

SEQ ID NO: 28014 - DNA, 562 bp, Oryza sativa
ctaaatgttgtttggtttgctgataacgcggcgatgatgctaattgttgaaaatcaatggttcttcgtttttttaaagttaagtatttttgttggtctaatttatttggttgataagttaagccattcagtacttcaattacaccttcaggttgattacaaagtagtagtaaatcacaccctgcgttaattgcttgctcactccgttgtagaaaattgcccattaaattagcaccttgcataccaaggtcatctgaaaaaataatccctttaaattgaagttggtgtcgaagtacttgttgtaaccagtatgtagaaccgctagcggggtgtggatcacattgtgtatataccacgtgagcaggcataatagcagacagtttatttttagcgataaaatactcgaaaggttgaatatcataattaaaaatattcgctttggcgcgctcatcaaaaggggtttctaaatgcgaatctgcgataacctgaccatggccaggaaaatgcttacctgtagtcgccatttctatttcacgcataccatcaataaaaccttcagcaat

SEQ ID NO: 28015 - DNA, 682 bp, Oryza sativa
ggaaagttatttacaattattccaaaatgtgagttattcatcagatattattttacccactgaaagtgcggatgaaatgcttgaacacgtgttggcattacctcggtcaggggtgatgagtgagaaagataactttggtgaaatgattcgcttagatcgagaatcagccgtattaatgacctattatcggaataatattcagcatttattcgttttgccgtcattagtggcgagtatcgttttacataatgaagcagcgtctaaaacattgattcgtgaaacggtgagccacatttatccattcttaaaagcggagctatttttacattttgatgaaaaagaggtgttagagcaagttgagctgatcttaacggaatttattcgtcaacaaaggtgaaatatgatggtgacgtgttaaccattaaccgtcgtcgtttgccaaccttgcaattacacgcggcggggatacgtgaaattctacagcgttattatattagcttaagccttttattggagtgcccagccattagtcgtactctattagaaaaaagagagcagaatgattgctcaacgtctttctattttacatggcattaatgcgccagagttctttgataaagcaattttttcaacctttacagccagcctaaaagcacaaggttattttgatctagaaggtcat

SEQ ID NO: 28016 - DNA, 521 bp, Oryza sativa
taaacaaaatgccaaaaaatgtaagccaaattcacctaaatgaaatgttaatgctgtctgagtgagtttcacaccttttaatgtttcactgccataattatctgacattaaaataataattgcggtacaagtacacaccacaatcgtatccacaaacacccctaacatttgaataagcccttgacttaccggatgttttgcatttgaggttgctgcagaattaggtgctgatcccatacctgcttcattagaaaataatccgcgcttaattcccattaacattgtctttgaaacaatactaccaaagaatccacccgcggcggcagaaaaatcgaaagcactatcaataatattagctaacacggcaggaacagcgttaatattcatacctaaaatagctaaagcaataatcagataaaataatgccattactggtacaattctggctgaaataacaccaatgcgtttaactccacctaaaatgattatggcggttaatacgactaaaatcatgccaatat

SEQ ID NO: 28017 - DNA, 561 bp, Oryza sativa
aggtctgaattatggcattggttttgccattatttttatgttgcattttacggttgctacaaaacagcctgcaatgaccgcttctcgttttgctgaggcggtcgaacgaaattcacaaggtagagcagtgaatatgaaattagcacaattattagtggatgtattgcgttcgcaaagtgcggcggtatttgggaatgtattggtgtcagtttatgttgctgcaggtattgcttatctctatgcctctcacatggggcagccgttgttaacatcagagatggtgcaatatcagttacattctattgatcccacgcaaggcacactgtggtttgcggctattgccggcttatggttgttttgttcgggtattatttccggttattttgataatcgcagtaattatttaaacacgcgtatgcgattacgtcagcatccagtgttgaaattattattaccacaacgcttacgtgagtgtttagctgattatatccatgataattctggatctattatcggtaatatatgctttggtatgttattaggtttaacgggggtgatagg

SEQ ID NO: 28018 - DNA, 1018 bp, Oryza sativa
ccaaatttgcaaaatttttacaaaaattaatggctttgtaatgcttgttgcgtaaactctacgcttaacattcgccggtggtttatgttgaccaaaacctaagattgcttctggttcgctgtctgcgtaagcaatataaggtttgatatccaaaataggcgtaccattgactaaatcaacactaccaagttttaactgtgcttttccatgatgtatttcgatcgcttctaatgcgactttagataacccgatcggattcgggcgatgagtggcacgagaagcaaaaacaccaatacgttgattacctcctaaacgtggcgggcgaacggttgaatgccattcccgtgcggggagctgatgaaattgaaaaattagccataagtgactaaattgtgccaaaccgcgtaccgcctctgcacaattgtagggggggaataaagtaaggtttccttttccttgagccactaaattgggttgacgtggcacagaaaatttttcatcatacgggctttcaataacaccaatcggatttaacactagaggttgtggattcgccataaaaatgcactttttctattataaatcaaaatcaacacgggtattttatactaaaatacgttattttatatctttttatttaatccattattacttttatgaataagcgttctattttttcgaactggtttatcacggcaagaccaaaaacgttacctttagcgttggcttcaattatggttggatctgcattagctaattgggtggggcaatttgattgggtaacgaacttattagccattatcactactatgctgttacaaattttatcaaactttgcgaatgattatggggactatgttaaaggctctgatacgcaagagcggattgggccattacgtgccattcaacaaggtaacattaccggcgaacagttaaggcaagcggtcatattcttaagttttctgtcgtttatctcaggattggtattaaccatttatgcctatcaatctttacaaga

SEQ ID NO: 28019 - DNA, 522 bp, Oryza sativa
ggcggctaatatcgctggtttagcttcagaggtgaaacgtgaagcctacaatgctgatattacttattcgactaatagtgaattagggttcgattatctgcgtgataatctagcacacacaaaagaagaacgctttcaacgtgaattatattatgcattagttgatgaagtagactcaattttaattgatgaagcacggacgcctttgattatttctggtcctgcagaagatactacacaaatttatcaagcaatagataccattattccacatttaatttcgcaagataaagaagattcagatgaatataccggtgagggcgatttcactttagatcttaagaataaacaagcccatttgactgaacgtggtatggtaaaagttgaaggcattttgactgaaatggggcttatgcaaaagggtgaaacattatatcatccagcacgtattgcattattacaccacgtttatgccgcattacgaagcgcataaattatttgaggtagatgttgattatattg

SEQ ID NO: 28020 - DNA, 833 bp, Oryza sativa
tatccggactcaccttatcaacagcgcttaaatcaattaatgtttgagcgtttatatcagcaacaaaaattttcagcattattagcttatgcgaaaaccattgcaccggaaaatgctgataatcaatgtcgtgttttttctgcgcaatatcagcaatttatggcacaacaacagaataaagaagctcagcaaaacagcaaaaaaacgatttggttagccactatgatgcaggatttattggcacaatttgagaaaatgtggttaaaaacagcagaattaccacagcactggcggatattgaacaatattggcgggatcaaggtagaaaaaccgatgaaaatatcagattaaaagcggttgaattagctaagcaaaatgctaaaaaaggctttgaaattttggatcaacatcatcaaaattcggagttaagcgattggttggtagaagtcagcaaattaacggcaaatgtcaaatatttgccaacttttgttgaaatgcaactgcttaccacacccaataaagcgcttatattagctttttttccaaaatttattaaaaccctttcagaaacattagcacaacctaactttgatacttatcaagcatgggcagataaatggcagttaagcacggatgaactgcgggagtggaaaattgcgtttattagtcgtttatttgacaatcaagatccaaactttaatatttggcgggataaacaactatcagaaatacaaacagatagcttgattgaacgccggattagaatggcactctggcaacaacagccattagcacaatggttagcgctcctttcgagtaaagcgcaagaaaaa

SEQ ID NO: 28021 - DNA, 537 bp, Oryza sativa
  unsure (1)..(537): unsure at all n locations
tgagcgtttaatgcctgcatggcaaacatctatcgccgcttgtaaaaaacgcgcggcagaatggtgataatcaccttgctgaataaatttttttaaatgttgtttggcttcacgcgggtgaatatctgaaatgaccttaccctgttcgtctagtaatccttggcggtcgcaaaaggctattaatttatccannnnnnnnnnnnnnnnnnnnnnnnnnnnnnnnnnnnnaaacgccaaattaaacatttttccggttactgatggcgctattggaccaatcacgacaattgcattttgcgctaattgctgttgaatggcctcaatattaatccgtctatttttaccactcaagccataatctacgccgtcaatcacaccaagcggttgggcaagaatagcattactgctgactacattcagcaccggtgaatggggtaacttaagcgataagcgcgagaaaatatcataatgtaagcaacaaaaagcttgtttaatgatttcaagcatattgctgtctgtaacacgaatattatgatg

SEQ ID NO: 28022 - DNA, 542 bp, Oryza sativa
gcgttgcgcgccgtcgaacgcttgccagttatgtaccttatccgtctgcatgtactcaataaagcgcacaaactccgatttagttgaggagaagaagatatacggcggtcgggtgatattgactaagcgcaggaagtcgattaagtcaaaataatgcgcctgcttgtagctctcttgtttagtgcataaatagggtgggtcaagcacaaataacgtctttttggctgcgataaactgcgggagcaacgcatgaaacgactcgcttgtcacctcaatcccgtccaaatagccttccgcgcgcggatagtcgctttgacggatacaacaccaaaagtcttttttaaagagatcatcaaatgttgcaacctgctgcccggaaaacaacaaccagcttgacaagctcgctaaatctttggagccgtcaaatgcgttaattgttgcaataatcttagttttgagggctttgtctgtaatacgtttttgcgacggcacgtcacgcaacaacgcatgaatttgcccacgcaagcgggtaaagtcatcaa

SEQ ID NO: 28023 - DNA, 764 bp, Oryza sativa
ggggaagcaaaagggcttgaatttaacttaccttatcgcttgaaaaacaatcaattagactttggtttaaaacaacctattaatttaaaaattgcttatctaaatgttggcttaccgattacaaatattcgagcaaaagtctttggacattatccttatacgccacaacacccattaaaattagaacaactatcaatgaatttattagatggcgctttgcggatagaacattttgccttaccacaaactaaagtcgcttatcttcatttatcacaaattaattttgaacaaattttagctttgcttaaatatcaacaaattgagttgaaaggacgtgctaatgcaacttttcctttttggattgaaggaaaaccttgttatgtatgtaatggatcaatggcacaagcggttagttctaggctaaaaattgcccctgaattgatgcaagctatttcacagagtaatggttattctgaacgtttattagcatatttgctacacgacacacgcattactgatttaactagcaaggtaaatattaattctgaaggcgaaatggcattacaagccaagttaaatatgcaattaaatcaacaagcacagacgaaaattaactttaactaccatcatcaagaaaatgtatttaaactatggcggacactaaatgctggcacttacgttgaacaaaattttgaaaattcaatttatcaaaaactggatcgcacaaatgaataaaatactgttattaatgggtaccgagctcg

SEQ ID NO: 28024 - DNA, 617 bp, Oryza sativa
ctagcgccgtttctttagcaaaatcacgtttagaacgtaccggtttctatgaaactgttgaaatgtcaatgccgaccgttaaaaacacggatgaccaagttgatattatttataaaataaaagaacgtaatacaggatctatcaacttcggggttggctacggttcaggaagtggtcttagctataacgcgggtatcacacaagataactttttaggaatgggatcaagcttaggcttaaatggctcacgtaatactgactccactaacgtcaacttaagttatacagaaccatactttactaaagatggtgtaagcttaggcggtaatattttctatgaagattacgataactcagcacgtaaagcttctgccgcttataaacgtaaaacctatggtgctagcggtaccttaggctttcctgttgacgaaaataactcctactatctaggcttaggttatactcatgataaattaagaaatgtagagcgtgaatatacccgtgaaaaatatgtgaattcaatgaaattcccgattaatccaaaaaattcccactatgatcgtattcagtcagctgattttgatttatcatttggttggatttataccaatttaaat

SEQ ID NO: 28025 - DNA, 733 bp, Oryza sativa
agacgacaacatcggcgtatatagcccgcttgttgaagaattgggtcgctccgctggcgaaacagcctgacgaattagtatttggcgcgttaaaaggcggttttacaaccgaatgctacgacaaacaatacttttttgacaccgaccacccggtcggcgcaaaccctgacggcaccagccctacttcggtatctaacatcaccgatgacggtacaagcgtgaccgcagacggcgcatggtatttgctcgactgttcccgtgcgttaaaaccgcttatcttccaacagcgcaaacctgcaacgccggcgcaaatgaccgacgccaacgcgcagaaagtgtttgaggataacgtgtacacccgttgcaacgtgggctacggattctggcagatggcgcatgcggtgaaaggcaaactaaacgccgagaacttatggaaagccattaaagcgatgcgcgcggtgcatagtgacggcggtcataagcttggcattaagccgactcacattgtggtgccgacaagcttgcaagaagaagcggttaaattgttggagcgtgaattgcgcgtagaagacggtgcagccgtggacaacgaatttaaaaacatgaagttgacattaatcgttgccgattatctgtaaatttcaaaagtgcggtggattttaaccgcactttaaatccaatttaaagtagttttaaacggagaaaaaatgcgatgtctgacgttaaaaaatat

SEQ ID NO: 28026 - DNA, 730 bp, Oryza sativa
cctctgctattgcatcttttgaaaagatgggttcaagaaacgtacaagcgaatttatttggtgaacaaattcaattaagtttaatttttgctcattataaaaccggtgaatattataaagcactaagcctggctgaacgttttgtacgtgcttatccaaacagtaataatatggattatgtacattatttagtcgggttaagtaatgttcgcttaggagataactttattcaggatttcttccatgtaaatcgttcttcgcgcacaattgagagcattcgtaatgcttacggaaatttccaaatgattgtgagaatttatccacaaagccaatatgtaaatgatgctcaacagtggatggtttatttattgaatcgtatggcagagcatgaattatctattgtaaaattttatgataaacgtgatgcatctgttgcggtcgtaaatcgtgttgaagaaatgcttcgtttttatcctgcaagcaagtcaacctttgatgcattgccttatatgcaaaaagcatatcagagaatgggattaaaagattcagaggcaaaagtcgcagagttgattgaaatgaataaagcaaaagtattccctaaaattactaagccagaatatagtaaacaattctaagtagttttatcataatattaacttaataaggggcgttatttgagataatgcccctttccctatttgattaatcagacgaacataatgcgaatttt

SEQ ID NO: 28027 - DNA, 976 bp, Oryza sativa
  unsure (1)..(976): unsure at all n locations
caactcgactaaaatgctcttctttaccgccaatcacttcacgcaaatgccaagcaattgcttccccttctctatccaagtcggtcgcaagataaatatggtcagcttttttggctaaggatttcaattcggaaaccactttatctttatccggtagaatttgataatttgctttccaatcgtgatatggatcaatgcccatccgtttaactaatgccgctcgcgctttatccgcttttacttttgctttctgctctgctgttaaacctttagttgagattggtttgactttttccgctttttcactaccgcttttgggtnnnnnnnnnnnnnnnnnnnnnnnnnnnnnnnnnnnnnnnnnnnnnnnnnnnnnnnnnnnnnnnnnnnnnnnnnnnnnnnnnnnnnnnnnnnnnnntaatgattttcccattaatgactatccacaaataaaataatgattgaagaaatttataagataatttcttattagttgatatttaatactaattgactcaaaataccggcaacaatagcaagcatttcgctaaaatacaatatatagataaagaaaatggataaactaaatacgcactcatcgccaataatggttatgggttacaataaaatactaattatccaatgccaacattaatacttttgacatacgttgataattataatggcgttgtttttcaacgggtaaatccgttggttgtatttgcacaaaacctcgttcttgaaaccattgtattgtttgggtagttaatacaaataatttttcaatatttaatttataggcgcgtcgtttaatcgcttctagtaaaatatcgcctctcgcagaatcacgataatcaggatgtacggcaacacaagccatttctgccattttctcagcgggataatgtatcaaagctgcgcaagcaattacaataccatcacgttcaataatcgtatattggctaatttccatttctaa

SEQ ID NO: 28028 - DNA, 531 bp, Oryza sativa
taaattacgcgagcaaggcaataccattgtcgtgattgaacataatttagatgtgattaaaacggcggattggatcgttgatcttggcccggaagggggggcaggaggcgggcaaattattgcacaaggtacgcctgaagacgtggctcaacaaccaggctctcacaccgtgcgatttttaacacaaatattggcgaaaggttaaggctattagccctatcaagaatgatgaaaaacgataaaattatccatacttttagtgaacaaggtttgctaagtagcaaaattaaaggctttcgttctcgtgccgcccagcttgagatggcactagcggtgggaaaagcaatcaattttgcgacatcagtggtagtggaagcaggtacgggtacaggcaaaacgtttgcttatttagtcccggctttggtgtcgggtaaaaaaacaatcatttcgaccggttcaaaaaattaacaagatcaactgtttaaacgtgatttacccaccattcaacaggccttgaaatataaaggcagg

SEQ ID NO: 28029 - DNA, 1055 bp, Oryza sativa
ttttcgtttactgatgggtgttaaagccagtattcgtggcaatttacgtgaattactggctgatcaaaaagtcgtaaatggcttaaccaaaatagcagaaaatatagaatttctacaagaagtgattaaaaaatcacttggtcgctcagaaacgttagataaaatcttcgaaagattggcggaagtcaaagttcaattacaaaaattgagtaatactagcatagttggttattgctattggtatgaagccaacgggcgttattttggtttacatatcaccccgttaaccgtggcagataaatttggtgaacaactcaaaaagcaacaaattggttgggtttttgcttcagcaactttagaagttggtggtcagtttgatcatttttgtcaacgcttaggcattgaaaatgcagaacaaatagtattacccagtccatttgattatgctaatcaatcactgctttgcgtgccacgttatctgcctgataccaataaatctcacacgttaaccacgttaggaaatatgttaatgcccgttattgaagccaataatggccgttgctttttgttgtgcacttcttattcaatgatgcgcggtatggctgattttttacgagaacatagccagcttagcgtattgttgcaaggtgaaacaagcaaagcgcgcttattagcacaatttattaccgaaaaaaatagtgtgttagtcgcaacgcaaagtttttgggaagggattgatgttcgtggtgatgcattatctttagttattattgataaattaccatttacctcaccagatgaaccgctattaaaagcgagaatggaagattgccgtttgcaaggtggtgatccatttaatgatattcaaattcctgaagccgtgattacgctaaaacaaggtgttgggcgtttgattcgtgatgtaaccgataaaggtgtagtgattatttgtgatgctcgtttagtgatgcgtcagtatggcaagacttttttagaaagtttgccaccatcaagccgcactcgtgatcttgctaaagtgattcaatttttgaaaa

SEQ ID NO: 28030 - DNA, 985 bp, Oryza sativa
  unsure (1)..(985): unsure at all n locations
atattcaaagtactgaaacaggacgagttttaattagcgccttgccagatatagcgactcaaccagatatgactgcccaatgggaaatgcaactgaaacaaattagccaaaaacaagtctcttaccaacaatttatgcaccaattaacgactaaattacccgagctactgcatacagaccgacaaaaattgcaaaaactcaacataattacaccgcttaagctacctgctaagcgaacacatactaaagcatcaataatggctgatgaaaaataagtcaaatgtggatggtggaataaaatttacttgcaaccaaaatgcataatctatatcataccccccatcgaaaatggattttaatcttgaaatcacttactttatcgcgtacagaatagagaaatcaaatgttaaatgtactcacaattatttatcttatcgttgctataatattaatcggttttgtgcttatgcaacaaggtaaaggtgccgatacaggtgcttcatttggtgccggtgcttcaggaacggtatttggttcagcaggttcagcaaattttttatcaagaacaaccgcttttttagccactattttctttgcacttagcttattaataggcaatttaaactcacataaaacaggtaatgtaagtcagtttgaagatttaagtggtattcaacaaaaggtagaacaatctacaaaagttgaaaatcaaaataatgatattcctcaataatatctaatcaaaaaagctctnnnnnnnnnnnnnnnnnnnnnnnnnnnnnnnnnnnnnnnnnnnnnnnnnnnnnnnnnnnnnnnnnntcgctcagagcaccaaatacaaaaaacgctaatcttatggttagcgtttttttcatttttatattggtttttaaacaaatgatgatgttaattgcattattgactgtagatataaatttctttacaaaaaataaattatacttgcttacaaggaattttggttatt

SEQ ID NO: 28031 - DNA, 653 bp, Oryza sativa
acttattacttgccctgtcactttttctttcaaaagttgccaattagctggtttttgaagcgccaaatgatctttttcagtttcaacataaatcagcgctttgctcacaagccaatcatttcgctcaagtatgcaataacctcaggcactaaattattatggaatggcggatcaataaacacgagttcaaaaggttgttgcgtatttttttgtgcaaggtattgtaatgtatctgtattaatgacacttgcattagcaccggttaaatgagcaacattattacgcaacacgctcgcagcattcgcaaatttctcaagaaaaaccaccgtttttgcttgtcgagaaagcgcctcaatgcctaatgaaccactgccggataaacaatctaaacaataacatccggcaacataatgcattagccaattaaataacatctcttttacacgatcggaagtagggcgcaacccttcataattgaacacggacaacttttgttcacgccataattctgcaatgatacgaacttgaccacttttgcttattctgtctaggaagattacgagtttttttcatattatataaaggaaaaaattaccgattatttggtaaactaacttagtttagtccattttaaaaggaaaagtgagaaaaat

SEQ ID NO: 28032 - DNA, 528 bp, Oryza sativa
cgctatgttgtaaccgtgatgggcgtactattagttttagcgggcgtatttccatggttaggtgctataattgtttctattcctagcccagtattaggtggcgcgggattgatgatgtttgctatgattattgcagcaggcattcaaatgttagacaaagtggaacgttcaaaacgtaatggtttaattattgctatttctatcggctgtggtttagctgtgacgactcgaccagaattattggataaactacctaatttctttaaagaagtatttggttcaggaattaccgttggatcagtcttagcattattattaaatttaattttgccagaggataaacattaaaataattaatgtaattgggcaaagtagcttgaaattagcgaatagaagatttattttaagtagtgtgtaaacattttattatttttaaggaaacatatatgacacatcaagtaactgatgcaacatttgaacaagaagttttaaaatcggatttacctgttttattggatttttgggcac

SEQ ID NO: 28033 - DNA, 737 bp, Oryza sativa
gctgattttgctattttatagccatgcctaatgagtttttcagcgtccggcattaaagtcggtggattacactaaatataaataattcgctctggtgttaatgccattaaatgatctaaacaaaacaaggcaccttgacgagcgggatcgagtaatactttattaaaaggttgtgtagcccaatgttgatcaacaaaagattctgctaaattagtttggtaaaatgctatattgtttaacccgctagtttgctgatttattttggcttgcttgaccatttcctctacaccttctaccccaactacgaaacccgcttgttgtgcaatcggtagactgaaattgcctatgccacagaataaatcaagaatgcgatcttctgctgtaattgctagccattctaacgctttattaaccattttttgatttaacggctgattaacttgaataaaatcacgaatgcaaaaatgtaatgttagcccgttaatttggtaataaggtgcttcaccgcaaagatgttcaatgtgattctcatcacacattaaataaagcgaaagctgttctgcttttgcaaaattgagcaacatgtgctgatcttgagcatttatttttcctatatggagaaccaacatcgctcgcgtattatcagcgttaactagttcaatatggcctaatgcttttttcattttccagccagcaaataagtgttgtagtttgggcagtaatgtagaaaggggtac

SEQ ID NO: 28034 - DNA, 906 bp, Oryza sativa
agttgtttaatccaacgtaagtattgtgcggtaatatcttccgaccattcgctggttggctctaaaaccggatgtccgcgataagtcggcaagtgacgaatatcagcggcatagccattgtgctcgtgaatttgcaggcgaatttgtgcggttgccacctcatcacttaaacgagtaagttgtggcatatcggtcagcacggcggagcgtagcggataaaccacggtgctggtatcaaagcgattcagtaacgaacgttttatttcaagcttatcaggctcaatgccggtaatatccaccatttcacgtttgttcccgttcatcaaaaccgcacgcccaccgacataaaagtcaaagcccgtggtggcaagtgataacgttttatcgcctggtttagttggcttgtctaaatagacttgatgagtaaaaattggcaatgcccacacccttgcaccgtaagcgtagagcatattttctaaccgctgacattctgttccgacagtggaaactttaaattcaaaggttcgacgggggataaccgtttagcaatacgttgttccgcaccggtaatagattgatgcaccgtcgttaaaaactccagtttttcggtcacgtcttcagaccaatcggggaaaaattcccagtcggtagagcgtgaaccagtgatacgcaacgtaaccggatttttgccagcaatcgtaaaagttactgtgcaatcaatttctgccggaccattcatgctgactttaactgtccactttttaagtgctaacgcgcgtagcgtaaacggcgcttgactgctggttagcgtaatgccttcgccgtctttaatgtcaatcttagttaaattaacgctatgtcggttcgcgttccacaagtgcacatcaaacacttgctctgtcgaga

SEQ ID NO: 28035 - DNA, 993 bp, Oryza sativa
cgtccttttcccgtgattcctgacgagaagaatctaactgaatatccatatcatcaattttaacgtgaatgttatccaacgatagtttttttaattcaatctctaacggaatattcaattcagtaaatggcttactttctacttttttcgagggcggaagtttagtgctatcaattgtaacgtgagcatctttcagtgcaatattttccacacaggctctacgatagattaaacattcaaaacctatatgtaaggtcgcttgcccaacattaacatttactccctccataacaaattgagtatctgataaagttaacccttgttggatactgccttctactttgccaatagttaatggttctagccatctatctactaatcgaaaagccgtttgttgccctttagctgtaaataaaaatagtaaaagaagaagcaataaggctaataataagcaacaggtacggcgaagccatcgccatttattttttgaagtcgattttgctggcgcagaagagtcagcaaaatgctctgtctgatgtgtatttggttgtttatgcataataagattgagtaattataattctgaacctaagccaatataaaattgtacaccacgtttgttattaagtgatttaacaggtgttgcaatatcaaatttaatcgcaccaattggtgaaatccaacgcacgccaacgcaagcaccagaatgtaatgcccgatgatcaaattatctgatattaaaccggtatcataaaaaatgccagccccccattctgggtaaatcgaatattaatatcccccggtattggtcattaagtgtgaccgccttattactttcccccttttaggttctttaggtgaaatgttttaataaccaaaccttttaaggttcatatcccgccagcaaaatagggtaatgttggcgggatttaatgaaaatctttagtatgaacttgccctacctctccacccaaccataacctgtgacgatct

SEQ ID NO: 28036 - DNA, 926 bp, Oryza sativa
cttctgcttgtaatgaaaacgaaaaaagcggtatcaaaaaacataaaatttgctaaaataattggataatcgactgcttactttttaataaattctgcattttatttcacccaccccatcggattttttggattgcctttacggcgaatttcaaaataaagcgctgaccgattttgaccaccggtattgccaaccaaagcaattttttgtcctagtgcaacaacatcgcctttacgtaccattaaagactgattataaccatataacgacatatcatctttaccatgatcaatgaccacgacttgtccatacccttgtaaccaatctgctaacaccacacgccctcctgcaattgcgtgtactggcgagccttggttagcctcaatcactgtgcctcgccaagttaactctcccatttgagtggtaccaaatctattgatactttaccaacgacaggcatattaaattgtttatttggcatacctaaaccttgtaccgttttaatcaatttctcaggtattttaggttgctctactacttttgctgttgattgtttttctgtttcttgctgttgttctttttgttttcgtgcttgttgtaatttatcttctcgtttagcgtcttccatcgctttggctaactgagctcgtaacgcaatttcattatttttcaatgcatctaaacggttttgctcctgtgctaatgttttatccagcgaatgcaaggtagtttcccgttccatttgtactttttttagtgttttttcttgtgttttttgtatagttaattgcgcttgttgttctttttgttgctgttttaattcagttcgccgtgttttaagcgtttcttgtgtatgacgtaattgatgaataatatcaatccgcacttgattaagatacccataataagccatcattctctctact

SEQ ID NO: 28037 - DNA, 1904 bp, Oryza sativa
cgaatagcacgactttcgcaactatcgccacaagaacgacacgctatacgatgttgtaataaacaacattcctgcactgcgactttgtgttgccaagcaacttcactggtggcgagaaaaacgcccgcttgacaactttgcacacatttttcacaaaaggtacattcgcctttgctgaaatctacttcaggataaccacccgcacctcgtacaataatttgtgtttcacagattgttatacagttatcgcaagcggtacatttagttaaaaaattagctaaatttacccaaggcggacgcacggcattatgcccttgcaaagtcgcttgttttgtttttaaggtgcttaagaaatgcccacgtaaaaaactgcgacgtggtaaagattggtcagttaatttagccaaaacacaccttttacaaattaaactcgatatgatttattatctgatttttactggtctgccttcatcactccatttaggtatttaataaataaacggcgttattcttgataagaatcaaaaaacacgccgtttaattttatattagcaaagtaattaaaaatcattctcaatttaaacaatcgaaaataacatttcctaaccagatttaactcaataaattccatattttagaatattgctgttatatatcattttactttttcatagcatttattacatttagataatctttgctttcattattcttctcaacactttatttaacctgccatttcaagcattatggctacttacgttgtatgccaacagactcatcacatatttatcctaaaaaacagtaataaaattttatagattattaagaattacactcatcatataaagataataagattgaattaattctttattgcttatttttagtatattccattcatattttttcagcttattacaaaccttattttttctgttctatatctattcacgactcaatattcttgcaaagaatatttttataaatttagccttataaaataaaaataaaccgaaattagtatacaactatatggataacatattttattgcgggaaaatttgttttagaatcagtaaatattctctgatttctggtcgctagtatttatgaaaaacttcttcaaaaaagtccactctgagtggttgtctgaaaatattattaagacattgccgatctttatcgcgatcaatttaatctcaatcatcgtttggcgattacagatatcacaattatcaatgccgttaatcttaggcgttatagcgggggggttggttgacttagacaataatttaaccggtcgaattaaaaacttaatgttaagtttaattgcctttactatttcctcattaggtgcgcaattttgttagtatttggttggttatttttacctgcggcaatgttaagtacctttattttagtgatgatgggtgcggttggacaacgttatagcaccattgccttcggtactttacttgtagcaatttataccagtttaacgtatatgcaggagcacccttggtatagcaatattatccttattttagttggcaccttgatttatagtttagtcagctaattggtctatctatgctttccaaaccgcattgcccaagaaaatttagccaaagcctatgatgcattaagtctttatttacaagctaaatctgaattttttgatccagataatgatgatttagccgctaagcaatttgccttagccaaagccaatcagcaagttacccaagcattcgaacaaactcgtgtttcgcttttttatcagttaaaaaggaatagccgtaaaacgcgcaccaaccagttattacaggattattttattgctcaagatattttagagcgggcaagctcaagctattatcaatatcacgaactttttcaac

SEQ ID NO: 28038 - DNA, 785 bp, Oryza sativa
aaaatgctttattgccacgtttattagacactctaattggcacagcattagcttggatcggagtacatatatttacccagattggaaatatttgaatttacaccggaatttaacgcatactttacaagcaagcagtcaatatcttcgccatattatagtgcaattgcaatttggctataacgatcggttggcctatagagtagtacggcgtgatgtgcataatcatttatcagaattaagcgcggtgatcaacaatatgcacagcgagccacaaaaatatcgttccgcattacaatttgctccacaattgttaaacactacaaacacactactcagctatatttctgcgttgggtaattatcgttctgaaagcgaggaacttagccataatatacatttttcagcggttttcttctctaaaggcaaacaagtgattgatattttagatgccattattcactcagatgatcggcaagttgatcaagcacaattaacacagcgtttaaccacaattaaacacgcccttaaacagtttgaaaatgaacagcaacatagccaagacaaactggcattattactcattcagcagttattaatgattgtgcaattattacctcatttactcacgttggttaaagaagaacaactttattcacagcaactcagctaatgcacccaaataagcggtgttttttgctaaaaattggcaaaaaataaccgcttgacgctttattaaacagaaatcatcattaaaaaatacagatataattctgcatttagtacgg

SEQ ID NO: 28039 - DNA, 668 bp, Oryza sativa
gtaaagtaaaaaaaccattcaaaggcttgcaccaaggtttttaattgcaaattcgttaacgcaaataaacccaccaaaaattaaactgtccaaaaacacactaaagaaagtaattcctcttatttctttcgccattgttttattcctctttaaatagatgtcctacattcacaagttcttcgctgtctatccacgaccaaacatcaaaacaaggacaatctttgacccattcccatttatctactttgccgttaccatttgtgtcaggcgagagatcacgatgaccacagatttttgctttcgggtgttttgcctctagctcacgcaacaaacggtgtaatgcgtgccattgcttctcggtgtatgcaccgtgatttctaccactggcagtaatgccaccgacaaggcaaataccaaggctattactgttatgaccttgcacgtgagcgcctacttcgccaatcattcggcctgtttcacagtaccgtctgcatcaatcacaaagtggtaaccgaggtgggctaaatgtgggttgtattgcttaaccgctgctgcagtgcgcttaaagcctcgtttcttatgccacacattaatgcgttcggcagccgtttgggttgcatttcgtaaaagcttgccgttttggggtaccgagctcgaattggccctat

SEQ ID NO: 28040 - DNA, 885 bp, Oryza sativa
  unsure (1)..(885): unsure at all n locations
tgaaggggaattcttttttttggaaatctttattttcagattcattccagcttgaggtttttattttcttttaagggtaaccgtggagcttcttttttaatgcggctattttttttttaagtgaagttttacattagcttgttcacttttgtattttttaggctcgcttttcagtttattttttccagtcgttaaggctttgtttcttccggctagttttttatcttctcgggcatatttgttttgcccatttttgataattttgtcgaattttttgtacttcatccagtgcaaccgggtgattttgccttaaaaagtttggatcgccaaacgcaatattatcatttgcttgagctaagccaactgttgctaatgcactgcttattgttgcaattttaaacatttttttcatttatatatcctttaagttgataagttttagtatatataagcggttaattttttgtttatttagaaccataaacagaaattttaaccgcttggtaagtgaaattagaatgtgctgccaactgtaaattggaattgttctatttcatctcctgcatattttttaattggttttgcataagaaaatgataatgggccaataggtgattgccattgtaatgcaatacctgcagaggctcgcacgcgtttgtaatcaccaaagtcaggtaagattggataatctgctttactttgtttccatttagtattccacactgttgcagcgtcaacaaaagggtaccgagctcgngttcggccatatgattgtcaatcacnccccttnnggggggggnantcaggaatagcgcatattccgagtttaccgaggtagccgggagtagtgggtgtttgccccaatataccacgtacacccgttct

SEQ ID NO: 28041 - DNA, 3185 bp, Oryza sativa
  unsure (1)..(3185): unsure at all n locations
aattaatttaacaattcgatttgtggaaaaaaacgaccgctaatgcctttgttccaaccttaaatggaatagcaagcggtccgttttgcgaaaattctgatttttcgattgaataaaatagataaaataccacaaatcgcccaaaataaaattagtacgattatcgcaagaaatcgcacttaatttcaacctactaagcggttataagtttaaaattttgcattattttaaaataattcactacttgttgtaggactcgttccttccggtagagaactaggactttcttgttcttgcagaccatcaggaatttgataagctttttcgacaatatatttttttgtcggttcagtgcctttaataaagtattccattaaatcatcgcctaagaagcctgtcgtagcatcaattttagtttcaataatattcggtggtagtggcgagatgcgctcttttttatcagctagcgcaactttcatatatttaatccaagcgggcattgcggnttttgctcccgcttcacctttacctagatcacgtctattatcgtcaaatccaacataaactgtggtaacaatattagcaccaaacccagcataccaagtaactttggaattattcgttgtgccgtcttacccaccaatatcttaacgtttaaacgccttggcaatggctctacttgtaccatccaaattctgcccaggttcaccataaattgcactattaaacgcattgcgcattaagaaggcaagctctccattgataacccgcgggggcgtagcgcatacttgcatcatttttgatagactctgtcatcaaacttggcgcttgaggtttaattgtggttgcaatttcaggttcctgatcatcttcagtttgcgtattgctggctgctggattagcatttatttcatcaatttctgctcttaattgatcttcatcgtgaattttaacaccatcaaaataggttggttcttggtatgctaaatcaatgtgattacattctaaacaagccaatgcaggatttgctttaaataattcattgccttggttatctaaaatacgatcgataatgtaaggctcgattaaatagccaccattatcaaatacagcataggcacgagccatttcaagcggtgtaaaagaggctgcgcctagcgcaagtgcttctgttgccataaactgatctggattaaagccaaaacgacttaaataatctgctacataatctacacctgacatttgtaatgcccgaatagcgaccatattttttgacttacctaatgcaacacgtaaacgtaaaggtccttcgtaacgtttatccgcatttttaggttcccacggtttttgtccttgtttattaatcgtgatgggtgtatcacttaaggtcgtagaaaggcttaaacctttattcattgcagcagcgtaaataaaaggtttaatcgatgaaccaacctgtactaatgattgtgttgcacgattaaaacggctttgttcaaaactaaaaccacctacaattgcttcaattgcaccgttatcactgttaagtgaaactaatgctgaattgacttcaggaatttgccctaacaaccattccttttttttaccttggtagatccaaatttgctcacctaagtgtaagctaatttctttgccaaatattgcatttgcttttttcaattcagctttatcgccattaggtaacataatcgtgtagctatttttattgaacccgataatcgctgcaccaataaaaggttctgaatgtggcaatttgcttaaatgttcaatgattttttcatcatcccaagcattacctgtccacagtatttcagcaccacgccagccatgacgggggtcataattaattacattttcacttaatgcatcttgcgccgctttctgatcggtagaaagtaccgtggcataaactttaaagcctttattataagcaacatcttcaccatagcgtttgaccatttcctgacggatcatctcggtcacataatcagcacgaaactctagtgcagtgccatagaacgtcgcagtaactgtttcagctttagcttgttcatattgctgttgagtaattttaccgacctctaacattctacctaatacgacattccggcgtttttctgcgcgtttaacggaatagagcggattcatcgtagacggtgctttcggtaagccggcaataatcgcaatttcactgagggttaattgatctaaacttttgccaaaataagtttttgctgctgcggctacgccataggaacgatagcctaagtaaattttattgagataaagttcaaggatctcttctttgtttagcacgtgttcaatttcaagcgctaaaatagcttcttttattttacgttctaaattacgttcaggcgttaaaaagaaattacgtgctaattgttgcgtaatggtacttgcgccttgagtatcaccttggcttgaacgccatacagcacgaataatcccttttggatctacgcctttgtgttcataaaaacgtacatcttcagtggcaataatggcatcaattaacgtttgcggtatctctgctaatttaacaggaatgcggcgttgttcacccacttcaccaattaatttaccatcggcagtaaagatttgcataggttgctgtaattcaaccgtttttaatgtggatacatctggcaaactttgtttgatataaatatatgtaaatcctagcgcgactcctcctataataatgcaggaaagaattgcacttagtattatttttgcgatcttcatcgaaaaattctctttggataaatgacgaaatagaaatttatagccaagataggccaacaaaacgttaagtataagctaaaaatgatgaaaaaactgcttaaaaaacacttattttttggggagtaacagccataaatgaatatctttagcaaaatatgcaagaaagaaacaaaaaaacggcagattggtcttgccgaaaatgctgagtattattgcgttgtctaccaaaatagcgatcaaataatcgctgattggcatattaaaccttttaatgttcaagcgtggttaacgcaaacgcttccattcgatgaagtcgctacatttattcgtccgattccatttagctatatttggcgtaaatatctcttttttccacttaatctggataaaaatgtact

SEQ ID NO: 28042 - DNA, 3307 bp, Oryza sativa
ccttgatcttgggcataagcagtacgcttgcctatttatattagtatgccgcgcactaattaggatgtcgcattaaacattcattttcacccgtagggaaagatatttccttacgggaatgtcgttctctatttttgggacaaacaatatgaaagttgaattgactttagaatgttttgccggatatttaaacaatgactttactaatccgattgataaaaccttggtagatgagatcaagacgcaagcacgtcaagcatggcctaaacgtcctagtgataaagaaaccattcgtattttagtaaaaatgccggcaacttgcggacaacattttcgttatctgaaagtgcgacaaaaaaacgaaaatacgttacaaatctatcacaatgcgttattgaaataacacctttcatttattcaccccggcgggaacagttacccgtttggggactgttcccttattttttaggagaacagtcatgaaaaaatacattcaacctcaaccgaaagatttataccaacaaatcaccgaccaaatcattgatgagctaaaaactggcacaatgccttggattcgcccttgggataatagttctcctccaatggtaataccctgcaatggagaaaccggtcgtcattattcaggtattaatatattgctcttatggatgagtaccatgagacagaaatttacacagcgtaaatgggtcacctttcaaggagcccaacatttagaaagtaaagtacgagtcgaagaaaaaagcaccgtcattattttctataagcaaacacagcttgaagaaacagatgatgaagccaatgttgtttttgacgaaaatggcgaaccgaaaatgaaaacgtctatatttatccaaggccatcatgtattcaatattgaacaatgtgatggattggaaaaatgccatgaaacatttccggaacacaaacctaatcccaataaagtagctcgcccagaattagatgagctgccaattaatatgggaatgcaagtgtataatcgcctccaaagtaaagcttgctatataccggcccgggactgcattatcatgccggattttaagaaatttcattccgctgatgattattacgctacactcttacatgaatgtggtcacgcaacaggccacaaagataggctcgatcgtgatggtgttaccagatttgataaatttggttcagaacaatatgcatttgaggaactgattgctgaacttactagcgcatttacttgtgcgaatgtaggtgtagccaacaatatttctcaaaatgcggcgtatattgatcattggatacaaatgctcaagtccgataaaaaagccattttccgggcatcatcacaagcacgcgaagccacacaatatctactggatatatttcacaatgaagagcaattagtagcttaagtaatttatataagaagccaacaaatgttggctctttcatcccacaagggaataacttcccttgattggttgttgttcccttctctttcacaaaaacaaggagcaacttatgccaaattggtgtgaaaacagactaaccgtaaactgcgaaccatcacggttaaatgaaataaaatccaaacttatccgttacaacgatgaaagtaatccaatattggattttaatctattaataccgatgccggaagaactggatatcgtcagcggcggatttggggagcgcacaaaaatcatgctggaaatgccacaggatttaccgttgactgaggattttattgccagacatatcgctgcatatgacactaatgatatgtgttatctgcatctttccctattgtcccaacaagagcaatggcaagttaaagactttgtgcaatggttggacgaacaccctgataaacaggcgaaataccaatatgacttacctcttgggcgggagtatttgaacaatattgctaaatacggagcaagtgactggtatcattggtgtataaaaaattggggaaccaaatggaacgcagagatgcttgacgatagtattttagaaggtcaaaaacattcattagaatgcttctttaatactgcttggtgccctccggaggaatggtttcattcactttgtacagcctttaaagattgtgaactgaagctgtatttttatgaacccggcatgtgttttgccggcttttttgaatcacatgctgacaattatatatcttattatgtgcaaggacagaataaagtcgacgcttttgcacaagaatatatttatatataggttagcataactatttttttaaaccctcgggggtgattccccgaagggaattactctcgatattataatcaggagtaattaatgactagttacgaaaaagaatttacaacactgttcagtaaaattgcaccgcactttcgccgctcagagcttttctatgactttattactatttttggcttggagttttacttagccatttatagtaagcatgccaatgaacagctagtaaaacgttatcaaactgcggtgagtcattacactggcaaagagaagcaacaactaagccagctcttcgtcatttatattaatgcactggagcagaaaacgtatgattttctcggtaccgtatttatggcgctggacttgagtgatggttacaaagggcaatattttacaccgccacatatcgctcaggcgatggcagccatgacgttaatggactgtcacagcattattgagaaacgtggatttatgaaattacaagaaccgacctgcggttcaggtgtaatgattatcggaagctataatcatctacgacaagagcatttcaatcccaacagcaattgtgggtaagagcgcaagacttggatttcacgacagcaatgatgtgttatatacagatgactcttttacatattcccggcgaagttattattggtaatacattaaccgatgaggtgtgctatcacttgtatacgcctgcgcacatactcggtaacgggacgatgaggttgaataatatgactgaaagcgaggtagaggctcaccataatactgatacagttaataacccaccattcgagatcgactgggaaactgaagcagtgttttattaataaaatgcgcttaccttttggtaggcgcattttgtttgataatcaatttgaaacaaattgattctaaatgtatcattataaaataatcattacttaatgatatagaaggagtcagtatgtttgtaaaaaccattaatgtaagaggattagaaccacaagtgctagctaggatgcaggagcttgcacaacaaaatgaacgctcttta

SEQ ID NO: 28043 - DNA, 656 bp, Oryza sativa
tgatgccgacttgttgccataaatggatatcacgctccatacgatagccattagtggttaacgcaattttatgaatgccttctgtttgtgaaatggtttcgactatttctagaaaatctttacgtaaagtaggctccccacccgtgattcggattttttctgtaccaagattggcaaaagtgcgtgcaagccgtttaatttctactaaattaaaaaaacgttgtttatgagatggtggtctgtagccatctggcaagcaataattacaacggaaattgcatacctcggtaatagataatctcagataagtgtattgacgctggaatcgatcaacaagatcgcataaggatggatcgccaatagttttaattgggatggcttgcataggacacctttctaaatacgagaggaggtttgatttctcaaaatcctttatgatttgctcaaatttaataagacttatgaaagtaggctcggagtctaaaaataattattctaataacttaataaaataacgcaatattattttatcaaattatatatttatgtgtgatttttgttttgattgcatttttaagttaaatgattaaaataaaacatcagggtaaataattttatagttttaattaaataccaattttcattattaggtatag

SEQ ID NO: 28044 - DNA, 995 bp, Oryza sativa
taaccgttcatcaagtggtaaatgataaagtgactaattcagattggaaagaagtaagcacatccgtttcattaccaaaagcagcattaacggcggatattaagtcgcttaatgattttggtagcaatttaaatcaaacacattgtagtggttgtcacgctccaattagcgccaatcattacacagcaaatcaatggattggtgtggttaactccatgaaagatcgtacctcaatgtcagcagacgatgttcgtgcggtgaccatttatttacaacgtaatgctaaagatatggcaggcagttcacactaattcagttaacttaaacgataccgagcttgttagcctaagtctattgataaggcagcaaagcctgcaatataagcggtcgagttgatgaaatatttagctattaatcgcttattttgcacaggatagtaaagaaatgcactatcctttcatattcagaaaggtgtcaaattttcattcactttcagaggactatccagatgaaaaaaccagaaaatattaatccgagccgtcgaggttttattaaaaatacttcgtttggtcttgcagggacatctttagccggtggtagcgtaaatgcattgcttacaacagaagccgttgccgcagaaatgcaaactgtcgttactgccgcacattggggcgcattaggtgtcgtagttgaaaacggtaaagtggttaaatccggtccggcaatgccagtttctgttgaaaatgaattacaaacagttgtgccagatcaagtgcatggcgaaacacgtataaaatatccaatggtacgtaaaggctatttagctggcaataaagacacttctttacgtggtcgagatgaatgggttcgtatttcttgggataaagcctttgaattagtcagcgatgaaatgaaacgtgtgcgtgatacttatggcccaagtagtatttttggtggttcttatggttggtatagttcaggttcattgcatgcgg

SEQ ID NO: 28045 - DNA, 690 bp, Oryza sativa
caatatgatcaaatgccccttacgattggcaaagcagtcacgcaattatctaacacatggcttgagttcattggtaatactgataaaacccttggtgcttctacccttgtttcggctgcgatttctacgctggcaaataatctcgaagggttagcaggcattgccattttagtcggtacggcatataccgcccgctatctttcggcaatgtacaccagtattggggtaaaaagtaaagcggcgattgctgaaagtgcgcacatgactgcaattaacgcgagcgcaacggcttcagtgcgccaagcacaagcgacagtggttttaatgcagccagttaatggcgagacggtatcagtcgggcgtgcaacgcaagcatatggtgcgcttgctgttgccaaagcacgtgccgctgcagtcaatgttggcgcaggcttgttctctcttatcggcggttcttttgggtttgcggttacggcactcgcaggtttagccgctgcctatttttatttaaaaaagtcagaagaagaagctgaacgccaatttgcccaatctctcactacgcttgatgccaatattgagaaaactaaagccttagttgaagcacgcactcaattaggtgaaatgggtggttttagtgaccgcatggaacagttaaaagtcaatacggcgtcattagacggagcgaaacaa

SEQ ID NO: 28046 - DNA, 605 bp, Oryza sativa
  unsure (1)..(605): unsure at all n locations
cgaaccacaagctctaccacaggccaactctatgtccgtaataaccttatccatttcaattacatcttgtgcggtttcagtttttggcatacgcaccacatctacgccggctctcaccactgcatttaaatctgctataccaaattcagaatgcaacgggtttacacgcacaacacactcaatattttgataaagcggatgttgtaatgcatgcgcaactaagatccgtgctgaatctttttctttcagtgccacggcatcttctaaatcaaacataattgcatcaggtttataaataaatgtattacttatcattgcggcattagaacctggcacaaaaagcatacttcttcttaattttatcggctggctcataatattttctcccaagcaagcgcttcatctgttgcacgcaacaaagcggcttttaaacgagcacgtaatacacaatctaatgcacctttatcttctataataatttgtgctgagctgacctcaaattgtgctaatacagcagttactgaatttaaaatatnnnnnnnnnnnnnnnnnnnnnntgagctattgatttcaatatcaatcgtagttgatggtgcaatacgtat

SEQ ID NO: 28047 - DNA, 1306 bp, Oryza sativa
ataaacaacaataaaaagctcaacttgtttatctaaccgcaagtcatttttagtaagaaactcacatactgcgagcatctttttatggttatgaatactgactctttcaaattgcataaaatattaattaatgttgtaaataagaaaccttaataataattggcattctaccccaaaaaaatcaccacttctaatcataaagaggtatttttgatttttgtcaagaatttaaactattacccaaaatgctctgtgtatttgacaattctgaggggctagacaataacaggcgaataatggacaataaaccatcgctttatgatccattcttacgctattatgctatttttgactaaatttattaccgctattattttgccgccgttcaatacgctagcattactgctcctttcattacttctttataaactaaaacatttaagactgagctatttttgcactattttgaatatcacaacgctctatctgtatagtacaccttacttttcccaaaaactgattcaagcggtctcttttagtgaaaaactaacaattgaagaatatcgacaagcacaagcgattgtcgtattaggtggcggagtacgtaacagccgtgaattatttgctgactatgcaattgccgcaacaccattagagcgtatgcgatatgcagcctacttacataaacaaaccagattacccgtactggttacaggcggaagcccaacaggcaagcaacctgaagctaatattatggcacaagaatttgctaacttctttgatgtacaagtgaaatggattgaatccgcgtcaaatatcactgaagaaaatgcccatttaaccaaagctattttagataaagaaggcataactaaaattattctcgtaacaaatgagtggcatatgaagcgggctaaaatgttgtttgaacgggagggctttaatgtacttgctgcaagtacctcttcttatgaaggattaaatattattggcgtattaccgtttattccacaagctatcgcaatgcaaaacagcagtatcgcactcaaagaatggttaggttattggaaagtaaagttaattaattaatcgctattttttcatcgctaacagataatcaatgattaagccggcaatgtctagtttactggctttttctatcccatctaatcccggacaagcattcacttttagcactaataagcctttatttgagcgaattaaatcaacaccagctacatcaagccctattgtttttgccgcaagcaccgctaattgttgttcagcggtatttaattgaataacg

SEQ ID NO: 28048 - DNA, 1050 bp, Oryza sativa
gtgctctaaacgacgttgtaattctgctatttattgcatatcggcaaaggcaattgaagacaatgaagaaaagagcacggtcaagattgttttttggatacgttttttcatttatttcctctttatcaaagtatagtttttcatttgacagcatttttagtaaaagtttctatcatcactgcatacgactaatgcgcttcatcccaattagcacctacgcccacttcagcaatcagtggcaccttcatcgcaatagctttttccatttccgttttgattaagccagtgtagtactctatacattcttgtttaacttcaaatattaattcatcgtgcacttgcataatcatttttatattctggtcagcacgaatttgcttatcgatacttatcatcgcgattttaatgatatcagcggcggtgccttgcattggtgcgttgatcgctagccgttcagcagctttacggcgtatagcattatttgatttaatctccggcaaatacaatcgacggccaaacaatgtttcgacataaccttttacacttgcagattcacgaatatcgcgcataaattgctgaacatttggataacgttggaaataacgcgccatatattctttcgcttcatcgcgtgagatagctagctgatttgctagcccaaaatctgacataccataaattagtccaaaatttattgctttcgcactgcgccgctgttcactcgttacctcagctaagcttaaaccaaaaatttctgctgctgttgcttgatgaatatcttggccattagcaaaagcggtaatcattccttcatcatttgctaaatgtgccataatccgcaattcaatttgggaataatcagccgccacgattttataaccatcacgtgcgataaatgcttgacgaatacgccgtcccgcttctgtacgaatgggaatattttgtaaattaggatcacttgaagaaagtcgacctgtggtggtaactgcctgatgataagaagtgtgcactcgacatgtaggctgattaatcatcttcggtattttatca

SEQ ID NO: 28049 - DNA, 564 bp, Oryza sativa
ttttaatgattaaaccaatgctagtaccggtcgtttttcccgcaaatactcccgataaaatgtgtacttgatcggcttctcggcgagcagtggtataacgtgatgtgccgggtttacgccgatctaaatctggttgaatatccgcctcagataacgccatattgggcgggagtccgtcaattatacatcctaaagcaagtccatgtgattcgccaaaagtggtcactttaaataactgtccaatgctattgcctgccattatgcttcctatttattcattgttgcttcatcattaaattgaaatgttttactggctgcttttagctcttcttgtgtatctttatttttaataaatacgtccatttggttaaaggcaatttcaatattattttgattaaataattcataaatacgtcgatttaagaaatctagtgttggatttcgatcgcctaattgttcaacataaacccgtaattcatgatttaaggtgctttccccaaaagttaaaaaatatgcgcgtggtgtaggatcttttaacactttatcgtcttctaatgcggcttg

SEQ ID NO: 28050 - DNA, 671 bp, Oryza sativa
aataactttgccacgattattaatttcaacttcttcaaaaccagtttgaccatgcaattggtcttcataatatttctcaatacctaatttaccaatatcatgcgaaccggcgtaattgccaaatttcccctctttttcaagcctttccttatctttttcattaattttagctacataacctaaaatatgcgtcagcgtttcagcatatggataattacgtttatagtatgccagtacatttaaactcgggaaatggtattgattaaccgcaaagcgtgctatctgttcttcgcttaagttaccttttaataaaataggggaataacgtgaagtgcgttttttctctttatagaacacttctatatcttcatcggttagcccgacaacctcttttaactcaagtaaagtctgtttaagatcggtagttttctcaggaataatatacaaaccaaaataagtgatattttcagctaatactttgccattacgatcataaatcaagccacgcgtaggcggtacaggcaataatttaattcgattaccgtctgaacgtgtttgataatcttcataatgaataacctgcaagtggtaaaggttggtgattaatacaccggttaatcctaaaacaaagaaaaaagcaatcaatgctcgacgtgcaaacaaattacttt

SEQ ID NO: 28051 - DNA, 609 bp, Oryza sativa
ttagccagattttagcgcttattcaagcaataaaaccttgttcattatcaattatccatcattaaatgaataaaaataagcgttggtttgaatatcggttaagaaagaaatcgcttcttgttcagccacctcttggcggactgcatcgctattttctaattgatccataattgacccgtaaatcaagcctttttcaatttcgcgtaaggcgatcacggtaggtttatcattttcttcagggacaagcggctcacgaacgtgaagttgtaattgtcttgcacggcgtgcggctgttaaaattaggtcgaaacggttaccgattttatcggcagcttcttggacggttacacgagccattgagttactccaaagttttatgttttcatttataaaaaagatcggagattatataggtattctgtgttaatgacaattgaaaatcagcctatggtattgattagtgatccgttagcgattaagcattgcagtaatcggctttttgattcagccagcgtgcgatcaaggcttcagcaagcgctggatgttcactaataatttgtttggcagagtgttgcactaaaggaatcagtttacgatcgggtaccgagc

SEQ ID NO: 28052 - DNA, 636 bp, Oryza sativa
ccacctgaagcagctaagccccccattgaggttacaacaggtttgccggcttgttgaatagactgtaattcttgcaagattatttcagaagcaaccacgctacctcccgggctgttaactcgtaatatcacaccatcaacattattgtcttcgcgtgcttggcgtaataattcagaaatagtttcactacccgctgatctttctttgcttttgccagaaataatttcaccttctacattaatcacggcaattttgtgttctgcattgacagcaaaacgatccgttagattcaaagcataatcggcataattaatgtgttgatagatgcctttctcatttttaccgaattgttcgattaatgcttgttcaatttctgctttactgccgatatcggtcactaatttttggtttaaagcatattgagcgtcattagcgttaacggctttgtatttttcaatcaagcttttgggttcaggtaaaacttgatcgacagcaatcatacgattttcagcaatatctgtacggaattgatgccaaattgaatttaataatgtttgcgcattttggtttgcttcatcagacatatcattgcgcaagaatggttcaaccgctgatttataagtgcctactcggaaa

SEQ ID NO: 28053 - DNA, 612 bp, Oryza sativa
aatacatgaaaagcacggtataaataagaagaaccatccacgagaaccagtgggttttgtgcaatttgagccatttgaaatccttgctaatagatgccatagcatacagttaagatagaaacgggttgcgcatgcaaccctatacaaacatcattataaccaaaacaagcggtttaatcttgccttaatgtagcaaccttccacgtaaaagacagtatagacggatattattcacttttctcgctcacgactacaggctcaaattctgcccgcttcaaaaagtttttctctctaaaattaatcggaaaatggcaggcaaattcatgctgtttatatttacgtaatggtggtttttgtacacattttttctgtgcaaatgggcaacgtggtcctaaacggcaaccaatgggtatatgttgaaacattggaatactgccttttaacgtatttaagctacttttaaagactaacggctgcgaaaaatcaggaataccatttaataacactgccgtatatgcatgaaaaggctcttccataatcacctctttactacctgcttcagctgtttgtccacaataaagcacattgaaagaatccaccctttatgggtac

SEQ ID NO: 28054 - DNA, 785 bp, Oryza sativa
  unsure (1)..(785): unsure at all n locations
gatcatggaatcaagcagggtaatgtattgcgtaaatatgttccaacaaattttataaggcgaccaacaacgcgttcttgnccactttaatgtaatttggcttcataacatattctgcgcgttggcgtgtaaagcgaatgacctcaagcgtagcaggcaaagctaaaatcaaagtaggtaatgctaaatggtgtaatacactctgcatcattttcaatttatacggcgaatctgctaagaaaatatctaacagccgaaaacctgtcactaatgaaatttcatagattgggtgcaattctccaaccgcagcaatctgccaatcattactcgctgcataatataacgccataatcgctaaccaaaatacgggaatagctaaactgaacgcgctaacaatagcgagtaatttgcctacaacattataccgaaagctcgcagcaacaaatccgagcggaatcccgataatcacagatacaaataatgcggcaaagcatagggaaattgtagcaggaaatacattcaggatttgattagcaataggatcaccattactatagctaataccaaaatcaccgtgtaatagccccataacataactaaaataagcttgaataccatataaatccataaaatgatttaatggatcacgcaataaaatgttataaacaattaatgttaaaataatcaaggtaatcagcgaaagaaataaccgacgaataaaaggggtaccgagctcgaattgcgcctatttgaaatcggtnactcaagcaaatcaaatggccatg

SEQ ID NO: 28055 - DNA, 641 bp, Oryza sativa
atcgcctttagcaagagtctcagcgactttatctgctaatagaaaagcacctattggtaaaccaccggctaacccctttgctaaagtcactatatcaggttttaactcaaattgttgataagcaaacattgtgcccgtgcgacctataccggtttgcacttcatcaataattagtaaaatatcttgtacttggcataaaccttgcactgcttgtaaataggcttgatcaagtgaacaaaccccgccctctccttgcactacttctaagataattgcacaaatatcattttgtgctatccgtgttttaaatgcattaagatcgttcgcgattaagtgttcaaaacctgccgtaaatgggaaaaaatgttgatgaaataatttttgaccggttgcggctaacgttgaaatggtccgtccatggaaagaattaactaagctaataatagtagaacgtgtatcaccatatttgtcgtggctatatttacgcgcaactttaatcgcaccctcattcgcttctgcaccagaattagcaaaaaaaacccgttttagcccgcttacttgaactaaatgcttcgctagtcgggctgatggttcagtataaaataggtttgaggtatgtcataacttatgtaattgtgcaa

SEQ ID NO: 28056 - DNA, 714 bp, Oryza sativa
caattcaatttgcagcgcattaatttcgtttgcaagttgataaccgttcgaatcatctacataccaagccccctcacgcccatcttgcggttcgaaccaaccaaaagggaaaagctgaatgagcccgttcgcctcgcggttaagctgaaaactgcaagcaattggattaagtttgaatttttgtttaaacacaaaacacctcaacacaaatcattgaggttagaggatagcgaaaaggcaaatgccaaaaacgaggaggcatttccacattggcagattttttgagggatttttgtaaaatgcagttgaaagtgagaagaagaaatgaaatgcgttttaaaaccgttttaaatcattttaaaagcatttaaaaaaagactttcggtaaatcttatcataaaaaagataaaccgctcaatttgcgattttgagcggtttaagttaatttattgtaatagtcgctgccagtagtctgtgatctcttccagaatatccgatttatcttgctcggtcagggttaaaaatggacgagcctcaatcttcactttgcacccacgcccagccatccctccgaattgatgaatagccgcatattcctcatttgtccccacaaatgcggtatcattatcataggcgctggtaatgctatccattaaattttccgaatcaaccaacggcacccccttacggtgtttaatacctagccattttggg

SEQ ID NO: 28057 - DNA, 640 bp, Oryza sativa
gaattcgagctcggtacccatcttgttctttggcatcgtcaaacccttttttgataatttcacccaatatttttgcatcaccacttaatggcaataatagcgctacgttatttaatagcgtttgttgaaaattgaacactcgttgtaattctgttggcataacggctagtgcgctatgatttggatagagtcgtttccaatagttaatattttgtggcatctgagccggtgtcgaaacactttgattataaatttcaatcaatgctaaccaacccgccaattccatctcaccggcaccggcttgggcagaggataacatcccacgattagcattacgtaataatgaccaaattttgtcattattttcttggcgtaatttattatcgaccaattgagtcgcaattaatgatcgaattctgaccgcttcaatcgtatttttgctattttcagcaattttggcttgagtttgataaaaacgtaatagttgtgaatggcttaaattagcggccgaaatatgttgtaatgtgacctctgcttggtggttgttgccttttaaaagccgctaattgtgccgtgacaagttgatattcaagttgttgtaatggattttgttccattatattcaaccccgtggttaaat

SEQ ID NO: 28058 - DNA, 523 bp, Oryza sativa
aaatcatatcaataatgcgttctttttcaatacgagtaatatttgatgaatacattgtttcaggtacatcaatcggcaaacttaatccgtttaacactaattgatttgcttcgtcccaagcattatctgaaccatgaccataataaatatctgaagcattaaaatagctataactccaacgcatcatatcttggattgtttttagatcttctttcgttgatgaatcaaatatttcttccaacaattctaaattatgttcaaacatatataacctctttataagtgaaagttgtcctattctatacccatatgcctttttgtgctagaattcgagtaaataatcaggagaataaaaatgaaagtaagtgagcttattgacctagatcagcaacatatttggcacccttactcttcaatgactgatcctatccccgtttaccccgttgaatcagctaacggcgtgaaaattcgcttaaaagatggtcgtgatttaattgatggaatgtcttcatggtgggctgca

SEQ ID NO: 28059 - DNA, 586 bp, Oryza sativa
caatcaaatttctttttttaagcgcgtgtaaaagtgtcaacatgtgcatttattaaccataagaaacccatatttaaaattatctaattttcattatcgattgtccatttattctcatcaagcgtataattagcattcttttgaaaaacacatagtagaaaaatgaaaccagccatagcgactattagccgtcaggcacttcgccataatattcaattgatcaaaaaattagcgcctaagcaaaaactattggccatgattaaagcaaatgcttacgggcaaggtttattacccgctgctgcaacattagctgatttagtcgatggctttggtgttgcacgtttacacgaagcgcttgaagtgcaagaaacgggctatactggcaaaattttattagttgaaggtttttttgatcgagaagaattattaaaaacgctgtctcgtggctttgataccgttattcattgcctagaacagttagaattattagagcaagtcgcaaaagaatggcaaattgagcaacagaaaagattttggcaacgtaaaactaaaatttatttcccgatcaatatttggctaaagattg

SEQ ID NO: 28060 - DNA, 965 bp, Oryza sativa
  unsure (1)..(965): unsure at all n locations
cgtgcaaatgtggttaatggggataatggcccctgtgagattgattaggcacataaatgttgaatgaaaggggcttctgtacagtaattgacggcatcgcatttttcgcctagcagtttttcaacgatttgcaccacttgagatgatggtgggcattcgtagccgggaatcgcgtcgtgtagatggcggatttcaattaaatcgccatattgttctaacagtggttgtaggttttgattgaccattgcatagagatctgcaatcactaaattaggcagcggtcgtagatcaaattgtaattcgcaacaagcacagatgcgattaatggcatctccaccgtggatgttgccaaagttcatggttggataagggacttggaataaatcattatgatatcgatcgcgtaattgattacgcatatttattaaataacccgttgcttggtgcattaagtcaattgcattaatgcctttagcgggatcgctagaatgtccacttttgccggtaattctgaccgcttgtccaaggtgtnnnnnnnnnnnnnnnnnnnnnnnnnnnnnnnnnnnnnnnnnnnnnnnnnnnnnnnnnnnnnnaatatgtgtatgcttggcaaaagttcttgcacctaacatggttgtctcttcatcggcagtggctaaaattcgcagaggtttgtttaattttttgagatcgaggctagccaatacctctacannnnnnnnnnnnnnnnnnnnnnnnnnnnnnnnnnnnnnnnnnnnnnatttacccgctttttctgtcaaaacaaaaggatcagattgccactttccttggtcaaaagggaccgtatccgtgtgcccggctagtaataaaccgccttgcccttcaccaagtgtggcaagtaaattatatttattacggctacctgctacttcaataatatcaatattaaagccaaaatcagctaaccaactagccagcgtatc

SEQ ID NO: 28061 - DNA, 560 bp, Oryza sativa
ataaagcaccaatgtaattaaaatccccaacaatgttgctagccccacatcgcttttacgtttagcataagctgaaagtacggaagccccttcaacgccaacaaatacccaaggggtaattagcatcgtatttttgacttgggataatgtattagttgctagtttttgaccgctaaaatcagctaaaaattgtgtaggtgaaaagacccaaatagctaatgcaataaataataacagtggcaatgttttgacgatcgtagcaattaagtttacgtaacccgcttcacgaatacctcgtgcgattaaatgatgcactagccaaacaataattgacgcacctaatatgcaacaacagtattcccttgtgcaaaaataaccaactgttcgctgtcaacaaaggttcccaaaccttcaaaggcaaccactaggtaaccgacactgccgatagcggtacaaagccaatagccccaagcggataaaccaccgactaaatcgccaaagccttcacgagcataagtatatacacccccttctaattctggttttaatcgcgagagaaa

SEQ ID NO: 28062 - DNA, 620 bp, Oryza sativa
cattggctctgccgcagtttttgtaactatgctgttatttgcaataacttggttattgctaattttttaaaaagtaaaataggcaatggattacacaatccactgcctatttttttatatcatcaattaagaggttattatgaaattcaataaaacactccttaccatagcactttgtgcttctagttcaataatggcttatcagcaagataaagattattcatttactgtattgcatactaacgatattcacggccatttctggaataatgaaaaaggggaatttggccttgccgcacaaaaaacactaatcgatcagattaaaaaagaagttgaagcaaaaggtggctcgactatcattttaaacgctggtgatattaatacgggagtcccagaatcagatttacaaaatgctcgtccagattatgaaggattaaatgcgattggctatgaagcaatggtactaggcaaccacgaatttgatttccctttaccaatattaactatgcaagaaaaatgggctaaatttccgttgatttctgctatgtatttaacaaagcgacaaaaaaagaattagttgatccttatattatgttagataaacaaggcttaaaaatagc

SEQ ID NO: 28063 - DNA, 1640 bp, Oryza sativa
tcccctgcttcatttatttgataataaataaaacgatgaaaaatcaacatactaggatacttgcttaattgttgatataacttaaaatgcgctgcaatcaaaccatctttttgttcaattaactccgctaatgctatgtccacactgctattatgtttaacttgaattgatctaattagaaataattcgtaatttataaaatcatgtaatgccgcatgacacgttttaatgttatgcaacacttcactaatataatcaggatcttaactaaaatatgctcaaaatgtgttaatgcttgcgaaaattgtccttgcgccaaataataatcacccaataacatagaggctcgcgtacacaatggtgaatattctaatgctttacctaaaagcctcaaatataaatcctcatcttccgattttatagcttgtgcatactcacaataataatgcgataaaggaatacgatcagttttaggatcaatttttaaaagcttttccgcaacattaatcgctttcttccactcatttgttttctgataaagaaccattaattgtgtaagtgaatttaccgcaaattctggctcatctaacaacaaaatataatagttttctgcgcgatcataaaaacctgccgccataaaatccttggcaagttgctgtttagctaatagtttttgttcaatagaataatttagacttgaatctagcgcttgatgaatacgtaatgcgcgatcaacttcaccgcgagaacgaaaaagattacctaaagtaagttccgcttcaaattgtgattccgtggcaatctgattttcagattcctgtttttgaagcattgatagaaaaagatcaaccgctttttcttgctgattagacaaaagaaaatttaaacccgtaacataatcacgagaaaatttattattgatagattcttgctcctttttaacactaagacgtccaatataccagccataaagcgctgcaataggtaataaaaggaacaataattcgaacattagttagtcttccgcgtattcgttaattctgtaatttgttgagcttgacgctttacacgacgattcaatgcgatagtttttactttcaatttcaaataaaaaataccggtaagtaaccaacctaaaattaaaccaaaaccgaatagaatagcaacaaggctagataagcgtaattcactttgtgctacaacataattaaatgtaatcagttgatcattatttgctccaatagtaaccgcaacaataacaactgccagggtaattaaaacgcctaaaatatatttcattgtttatcctcttagtatactaatagaaaagacaaaattgcccttagaaaaccctatactaaatcaacgcgttcttttaaatccttacccgctttaaaatgtggcacatattttgcatctaacttaacacttgcccccgttttaggattgcgaccaatacgtggctgacgataatgtaaagaaaaactgccaaaacctcttatttccactctcttagcctgctccaaagtgagcataatattttccaaaatatctttaacgccgtcttcaactgccttttctggtaaactcggatttaacgctattaatttttcaataagctctgatttagtcataaaatt

SEQ ID NO: 28064 - DNA, 645 bp, Oryza sativa
  unsure (1)..(645): unsure at all n locations
tccgcttgtgaataatgtctttactgaagtcatcaattggcaacctatgctatctgaaatgcgattatttaaatcgccggcagaattagccttattccaccaagcgtgccatatttcctcattggcgcatattagagcaatgcgacaaacgcgcccgaatcgctatgaaatggaaattnnnnnnnnnnnnnnnnnnnnnnnnnnnnnnnnnnnnnnnnnnnnnnnnnnnnnnnnnnnnnnnnnnnnnnnnnnnnnnnnnnnnnnnnnnnnnnnnnntaatgaaaataatcaagtgttaaaagatggcgaactattgttgattgatgcgggagcagagtttgcttattatgctagtgatattacccgcacattcccaattaatggtaaattttcgctagcccaacgtgagatttatcagttagttttagatgcaatgaaagcagcaacgcaatatcttgtgccaaatggttcttttaaagcagctaatcaggccgctatgcaagttatgacagaaggcttagtacgcttaggcattttacaaggagatattacagaattattagcacaacaagcagtgcgccaatattatctgcatggtttagggcattggttaggactagatgtgcatgatgtaggtgactatgg

SEQ ID NO: 28065 - DNA, 798 bp, Oryza sativa
  unsure (1)..(798): unsure at all n locations
atggaatcaaaattattaacgaaagtgattgcttctgctcaagctaaagtggaagcgcataattttgaaggtcgtaaaaacttgcttcaatatgatgatgtagcaaatgaacaacgtaaagcgatttatgaacagcgtaattatttattagaaaccaatgatatttcagcaatgattgaaacgattcgtgatgatgtatttaatcatgtgattagtcgttatnnnnnnnnnnnnnnnnnnnnnnnnnnnnnnnnnnnngctggtttagaagaagtattacatcatcagtttggtatggaactgcctatccaacaatggctagaaaaagaaaaggacttacacgaagaaacgttacgtgagcgtattattaaccttgctaaacaagaataccagtcgaaagaagaaaaagtgggcgcagaagtcnnnnnnnnnnnnnnnnnnnnnnnnnnnnnnnnnnnnnnnnnnnnnnnnnnnnnnnnnnnnnnnnnnnnnnnnnnnnnnnnnnnnnnnnnnnnnnnnnnnnnnnnnnnnnnnnnnnnnnnnnnnnnnnnnnnnnnnnnnaaagaatcttttgaaatgttcactaatatgcttgaactgctaaaatcaaatgtgattagtattttaagccgtattcaagtccgtagccagcaagaaattgaagaagctcagcgtcaacagcatgaacaagctgaagcagaatcagccaactatcaagcgaccacagaagaagcattagcaaaagaaaagcgtgatgcattaccagcagagctgactaatttacagattgggcgaaat

SEQ ID NO: 28066 - DNA, 516 bp, Oryza sativa
acccgcttgcattacagtgtcataacgcgttttccacgccgatttaatcgcttcaatctcagcttccgttggattgtctaatttggcgagttccgctttccagttgccccccaacacaatatccgtaccacgtcccgccatattcgtggcgatagtgactgccgatggagcaccgcttcagcaacaatttcagcttcttgagcgtggaattttgcattgagtacgttatgtttaatgcctgcttttgttagtgcattggataagagttctgacttttctacggatgctgttccaactaacaccggctgttggcgagacatacattcctcaatacctttgattattgccgcaaatttttcttgttcgcttttaaacattaaatctgtacgatcatcgcgaataaccggtttattggttggaataacaacggtatctaatccataaatttgttggaattcaaaagcttctgtatctgctgtgccagtcataccggctagcttttcatataaacggaaa

SEQ ID NO: 28067 - DNA, 559 bp, Oryza sativa
ccgtaaatatggtgatatagtcaaccaccgtttaatcaaacaagtattactaaatcagccaattaagcacatagagagtacaattttagcccgcttacaagaagcacgccgccaaaatcgtttagtcgaacgcgatatcgcagattggttatatgcacgctatttgctcccaatcgcaacacaaggggtagaatttgactgcgaaattaccgatatttcacgtggtggtattcgtgctaaagtactagaaaatggcgcacaaattttcattccttgttcaacattacacgaaaataaagatgaaattgattttatccctgaagaaattgcactttacactaaaggggaaaaaatttatcaaatagggcaagctacccgtgtaaaactaaccgatgtgcggttagaaacacgttcggtgttaggtaatattattaaatagcaaatcactcaattctccacctatttatcaaaaattaaccgcttattttaggagtaacaatggcgacttatattatgggtgacttgcatggttgttttactgagtttcagcaactgcttg

SEQ ID NO: 28068 - DNA, 729 bp, Oryza sativa
ctatcaattgccgactgaattgagcattccaaccacatctagcccgttaaaaaatttagtggtagatattgattataatgaagtgttgatcgtagtaaaaactagcccgggtgctgcgcaactaatggcgaggttattagattcgatgggcaagagtgaaggaattctaagcaccattgccggcgatgatgcaatttttatcacgccaacacactccacgccgatggaaacattaatcaaaaatatcactacccttttcgagtcttcattttaatgaatattgtactcaccggtggcacaggcttcataggaaaagcattaacaaaagcacttctccaaacgaggcatcaattgacaattctcactcaccaaacgcaattaacctcaaattcaccaacagagactttttgtcaaaaaatgacagattggcatcacttaaatcacgttgatgccgtcattaatctaacaagtgaacctaattttgataagggttggacgaacaaacaaaaacaacaattattaaccaggcgcgtcgatttgactcatcaaatagttatttgatcaatgcggaggaaaatccaccgcatacttttatttcaggatcagcctgtggctattacggcaatttagcgaattccaaccatttctatgatgaatcaacccctgcaggcacgcactttagtgcaaagatttgtcttgaatgggaaaaagctgcattaaatgcgcaaa

SEQ ID NO: 28069 - DNA, 1069 bp, Oryza sativa
ttcaacgcattggttctggttaagccaatcacagcagtggcaattattgatcggattcgctgggttacttgttatgctttatggcattttttacgctaaatcaaaatggttttggtggcaaagtgcggggttaatcttagtgagtgtattgtttcatttattcatttttagtagtaaaaaaattgaatggattactttcgatgttgggcaaggcctatcacaagcttttgtttattaacaaaatggacagaacaaggctattttttatgataccggggtaagctggggcgcaagtggtaattcaatggcaagtcttgagatcttgccttatttaaggcgacataatattgaggtagaagcaatttttttaagccacgatgatcgagatcatgcgggcggaatttctgatttgctagcagtgtatccaaatgtgcgcttgatttcaagcagtgctatgccttatgcaaataaaatgccagaagcttgtattgtgggaaagcagtggcaatttaatcaattgatttttcgaacaatttatccgcctaaattgacaccaagatctaaaaatgctgattcttgcattataattgtggaaatagaccgctttcgtatattgttgacaggcgatgcaactgcccaacaagaaagcatcatagccccatcattaccacggattgattttttacaagtgccacatcatggtagtaagacgagtagtagccaagcactattggctaaaattaaaccgtatttggcaattgcttcggtggggcgttggaatccttggcgaatgcctcatcctagagttgtagaacgttttgaacaatacaacattcctttagtcactaccgcaacagatggcatgataaaggttatttttgagcataatacctgggaggtaatcactaacagaaataagttttctgcgtggtatcgacagttatatgcaacatcggctaaacagtaaggatcaggcgtaattaatatttattacgccctatcattttgttggaggcaattacggcaaatcatttaatgcattaggatttttattgataagcattgcgtc

SEQ ID NO: 28070 - DNA, 572 bp, Oryza sativa
ttgtattaataaaaatagtggagtacacgatattatacaagcaaatggtaaggtttgtattaatgtgttaaaccatcagcaagaagaaatggcaaaacattttgccagtatgttgccgagtactatggaagagcgtttcagttgggatatttgggatgaaggaattgatggtttacccattttacgcgatgcgatttctgctctgcaaggtgatattattgatactcattctgttggcacgcatactatttttatggtgcaactgaagcatattgaggttaagccaagtaatagtttggtttattttggtcgtcaatttaaagtgattacgatctaatcgcacttgtcatttatagttttttaatgggaatgtagccttgcttttaaacaaggctacatttttattaggcaattcctttatggcgtaataaagcatctaaacgtggtttacggccacggaaacgttcaaataaaaccataggttcttcagagcctccgcgggttagaatatgatctaagtaagcttgacctgtttggcggttaaaaataccctcttcttcaaattttgcaaa

SEQ ID NO: 28071 - DNA, 1546 bp, Oryza sativa
tcatcgccagagattaattacgaccccgtagcgattgctatggggttttttgttgtttaggcgaataaaaaagaacaaagaataaataacaaacaataaacaacagatagcaagtaccaaacaacaaataaggtaattgggtactagatagctaaaaaagtcgcgggatagacataattctagttgtttttataggcgtgcaaaatgtaaatccattttagcgtacttatctttttttcttctcaaattgcctatttctcgctatgctgatatgattttagtattaattggtctatacggtttaagaattctttgcaattactattacctattcatcaaatcgatgatgaaacgcttgatagtttttattctgaaaatagcttgctgctattagattcattacgtcaaaatttcattgatgtgcaacaaccctttttttatatttggggcgctaaaagttgtgggaaaagccatcttttgaaagcggtaagtaatcaatatcttttaagtcaaaaaccggctagctatattcctttaactaaatcacattatttttcacctttggtattagataatattgagcaaatggatgttatttgtttagatgattcacaagcaatagcaaataatgaggaatgggaattagctatttttgctttgttcaataaaattcgtgagcaacacagtttatttaatcaagggcataaggcattattattgatcagtgcgaattgttcgcctcatcagttaaagattagatcacctgatttgaaatctcgcttaacttggggggaggtctatcagttatatgatttaacagatgatcagaagattgttattttgcaacgtaaggctaatcagaaaggtatagagttatctgaagaagtggctatttttttgttaaaacgcttggatcgtgatttgcctgtgttattagcggaactgaataaattagatcgtgcatccttacaagcaaaaagaaagttaacgatgccgtttgtaaaagaaattattggcttgtagcgatttgattcctatcaatatttactataaaaaaggtaaatttgcccgcttgttacctctaaagaagtagttgttttactatttgaaaatcaaggcttatggtaaactttgtcaatcagtttttatatattaatcgttatgcatttaaatcaacttgttatttctcatcttgcctgtgagcgaggtgaaaaccgtttatttgaaggttgccatttttctgtctctagtggggagtgggttcaaattgaggggcataatggtattggtaaaacgagtttattacgtattttagctggattggcgttgccggtagccggtgaggtgctttggaataatttatcaattcataagcaacgtgatgaatattatgctgaactcttttatttagggcattatgcggggataaaaccggaattatctgcttgggaaaacttgcgtttttaccagaaaatgcaaggtctgtcgttagatgatgaagcattatggtttgctttagataaggtttctttagttgaaagggctg

SEQ ID NO: 28072 - DNA, 752 bp, Oryza sativa
ctagcaatcaccgactagcataaaatagtacaaacaaataatgttagcttaccaataacgtaagcgaggtgattaagcatagaagtgcaaaggagtgacaatgaatcctaccaaatttgtattagcgaccagtaataaaggcaaagtaaaagaaatggcggatgtattgtccgctttcggatttgaagtaattgcacaaagtgaatttggcttagtttcaccgccagaaacaggcttaacttttgttgaaaatgccttattaaaagcacgttatgcctcaaaaatgaccggtttacccgccattgcagatgattctggattggcagttgatgcattagcaggggctccaggcctttattcagcacgttatgccggaattgaggacgatgatacagccaatcgacggaagttattagctgaaatgcaaaacgtaccagatggacaacgtgcggcaaaatttgtcagttgtattgttatgctcaagcatgaacggatccaacgcctaagattgcatttggcgaatgttttggtgaaattctacgtgaagaacgtggccaaaatggttttggctatgacgcattattcttttatccagctaaacagtgcacctttgcggaattagattcaacggagaaaaaacaaatttcacatcgtgcattagctttagtcgctttgcaaaagcaactttaaacggtattaacgctaaaagtaaatagcatgcaaaaatttaggaaggacaaatgattattacg

SEQ ID NO: 28073 - DNA, 852 bp, Oryza sativa
taaggatcataaaaattacgaaaaaacgtataacgagtcatttcatcatcataacggatattgttataaccaataatgcaagtattaggttgactaaattcgtgatgaatacgttgagcaaattctggttctgacaagcctttttcattacagagttgtggtgcaatgcctgttaccatcaccgcttcagctgaaggcaaataatcattagtttgtttacaataaaacattaccggttcaccaataatattaaattctctatccgtacgaatacccgcaaattgcgcaggtcgatcagttgctggatttatgccgaaactttcataatcataaaagaaaaaagtaaaatcgttgttcatcgccttactcaaataacaaatcaaatgattaatattataacatagacaagcaggcaaatttgcaggaaatttatgcttaatggatcaagctaatgtaattgccgtctgctaatagcgctgatagataaataaattgcataaaaaaaacccgacacaaaaaattctgtatcgggcgaggtcttacctaaggaaatgaaaaaaactgcttgagttccgtcaagttagcattaagtatgactgacgtgatctgataaagttcagttaatttgcaaaaaaagcggtatttttttatgatttttattttcatttgcataagctgtacaaaaacaatgcaaacaaggttacgccgattaaatttcaatctcacacaaattctgatgaaaatgccaaaaagtccaaaaaaaatggacaatttcctttatttcctaacatattcttgtaaaatatcgaatattattttaaacataaaactcacaataacgtttgaggtatt

SEQ ID NO: 28074 - DNA, 630 bp, Oryza sativa
aatgcaagccgtaaatatcgcaatgttttagcattaatttttacgttaggatattcagtgagataataaaacagatctagaatagtactaggctgttgtgtaaaacaacgacgattttggcagttgagttgatggccttgtagataaaaataattatcaagcgcttgttttcagctaaatgatgcggattacgatccgataattgaaaattatctagtaataattggcttaattgagaaatcgattgtgtcgcttgaaaataatgacgcatcattgtttcaaccggctgattaccttctccttgataacctaattgtttgcttaaacagagctggcgatcaaaatataagcggttgtcataacgtttaagctgtaagtgtaaggcaaaacgcattttaaacagtaccgcttgtgccgcgcttaattcgcggtattcttcagcaaataaaatccctttattgagtagcgtatccagtgaaaaggtgccaaattgtcgcattgagatccaataaattaaatgtagatcacgtaaaccaccggggctatgttttatatccggttctaaattatagccagtattatgatagcggctataacgttcagcacgctcttccatttttgctttaaaaa

SEQ ID NO: 28075 - DNA, 680 bp, Oryza sativa
aaatattgctcagctaaactagccacaccgacatcgcgttttggtgcagtttgatagacttccataaacaataatccagtgtaagctaataatccccacaaactaatcaacaaaaacaaggtcgcgccaaagcccattcctgctgaagttaatggcattgcaagcattcccgcaccaatcgttgtgccggcaatcattaatgcactgcctaatattttatttttcatattatcctatttttactccactttattataaagcactttattctagcaaactaaaattaaaaagcggttagattctgcaaaatttttgcatatgctaaccgcttaaattgatttatatcatctaaacgcaattaaaaccacctaatatataaagaaaaagccgagataactctcggctattatcatgcgctttcagttaagcatctacccgattatccgcaacatctgcatctgtattcggcttagcctcttcaatcgtattgctcgctgatgtagcatctgaagaatcattcgaagaatttttttctttatcatcattccacccttccggttcgccaacaggacgacgatgcattaaatcatcaatttgttttcgatctaatgtttcatatttcaatagtgcatctttcattgcatgcaaaatatcaatgttttcttctagagtctgcttag

SEQ ID NO: 28076 - DNA, 511 bp, Oryza sativa
tctcagcagcacagcgacgcggttttgtcgatcaacaaacctccacagactctacgaataatttagcggatatgtttatattggccggtttaggtgattttagtcgagccgttttaactgccgatcgattactcacattttaattatgaaaaaatataaattagccattctttttactcaatcccccttcgcttcttcagcaagtagagaaggattagacgccttgctcgcactaagtgcattttgtaatgaagacgaaattgctatctgttttataaatgatggcgtatttaatttagtcgctcaccaacagccagaactactactacaaaaagaccacatatctaccttcaaattaattgaattatatgatttaaatgaatgctttatttgccagcagtcaatagacattcgaggactacagcaaacagaatggatcttaaaaaaattacaattttgttcaagctcaacaatctatcatcatcttcaccaagctgagaaaggattaact

SEQ ID NO: 28077 - DNA, 523 bp, Oryza sativa
aataactttaccaaagatcaacagaatatgatgttgttgaaatcagatagcgaattttcccgctttatgaaagcaccaacaaaataaatttatcataagcccgattgagatcgggttttttcatctgtattttggtttatggctgtgtaacctatctttagagatcagctataatcagttcaaaattcaatgtaaattataattaagaaagaggcaattcctatgggtaaaagtgttgctattctcggtgctcaatggggcgatgaagggaagggtaaaattgtagatttattaactgaccgagtgaaatatgtggttcgttatcaaggtgggcataatgctggccatacattaattattaatggagagaaaacggttctacgtttaatccctagtggtattttacgtgaaaatgttacgtgtttaattggtaacggagttgtactttcccctgaagcattgatgaaagaaatgggtgagttggaagcatgtggtattaatgttcgtgagcggttaaaaattt

SEQ ID NO: 28078 - DNA, 839 bp, Oryza sativa
acatcattttagatatcggtagcccagaagaaatggacgaaaaacctttagttttagcacaggctcaagtgattgaattgcctttctataagttatccacgcaatttgcgcatttagatcaaagcaaaaattaccttttatattgtgagcggggcgtaatgagtaaattacaagcactttatttaaaagaaaagggctatcagaatgtgaaggtgtttaacttaccaaaatagcgagttaataagcgcttaaatttgtgaaaaaaagcgtgaaattgatcgctttcactgaataagaaagggattatgcataaaaaactttatcttgcttcaaatagtccacgtcgttgggcattattacaaaatctaggtttagctttattaccacttgcaagtgaaatagatgaaactgcacatgcaaatgaaatggctcaagattattgttcacgtattgctagggaaaagaatcaagcggctcaagcagttagaattcgccagaatcttgctgaatatccgattctaactgccgatatcatggtttcgattgacggagagattttaggcaagccaagtcatcagcagcaagcagttgagatgctcaaaaaattatctggccgaactcatcaagtctatacggcagtctgtgtaagtgctaatcaacaactatttgagtgtattcatagcagtgaagtcacctttaaaagattatctgaggctgaaatttatgcttatattgcaactggcgagcctatggataaagcgggcgcttatggtattcaagcactaggtggtatatttattcagcatttagcaggcagttttaccggtgtaatgggctta

SEQ ID NO: 28079 - DNA, 863 bp, Oryza sativa
tagtgcagtatcaaccaaaactgattttttgattgccggtgaaaaagcgggcactaagttgactaaagcagaacaacttggcattcgtatcttagacgaacacgcatttgcagatttaattaagcaacttgaatacgagtagataaaaacgcatagaatacaagcggttgatttcgctaacatctgcctaaaagaggaacacatatggctattttagtaacaggcggggcaggctatattggcacccataccgtagtagaattattaaatgcaaataaggagattgttatattagataatctgtctaattccaatcaaattgccgttgaacgcatacacaccatcactggcaaacacgccaaatttaacttaggcaatatcttcgatcgagttatttaacgcaagatttttgccgaaaatcaaattaatgcggtcattcattttgcgggttcgaaagccgttggcgaaagcgtgtttgagccattacgctattaccaaaataatgtaaccggttcgattgttttacttgaagaaatgttaactgcgggtattaataccattgtatttagttcttctgcaaccgtttatggcgatccaaaaacaatccctattgtcgaatcttgccccgtggggcaaaccactaatccttacggcacatcaaaatatatggtggaacgtattttagaagataccgtaaacgcaaatccacaattcagtgcggttgtgttacgctattttaacccgataggcgcacatccaagcggtttgattggtgaagatccaaatggcattccaaacaatttattgccttatattagtcaagttgccattggcaaactaccgcaattatccatatttggcaa

SEQ ID NO: 28080 - DNA, 762 bp, Oryza sativa
  unsure (1)..(762): unsure at all n locations
caggcatatgatgcatcgcacggtcganngagcttgtcccggatacctgcgtggaaactatggcattactagcataattttatctaactttgttttttttaattgactaatactaacacgtaacctgattgtgaaacactcccaaggtgatatatgcaattaatgattaaaaatggcacacttggtcaacaaagacaacttgcgtctccgcattttaatgcgcgtccgcaaatagatgatatttcattactcgttattcattatattagtttaccgcctgatcaatttggtcagccttttattgatcaattttttcaaggtaagttagattcatcgcttcacccttcttttgcacaaattaaagatttacgcgtatcggcacattgtttaatcaatcgtaaaggtgaaattacccaatatgtgaattttaacgatgtcccttggcatgcgggcgtttctagtttcgaggggcgcgaaaaatgtaatgattattcaatcggtattgagttagaaggtaataataatcacgcttttactgaagcacaataccaatcttttgcacaattaactcaagccattatagcttgatacccttaaataacgatcgatcggattgttgggcatagtcacattgcttcccggtgaaaaattgatcctggccatattttaaattggggtattccaatcgttactcaccacttaccatataaaaaaagctgggttctccctaaccaagattgatggataaattttaggcattgg

SEQ ID NO: 28081 - DNA, 659 bp, Oryza sativa
ttatttactttatttgtattgccggttatttacaccttcttaggtgaaaatcataaaccgctacaagagtttgaagaaaataagcattatccagtgattgctgagactgagcattcataacaaaaacataaaagcctcgcatcggcgaggcttttgttttcattattttgacgatgtcagataaccatttttctattacaatacaatccttatcttaaggttatatattattaaggaatgaaaatgaccccatttagcgtagtgattttaaccgccggtaaaggcacacgaatgtactcagatttacctaaagtactgcatcctattgcaggtaaatcaatggtcaaacacgtgattgataccgtcaaacaaatggacgccaaacaaattcatttagtgtatgggcacggcggttacttattaaaaacacatttaaaaacagagccactcaattgggttttacaggcaaagcaattaggtaccggttacgccaagcaacaaaggggtactttttttgcagattaataaaaaattttaattgtaaaaggcgaaacgccatttaatacaagcacaacctttaacccgctttatcgcagcaaacccggcaaatggcattgcattattaccagtagaattagcagatccgactggttatggca

SEQ ID NO: 28082 - DNA, 672 bp, Oryza sativa
atcccccatcattcgataaacattttgtccgtgattggctcgcaaatagtggttggaataaacaggcaccattctcctaaaattcctattgatgtaattcagaaagcggtggctaataatcaaaaagcgttggatctattgactaagtaatcaaatatgatcttataatgaataagcggatattaatttctattaatatccgccttattattgatgggacgttatgagtaatatttaccgtttattattcagcattattcagcgctactggcagattgtataaaacgttctattttagcgccaatgcgacgtacctttttttccatatgttaatatcggcgatctatatggtagatccgatccaccatggtttcactttatgcaatacagccggctaatactaaactgattgatgcacgtaagtcagttgccattacttcagccggctttaattgctcaacgccctgacaaatggcagtgttgccctctatttccgcttttgctcccatacgattcaattctggaatgtgcataaaacggttttcaaaaatggtttcagtgattcggcttgtgccttctgctaccgcattcaacaaagtaaattgtgcttgcatatcagtaggaaaaccggggtgtggcatagtgcggatattgaccgctttaggtcgttga

SEQ ID NO: 28083 - DNA, 790 bp, Oryza sativa
  unsure (1)..(790): unsure at all n locations
cgatggccatttgagtgcagtagcctctcgtcgaanncgagctcggtacccttgttgatgaaatgttagccgtcacagatttagtgatcttagatctcaaacaactcaatgatgaaattcatcaagacttaatcggtgtttcaaacaaacgaacgcttgatttcgcccgctatttacataaaatccataaacaaacatggattcgttatgtggtcgtaccaggttatactgacgacgactctgcccataagctcggacaatttattcagaatatggataacattgaaaaagttgaattattgccttatcaccgcttaggcgcacataaatggaaaacgttaggctataaatacgaattagaagacgtattacccccctctaaagaagatttagaacgtttgaaagcaattattgaaagttacggacatactgtcaaatactaacctagcggtctatttagcccaaaagattgccaaatagacccgcttattntactcaacaacttgatatttttcacaagactccccaaatataacgatactttttaacaaaaaggaattaaatacataatgtcaaacccacttttaccatacacaggtttaccttgcttctcaaaaattaaagctgaacatattccaccttgccgtgaaaccggtatccaacaatgtcgtgacgtgatcgaaacagtcgctcaaattcgacaacccacttgggaaaaatttatataccacaagcagaaagtcgcggataattttcacgggttgggcaccggtgggcactaaaatgcgtg

SEQ ID NO: 28084 - DNA, 799 bp, Oryza sativa
  unsure (1)..(799): unsure at all n locations
gatggcatttgatgacttcacttcgggcgaacncgagctcggtacccgttttagaagatattgttaaaaaaattccagcaccagaaggcgatccagaagcacctttactttctttgtttattgattcttggtttgataattatttaagtgttgtctctttagtccgcgttaaaaatggatcaattaaaaaaggcgacaaaatcaaagtaatgactactggccaatcgtataatgttgaccgtttaggtattttcacaccaaaacaagtagatacgacagaatttaaaacaggtgaagtgggttgggttgtttgtgcaattaaagatattttaagtgcaccggtaggccatactttaacacatcaacaccattctgctacagaagttttacccgtatttaagaaagttgtaccccaagtttatgcaggttattccggatcgtttacatgatattgaacttttctggattgcttagggcaaattagccctaatgacgcttttttattttatgcaccaagaaatttcaccccgttaggcttttggtttccgtggggattcttacgtttattacatatggagatcatttcaagaacggttagaacgtgaatattgatctgatttaaattacccctggcccctacacgtaggtattgaggtattaccaacacaattggcgaaccgattaacgtattatggcccggcaaaattaaccgcccattatgtcattttgatgaaatttcgcgaacccaattgctgaatgttatattcttgctcccacaaggattattatggtattatat

SEQ ID NO: 28085 - DNA, 610 bp, Oryza sativa
tataggccgaattcgagctcggtaccctatttgagcctgaaattccacaaaatagtgggaatattattcgattatgtgcaaattgttgttttcgattgcatatgattgaaccctttggttttacttgggatgataaaaaattaaaacgttctggtttggattatcatgaatttgtcgatattcaaaaatatactcattttgatgattttcttgctcgtgcaaagcctaaacgtttatttgcattaacgactaaaggtgaagcaaatcatagccaagtacaatacgaacaaggcaattttttgatgtttggaccagaaaggcgtggaattccaaccgctattttagagactttgccaatgtcacaaaaaatgcgagtacctatgtgtaaagatagtcgaagtatgaacttatcaaataccgtggcagtagtcgtgtatgaagcttggcgacaatttggttatcaaggtgctgtagcaagacaagccatttaaataaataagcggtctttttgtgattatttttgcaaaaaagaccgcttctgaaaacaaataaaaatcctaacgattaattatttgaaatatttataaaattacagttttgctgaaagcat

SEQ ID NO: 28086 - DNA, 532 bp, Oryza sativa
  unsure (1)..(532): unsure at all n locations
gcgaatnctagctcggtacccttcacttaaacaaatatcttctcgccataatatttgtttaaaaataatagtcgctttttttaactcagtaacaattgtttcaacattaagcaaatcatctaagcgtgcagccattttataatcaatatataaattctttactacaaatgcgtgtgaatctgctaataatcgctgctgcgaaaaacctactttacgcaaaaattccgtacgtgctcgctcaaaaaagcagagatagttagcatgataaacaacgccgcccgcatctgtatcttcataataaactctaattgggaaattcatctttatacctagccactaaattacttataacgatttaaaattaagcaaaataaagcactattgtagaaagagaaaaattgttgtgcaatagcaaaataaaaaatattttctataaaaaaatgggaactttttcgaattattttaataatattagaaatattaatgtactaataacaattaaatatacccataattggtaaaaaaagtaatt

SEQ ID NO: 28087 - DNA, 1129 bp, Oryza sativa
accatcgctggaatacctaacgccacaaccatacggacgccccaatctaatgtttgcttaaatgctattgcacgttgttcttcatttaatgcttttttcttcgtaatacgtgaaagattaggcaatacgaccgtcgaaatggcaatcccaaataatcctaatggaaattcaattagacgatcagagtaataaagccaagtaattgatccggtcactaagaaactggcgatcacttggtttaatagtaagttaatctgagtgacggatacaccaaacaatgcgggaatcatcaaacggcgtacttttgtcacaccttcatctttccaagcccacttgggtttaaccaataacctttcttttatcataaacggaatttgaaataaaaattgcaataaaccgcctagaaaaattccccaagctaatgcaatatctggctgttcaaaataatctgcgccaaataatgccatgctgatcatagccacattgagtaatactggtgaaaatgccattacaccaaacttccctattgtatttaacacggctcctgaaagggcaatgaaagtgataaaccacaaataaggaaaagtaatcttaagtagcaatgacgcttgcgtaaatttttgtgcatctgggccatcattaaaccaatcaataaaccaaccggtcccaaataacgcagcaattattggtgaaatcaacatggcaactaaagtaaccaccgttactaaaagccctaaggttcttgaaactttcgcaataaattctcgagtcttatctaaatcattatcagcattatattctgctaacactggcacaaatgcttttgaaaaagcgccttcagcaaataatcgccgcaggaaattaggaatccgattagcaaatagaaaaacatcagacattgcccccgcacttaataagcttgcaataacaacatcacgtactaaccctaatatacgtgagataagcgtcatagtactgacaattatgctggattttaaaagtttcttactcataatttatgactaacagaaaaatagaggcaaagtgtaacaaatatttgcctgtaacagggaagaagttatagcgcgatttataattaatataataatcaataaccgcgatcatctag

SEQ ID NO: 28088 - DNA, 554 bp, Oryza sativa
gaattctagctcggtacccactttaactgattatttttgattgtatagatcgcactgttgttttacggacaccatttcttttgctttggattgacaaactcagtgcctttatccttaaatttaaccccttctaacgtcagtaaataacgtttagtcgctagccctcctccaaagccggtcaaactattatttttacccaatacacgatgacaaggcaccaaaattgagatcggattacgtcccacggcaccgccaaccgcccgcattgcttttggttttcccaaacgtactgcaattttaccatagcttgttgtttttccatatggaatatggcgtaatgcttgccaaacggcctgttgaaaagccgtgccttgcggtgctaagaaatcaagttgcgaaaaagagaccgcttcaccggcaaaatagcggtctaaaagatcacatgttttactgaaaacgggatacataggatcattactactgataggttgccattctactgtttggcgagtgaattgctcttgttcaaattcaacaaccattaaaccttgttg

SEQ ID NO: 28089 - DNA, 1028 bp, Oryza sativa
  unsure (1)..(1028): unsure at all n locations
cgagttctgattcagtatcaagtgcagatgttgcttcatctaacactagaaccggtgcattacgtaataatgcacgagcaatggctaaacgttgacgctgaccaccggataaacttgcgccattttcaccaattacagtatctaaaccctgttctaatttttcgataaactccattgcgtgagccgcttgtgctgctgcaataatttgcgctcggctatatttatcttttgctgcataagcaatattatttgcaatggtatcattaaataagtgaacttgttgtgaaacaacagaacattgctcacgcaagttttctaaggtatattcttcaatattaacaccgtcaagnnnnnnnnnnnnnnnnnnnnnnnnnnnnnnnnnnnnnnnnnnnnnnnnnnnnnnnnnnnnnnnnnnnnnnnnnnnnnnnnnnnnnnnnnnnnnnnnnnnntgtggaatagtaaatgaaacttggttcaatgcctgctcttctttaccttcataactaaaaataacattatcaaatgtaatacaaccttgtgctcgttcaacctgcttagtgccattattcttttcggtttttaaatctaaaaactcaaataatgtttgacatgctgccatgccacgttgaaattgagagttgacactggttaacgattttaaaggacgtaacatagccatcattgatgaaaagacaaccgtaaaagagccggcagttaaattttcactcataacctcagggaaagtagcaacataaagcactgctgatagcgctaaagaagcaattaattgcactaaaccatcagatataccatcggcagagactatcttcatgcctttccgacgcatatcattactgactcgatcaaaacgtgctttttcaactttttgcccaccaaatgaaagaacaactttatgcccttttaacatttgctccgttgtgactgtcaattctcccatagaattttgaatattacggctcaaaatacgaaaacgctttgaaacaatactaattaaaaatgcgataatg

SEQ ID NO: 28090 - DNA, 787 bp, Oryza sativa
  unsure (1)..(787): unsure at all n locations
catggcattgagtgacttgcgattcactatgggcgaattcgagctcggtaccccaacgggcagagcatacagtgcttttcctagcgcattaatgccattgattaaccaacatggatttgagctttttgtgactattaatgggcaatataatttctatcaaactcagctaatcagtcagtatggattaagccaacaacaaattgaacgctgtatccattttttaaaacaacttaatattgcttatggtttcgttaccaccgatcaaatcgctgtatcagaaaataacctaatggtgcatgaggcactctcgcccatcaaagccgattatattgttgatgctgaacattaccgacaacataacgtcatgcaactattagcattttatccacaagaacgtgatcacgaaatctttaatacaggaatctttcaacaggatttaaaagtgcctcgttggcatcaaaatgcggtcgatattctctgtaaacaacattcaaaagcccaagggattaaagatgtgattaaacattttaatctcaacctagccaatacattagcctttggtgatggttttaatgatttagaaatgttagaaacggtcggggtaggcgttgcgatgggtaatgcagaagaaagctgtaaacaattagccgatttttgaacccaaccaatcaacgaagatggtatcttatatgcattagaacatctaaacaatatntaaataacccactcgtaaacaaagggttcttacgaagatgcattcatcagccttatttatcaagcggtcgat

SEQ ID NO: 28091 - DNA, 831 bp, Oryza sativa
ccattgttctttaaggaaaatacccaaatgttatttggtgatgctaaagaacgggtagatgatattttacgagcattaaattagcattattagtgagtcaagcggtctgattattgaaatatgatgtaaataaagtagataattagatcgcttatgaatgaaaaaagccttaatttaaggctttttatgttgattaacggaaagatttatttatcttcattgatacgacttgaaatcgcactttgttgatttttatattttgcatcttcacgggcgttataaggcttagccgctgctccactcaatacttcaaagcttaatgcaccaatcgccatattaagacgcaaggctaatggtagtttaccagcattaaagaattctaatacaattttgccgtgccaaccttggatcaatgcgatgagcggtaacatgtaccattaatcctaagcgagccaatgaagaacgttcatctagccaaccaacaatattatccggtaatttcactgactctagggtagtggccaaggctaattcgcctggatgaaggaaaaaagcttcaccttctgctaaaataatttcatcactcatgattttttcaagttgtgcgctgacttgttcaccaggcccacttaaatcaatataaggtgtggcgtgctcacgaaaaacacggaatgaatttcctagtcgcacatcaacggtcgcaccagaaattttatcattagttgggcgagggctaatgttaatgagatcttgatctaaataatgctcaatatcggtatcacatagacgcataacctatcctatttttttgataataattgtttgatttgg

SEQ ID NO: 28092 - DNA, 834 bp, Oryza sativa
gaatctcaaagtccataatttcagcatcagaaatcccgataatatgtttggcaagtgcgcgtaatgaattaccgtgggccgttactaaaacgcgtttgccagataataatgccggggcaatttgatcttcccaaaatggcagaacacgttctaaagtgacttttaaattctcgccatttggcacaacttctttgggtaggtgcgcataacggcgatcattatgggctgaatttggatctgatggtgctaatagtggtggtagggtatcataagaacggcgccaaatatgtacttgttcatcgccatatttttctgccgtggcttttttatctaagccttgtaattcaccataatgacgctcatttaaacgccaatgtttcacctgtggaatccataattgattagattcttctaatacaatattacacgttttgattgcacgagtcagtacggaagtgaatgcgatatcaaattcatatcccgcagctaagagtttttggcctgcggcttttgcttcttcaacgcctcgttcggttagattcacatcgcgccaaccagtaaataagtttttcgcattccattcactaaatccgtgacgaataaatactaattccataaacactcctttgtgttaatattgatttgaaaatggtacatttataacaaaaatcaatatactttgaaacagttatattatttctttttataaaagcaacagaaaagctgattttcctcaaagatttaattaaaatagtaagtttaataatagtttatggatgattggtgtaggtgatattcttgtgaaagtgtttttttctttttcttcaattgtgg

SEQ ID NO: 28093 - DNA, 1809 bp, Oryza sativa
ggtaataatcactaacgtattcattaataaattatgttgctgtaacgcgtaccaaatttgattaaattgtgcatcaacatgttcaagtggtgctagactattgtgagtccttggcatagcgagatccaagtaactgaaaaaaggtttagctaaacgttgattgagccaagcagtccatttttcaatcgcttgtgcattgccttttattttaggtaatgaaaaacccgcaaaaatactttgttggtaaataggtgcggcgaaactattatgagaaaataaaccaaattgataatttgcttgtttaaatgcggttaataatggtgaagtttgcttattagcgagcattgagtctaaatattgaccgcttaagctataaaatattcccaataagttagccgcgttagaatcgccactgccataatgattcataaagcggtatgttttttcacttatttgtgttaaatgaggcattttttccgccacaatcatttcatttgctaagccagacatatttactattaaaacattagtatatggtttgcggttaaaagttaaatgttgttttggataattgaggtagaaactatcaagccggccattttctgcaatgtttaactgtaatttcgtacgattgatcaccccgtgtttaaacaaggaaattccgagcggtcattgggtgtgataatggatagttggctttttgtgatgtaattgggcgatataagcgcatatctgcccaagcataaattaaatgtgttgcagtaaagcaagctacaaagaatagcgcgacaaatttaccccatttttgccggctaaaactacgtaatttctgccaacaccaacgagagtaaagcatttgtgctagcaagataatcggcataggcacaaataataattgccattgatgagagagctcactattatcatctggagtaactaataaatcccaaactaatggtgataaatgcaaataaaactgtttaaatacttcagtatcaaccaataaaacagtttgcccaatcgtggcgataataacggataaaccacgaaaggtgcgttcatttttaatgataaaagaaagtggaaataaaagaagtaggtaagcagcaaaaacaataaagctaaaatgcccaaataaactagtaaagaaatacagtttaccggacagtgtatttggccaatcagcgttaaacgcgtaacgagttgagatacataatgctaatactacattaaaaagtgtaaaccaatgtccccaggtgatgcgttgggatatttcttccttatattggcgagaataagtcggtagcaattgacgcaagggctaaacattattagcgcgcttttaaagaatttttaagtgcagtggaaaacgtatcagctaataccatacgttgagtttctgtttgaatattctctaataaaatattgctaactagattgcctaatgccatgattgaaagatcaacgggcgccttatgtttttcaagtattgtaattaaatcgtaagaaagttgttcgaattgcttactttgatattttgatcgtgtcgccataataacgatcagagttatgttaaaaacatgtattatatagtagcatacaacatgtcaataacagagtgataagagagtgataagtcctagtatttttaaatttttgtaaaagccataccagttgaataagttagtgctacaatactcaattaatttttatagatgaattaatcgattttattcttaataaagcattttgaaatcataaaataaaaaaaagaatagatggtaaaaaatagccgggcaatggactaaa

SEQ ID NO: 28094 - DNA, 809 bp, Oryza sativa
  unsure (1)..(809): unsure at all n locations
caacacgtgaataaaacagaatccgccgtgcgaattactcatatgccatcaagtattgcggggcaatgccaaaatgggcgttctcaacatcaaaataaagatcaatgtctgatacagctgagagctaaattataccaaatggaaatgatgaaaaataacgctgaaaaacaagcaatggaagaaaataaatctgatattggttggggtagccaaattcgatcatatgtattagatgactctcgtattaaagatttacgtaccggtgttgaaaaccgtaatacacaagccgtactagatggtgatttagataggtttattgaagccagtctaaaagctggtttataaaacaagcggtaacttttacagttcatttttacacaaaaataaaaatagcccattaatttgggctatttttgtttctgttatgtacgctcaatcacttaaactttttttctcaatactaactgacttaatactactagtgacaatgagaaaataatcataatcgtcgctaaagcattcacctctggcgttacgcctgttttaactaatgagaaaattttcagtggtaatacttcatagcttgggctagtcacaaaagatgaaacaacaacatcatctaatgaaatggtaaagcttaataaccaacccgaaataattgaaggcaacgccaacggtaaaactattttgcgtaaagtcgtcacctcactagcgcccaaatctttggcagcttctaacattttaccatcaaaatcactcanccgtgatgaaatagtaataaaaacatatggcaaacagaacgtaatatg

SEQ ID NO: 28095 - DNA, 766 bp, Oryza sativa
acatcattacgacaaataacattccgccaacaaattgcttaccacggaatttataacgatataaagcaattgaagtcaatgaacctaaaatcgtagacaatgtagccgcaaaaaaagcaattgtaatcgaatttgtagtggcattaatcaacgtatcgttagcaaataaacgttcataccaattccaactaaagcctttccattttagaccgtaacgatcagcattaaatgaattaatcactaaaatgatgataggtatatacaagtaaacaaagactaaacaaacaaaaaggtttctaaatatctttttcattattcaagctccacctttttatttaaaaatttgttagcacgataatatacatacaacatcaatgccatgagcaaggttaatgcaatactgactgccgatcctaatggtaactggttagtattcaagaatagactcttgataatattaccaattaatggcgttttaccaccgcctaatagatctgcaacatagaacattcccatcgcaggcaataatactaataagcaaccggccacaatacccggcatcgttaatggaatagtgatacgaataaagcgttgcaatgcatttgcacctaaatcttttgccgcttctaataaacgattatcaattttctcaattgaagaatacagcggtaaaatcataaagggcaatagaatataaaccaaaccaataataatggccaattctgaattgagtaaccgtaaaggttgatcaatcaaacctactgcg

SEQ ID NO: 28096 - DNA, 785 bp, Oryza sativa
tgtgggcatttgagtgacatatctgatcactataggcgaattcgagctcggtacccttttggatttaccattaacttgctgaccttacttggactaattttagcgattggattgttagtagatgatgcgattgtagtattagaaaatgttgaacggcatatcaaacaaaacggagaaacaccattcagagcagccattattggtacgcgcgaaattgcaacaccagttattgcaatgaccatcaccttgatggcagtttattcgcctatggcgttaatgagcggtattaccggatctttatttaaagaattttccttaacacttgctggagcggtgtttatttcaggcgtagctgccctaacactttctcctatgatgacaagtaaaattctcaaacaatcagaaaaaccaagctggttagaacaacgtatagaaaaaaccttacataaagtaacggatatctataccaaaatattattggttgttatggcaagccggtatgccatattagtgtttgctggattaaattttgcatctttgccgatgttatttaattcactttctagtgaagtaccccctggcgagacccggggattggatgggaatgggaaagtggcctgcccacgttatatggactattttgcagacgtgatgtttcctgttgttaaccaaattatcaactgccagaagtaatgccacacacattatgcccgggttttccttttattattggtcaattatgtaacggcgcttaaagattgaagtgacctccttgtcacaaaaag

SEQ ID NO: 28097 - DNA, 767 bp, Oryza sativa
atggcctttgttgagtgagcacccatgcaaataggccgaattcgagctcggtacccgggcttgaattatcgcatttaatgcaagcattagatcaattttcaacacgtaagattgtttatgccgatctctattttcaattgagtgtggacgaaagttggtcattagaagattcaattattaaagagggtggcttttatatcgatcgtggttttggtgtccgtgcggtttcaggcgagaaaacgggttttgcttatgccgatcaaattagttttaatcaattattacagtgtgcgcaggcagcacgttcaattgataatacgcatagccacttagccatacagtcgtttaaacaaacggttgctcctcagcgttatgctgcgatcaatccgttggatagtattagtcgtgagcagaaagttgaattattacatttagtcgatcgtaccgcacgagctgaagatagccgagtgatgcaagtgaatgcgggtatttcggcggtttatgaagaaatattgggggctgctactgatggaacctttacccgcagattttcgaccgcttgtgccgttggcggtttccgattagtagaagaagatggcaaacctgagcgtggttaaccggtgccggcgggtcgtatggcttaccgtgtttttgagcctcaatactaatggcaaatggagggctttcccggccgaatttttactaagaagcggttctcaggctttttaattaggggattactgttcggcgggccaaggcaattggtt

SEQ ID NO: 28098 - DNA, 707 bp, Oryza sativa
  unsure (1)..(707): unsure at all n locations
cccagtacttttgggggcgggttgttgaaaaaagggctcatctaataacattgctaatagtgtggtatttactttaccggttgatgcccattccccattgtggtcgtaatgtttgctgattgggcattaatacggaaatattaacaatgccacctatgtttaacaccacggttaaacggcggcgatcggcaaaaatgcctnnnnnnnnnnnnnnnnnnnnnnnnnnnnnnnnnnnnnnnnnnnnnnnnnnnnnnnnnnnnnnnnnnnnnnnnnnnnnnnngcctgttttggcggcaagtaaatgcatatcaccgagttgtagcgtaaaaggaaatgcgccacttggctaatgccaaacggtttgtccgtgacaaccaatggcttgaatatcatgagcatgcagttgattttgtcttagaaaatcatgtacacaatcggcataaagttgcccaagctggtgatctatctctcctaaattttgcaaactggtttcacctgttttcagtaattgtgtgagcaatgttcgcaagttttcgggcattggtgtaaagctagaagcggtcagttttggtggattttgtgcaaaatccattaaggcgagatcaacaccgtctaggctagtgccggacataatgccaaggtataggttattttgcataaggcttcattgattggaaaatttgttgaattatatcgaatattgtgct

SEQ ID NO: 28099 - DNA, 627 bp, Oryza sativa
  unsure (1)..(627): unsure at all n locations
attttagtggcaaaattttgggtaagcggtcgtttttattactttttagcaaaaagccctcaagcttatttgctgagggcttttttatggcgagattaaagtgccatattggcgcttaataagccaaggttattaaataatcatatttaataaactcggtagcatattggcgattagcaaaccaaagcagatcctaaataccatacttaataaaccaggtagcatanagctatggttgaaaatatatttgccaattttagtggtgccggtagtatcaaagtcaattgaggcaatgattgggccatagttaggaatgaagaagtaaccatttacggcaacaaagaccccaatcagaacgggtacaggaataccgatagcaattgccaatggaaaagtgtagcaacggttgccccttggctgtttactaagatagataaaataaagagcgcaaaagcaaatgcccaaggcgcagtttcaacgaggcctgataccatacttttcacttcagttatatggctttgcattaatgtatcccctaaccaggcaataccaaaaatggcgataactgcacgcatacctgcatggaatacagaacctttggtaatttcgttaccatttggtttacag

SEQ ID NO: 28100 - DNA, 741 bp, Oryza sativa
ggcctattcgagctcggtaccctgttgtgcatggttatggtttagccgcgtcacaactacaacgattgcgcgatcaccatattccattaacagtagctgtcgataaagtcgcggcaagcggtggttatatgatggcatgtgttgcaaataaaattgtcgccgcgccttttgctattctaggttctgttggtgtagttgctcaagtgcccaatatccatcgcttcctcaaaaaacacgagattgatgtagatgtgatgaccgcaggcgaatataaacggacagtaaccttagccggtgaaaatactgaaaaaggtaaacaaaaattccaacaagagttagaagaaacacatcaattatttaaacaatttgtggcaaataaccgtcctcagcttgaaattgaaaaagtagccacaggcgaacattggtttggccaacaagcattaacgttaaatctgatcgatgaaattgcaaccagtgatgatttaatattaaatgccgtcaaagacaaagaagtcattaaactagcctttaaacaaaaaaaaaagttagcacaacgtttaggctcacaaatggaacaatcactcgaaaacctcattgctaagctattacataaaaaccgatcaaatatgctttaatatgcaaaaaacagaagcggtaattacaccgcctttttagggttaataccacccgtattttgcgcctatgttaccccaaatcaacttaattagctggctcttcttt

SEQ ID NO: 28101 - DNA, 1058 bp, Oryza sativa
caccttaaacggttttatgcacattccgttgaaataaaaattaaagcagataatacgcctgtaacggaagcggatctttttctcagtcaatttattatccagcaacttcaacaattaacgcccacgattcctgtgttatcggaagaaaattgtgccattccattaacagaacgggcaaattggcaagaatattggattattgacccacttgatggtacccaacaatttatcaatcgaaccgatcaattttccattgcgattagcttagtacaacacaatcagcctgtaatcggcattatttatgcgcccatattagccaaaacttattttgcaatgcgaacaagcggtgcttttttgcaagaaaatggcataattcgcccgcttactcctcacaaaattatggccaataatgagcgcttacgcatcgcaatgggagcaaccaataggacgacagtagcccaatgcctacaacaacctctacaagcagatatctttcaatatggctcgagtagcttaaaagccggtttagtcgcagaaggcaaagccgactgttacattagattaggcgatactggcgaatgggatactgccgccgctgaagtgctattaaatgaaatcggtggcaagatttttgatcttaattttcaaccgcttagctataatcagcgacaacattttattaacccgcattttgtaatggtggcagacaaacaggctgactggcaaaaaatctttcaattcaatgagtgacatctacatgcaaccgctattaaaatgttgcatattaggtaaaattttcattccaatcgagaatcaaaatgaatatagaaaatagttgtatcgtaatttttggtgcatcaggggacttaacattccgtaaacttatcccagcactatataatctttttaaagtaggtcggttaggcgaacatttttctgttttaggtgtttcacgatcagacctaactcacgattcttttagacaaaaaatgcgtgaagcattaatcaaatatgagcaagcaagcgggcagtttttagatgatttttgcaatcacttg

SEQ ID NO: 28102 - DNA, 654 bp, Oryza sativa
tactcgggtaactgaaatcgtaatccacttcaaaacgactccacatccagtctttagccaaaatgcgcctgaaaataaattaattatccgggtacaacctgatgaaggtatttctatgcggtttggtttgaaaaaacccggtgctggttttgaggcgaaagaagtctctatggattttcgctattctgatttaagctctgcttcaagtttattaaccgcttatgaacggttactattagatgcattaaaaggagatgcgaccctatttgcccgaaccgatgccgtacatgcctgttggcatttcgtacagccgattctagactataaggcagaacgtggccgagtgtatgaatatgaagcaagcagttgggggcctaaagaagctgataaactgattgcacgcaatggcaaagtatggcgtaaaccgtctggaatgatgaagaaaaaaatatagtcaacataagaaaatagctgcaataatcactattttctgtctaattaaggaatattatgcattaccttattttcccaacggcacaatgtgccgttgaaaaaatagcgcaagagtttattttatatagtcaattaaatcgccctgtacatatttcattatcgggcggtagcacaaaaaaattactcttcaaaaccttggct

SEQ ID NO: 28103 - DNA, 871 bp, Oryza sativa
atttaagttccgttaaatttttaggattctcaatttgcactagcgcaacatccgataacgcatctgaaccgattaatttcgctttaaactctcgcccatcttctaatttaatggtgatcttttctgcatctttaataacgtgattattagtaatcacatagcctttttcagcattaataattgcgcctgatccttgacctcggaaattacgtggcacattacgttgttcaccaaaaccaaagccaaagcgttcagcaaaacgctcaccaaaaatatctgggccaaagaaaaattgaagttcttccggaagttcacgtttatattgtgcattttcaactttagttgtaccttcaatagcaatactgactactgccgggcgaacccttttaatcatagatgctaaacttggtaatgcttgaccgcctaatattgttggtaataccgcttggctcatagcaggtactgaaagtacacttaaacctaagactaatgaagataaaattgattttttcatgactttattcattcgtatcatccttgtatatgctctaatttataaaataagtgtcaaattaactgtgttatttacgacagtgtaattaaacaacggttcactaaaaacaaaataactgttgataaaataaacgaactatagcgttctgtcttttacaggtaagcggtgaatttttcaccataatttaaaaatcctttgactttaataacgacttgatagagtattgtcaactatattttatactctaacgaagaaaattccaatgcgtgataagagagacttggttgaaataaaaaaccttacctttaaacgtggcaagcgggtaatttatgaaaaccttaatttgcgtgtgcaaaa

SEQ ID NO: 28104 - DNA, 2235 bp, Oryza sativa
  unsure (1)..(2235): unsure at all n locations
actaatgaaagcaacagaacagctatcaagcctagaaatgatggcggtggatccattaagacgagtcatagcgcctcgcttttgggcaggggttatttcaatgccaattttagcagtcatttttaccgctattggtatttggggcggttcattagttggtgtggactggaaaggcgttgatagcggcagtttttggtcagtcatgcaacattctgtaaatggacaagacttgatcaatggttttattaaaagcatcatttttgctattgctgttgtttggatcgcattatttaatggctatgattcaactgctacctcagaaggtattagccaagccactacacgtacggtggtacatgcatcattaatcgtgttaggcttagattttattttaactgccatgatgtttggcggttaactcaagaaaggaaataaaaaatgcgtcaatcaatcaagtatgaattttgggtcggtttatttggtcttatttggcttagcttccttagtgtttttaggcttacgtgttgctaatgtacaaggctttaccactgaaaaaacatatacgctatatgcaacttttaataacattggcggactaaagaaccattcaccgattaaagttggtggagttgtaattggtcgagtttcaaacatcgatttagatcctcaaacctatactcctagagtcactttagcaataaaccaaacttttaataaaattcctgatacgagttcgctttcaattaaaacttcaggcttattaggtgagcaatatattgtattaaatgttggctttatgctagaaggcgaaacggaatatatgatagaaggaaatagctttgccgataccaattcagcgattgtcttagaagatttaattgggcaattcttatatggcgataaaaaatcagcaaccactgaataataagaagtagagtaaattaaaacacgacactatttaaacacaacgagatattcgttgatgattaaaagtgacagattcattttatcatttggagatttacatgttaaaacagcttaaaaaagttattattaccacggcgattgcattagctacactatgctcaacacaagcatttgctgaaactaacccatatctattaatgcaaaaaactgcggataaattattcactaatattaaaaacaatcaaactaaaatcaaagcgaatcctgaatatttacgtgatatcgtacgtgaagacttaatgtcatacgtacacatcagatatgctggccaattagtgttaggtaaatcactttcttctgtatcagagccacaacgcgaaaagttttttaatgcttttggtaaatttatcgaacaagcgtatgcgcaaatcttaacacagtatgaagatcaacaaatacaaattgaaaatgaaaaaccacttggcgataaatctattgtcagtatccgcgtaaatgttttatcttctggtagcacgccacccattaaattagattttaaannnnnnnnnnnnnnnnnnnnnnnnnnnnnnnnnnnnnnnnnnnnnnnnnnnnnnnnnnnnnnnnnnnnnnnnnnnnnnnnnnnnnnnnnnagtaatatcttacgccaacaaggtattgatgcattaactaatcaagtagaaaaagcggctaaacaacctatcactttaaataaataatttatttatgatgccagaaaaaacattacaattcggtattcaagagcaaaatggaagcctttttgtaacattattaggtgaattaactcgagacacgttgctaccattatggaagcaacgtgcttcttttttatctaacccacataatgaaacaatttattgggatttaaaccatctgctacgaatcgattccgctggttttgcattactcatagaattgctaaaccactaccaaaaacaaagcacaaattatttaatcaatgtaccagatgttatcttaacattggcaggtttatttggcttacaagattggttagactcatttttaacaaaaagtaaaacagactaaggattaaaatggaacctacacaattagcagaaattttacgtaatgccctaccaaatgcggttgaaattcacgcacaaggtgaaaactcacattatggcgttattgttgtaagtgatgaacttgctcaattatcaaaagtaaaacagcaaccagcggtttatgctccactgagcgaatattttgctacaaatgcagtccacgcattaacgatcaaagtcttct

SEQ ID NO: 28105 - DNA, 1102 bp, Oryza sativa
taagcgggcaaatggatggcgttgatagtagtgtgttaatgatgaatggtattcagtatcttgcttggtcagcagttgagatgtggctgaaaattgaatacctttaattgcttgaatatctgttatttgtgctgagatggtgccaactattttggggttatgtacataatttgtgaatggcgtgtgtttttactggtcagtaaaatcaaacgcgccatgttgtgatcaaatgcataaaaacaactggctgtccagaaatcatcaatagtgtatgctgcaaaattgacgacgtggttatcttgaataaaacgactgatgaatgatggtattttttgcatatttgtgtagcgttatttctctccccaaccaggcattgcgatatcaatattaaatacatctaatgcgcgacttacgctatcagtcacaatatcatcaatggatgtggggttttctcaattacatcaataggagttttaaaatgaaagtgcctgtttattccaaccactatttgcgagccaatcacggacaaattgtttatcgaatgatggtggatttatcccttcttgataagtttcgaccgaccaaaaacggcttgaatctggcgttagcacttcatccatcaacgttaatacaccattctcatctaatccaaattcaaatttagtatcacaaataataattccttttgttaaggcatatttcacgttcacactcttcgtatgaaatattcacatcgtgatcacccacttcagctttactagacggcgtaaaaataggttgtggtaatttactcgcctcaactaacccggcaggtaatgctaaaccacaaatactaccggtttgttgataatcttttaagcctgaaccggtcaaataaccccgcacaatggattcaattttcacaggtgttaaacgtttacaaaccactgcgcgatgttgaatagcctcagcttcttctttagctaacacatcgaaaacagaatcacccgtaaaatgatttggcataatatgctcaagttttttaaaccaaaaattggagatttgcgtcaagatttcacctttagcaggaattggatccgctaaaataacatcaaaggctgac

SEQ ID NO: 28106 - DNA, 752 bp, Oryza sativa
caacaggtcgtgtaaccactgttgaagctaaagtgttattttttgtactgttaatcattgcttttttattggatttatcactcaatcaatacgcatttttgctttcatttgttgccgtggcattagcggttatttatccgtttatgaaacgttttacgcacttgcctcaagtcgtacttggtatggcttttggctggacgattcctatggcatatggtgcagtgattgaagatttgccgttaacatgttggttattatttttagctaatattttatggacagttgcttacgatacgcagtatgcaatggttgatcgtgatgatgatttacgtattggagttaaatcaaccgctattttattcgcacaatacaacaataaaattattgcgctattacaatttttgtcactcattttatttattctgtttgggtggttaagtgaatatcacattggttattttattgtattagccttaacttcaaccttatttatttatcaatgttggttaacaaaacaacgggttagagagcaatgttttaaagcattcttaaataataattactttggtttcggcattttcatcgcgattctagtgggcatttatggtttttaagttgttatagatgaatactataaattgatcattaaacggttaatcaattaaaagcaattgtggcaatagcctcaatgtaacggctttatttgtaaaggaagcgctaagcggtagaatttttgcgaataaaagcatttt

SEQ ID NO: 28107 - DNA, 561 bp, Oryza sativa
atgtttatggtgcagatcatattaaaggcgctaagttttttcttgaaagacaccgattttttgtggtggaagatggaatgatgaattattccaaaaatatgtatgcgttctcactctttagaacaagaaatcccggtattttgccgggtggttttcatccaaacctaaagactatttttttgaccaaagataattcgatcccagatcaaattgctcataaaagagaaatcattaatatcaaaacattatggcaagctaagaccgctaccgaaaagactaaaatactttctttttttgaaatagatatgcaagaaatatccgtgattaaaaacagaagttttgttctctatacgcaaccactttcggaagataaacttctgacagaagcagaaaagattgatatatatcatactattttaactaaatataaccattcacaaacggtgattaaaccgcatccaagagataaaacagattataaacaactgtttcctgatgcttatgtgatgaagggcacttacccttcagaattattaactctattaggtgtcaattttaata

SEQ ID NO: 28108 - DNA, 629 bp, Oryza sativa
tttagcgattttatgtgtattgatcagcgcattggctaagttaccattgccacaatcaattgcagtaacgggctcgatcgaccaatttggtaatgtattaagtgttggtggagttaatcaaaaaattgagggcttttttaatctttgtaaagcgcgtcagttaacaggtaaacaaggcgttattattcctgccacttgcctttctcatttaagtttaacctcagacgtgatcaatgcaattaaagcaaaacaattccatatttggagcgtcaaaaatatctttgaggccgtatggattttattagaacatcatttttatgatgaagaccaaacaacagcaaacgataaaccaactattttcaatttgattcatcaacaacttgaacaagaacaagaaaattctgctagcgggtcattttttgcaaaaatttaccaattatttaccaaaaactgatcggatttgctcagctaacagttgttagctgatttaaaaggctgtactatttcaaatatcatcagcctagattctacgggctttttcgtaatatttaaaggattaaaaacatgaacaattgtacacctaatatcaagtcaagttatggttatgaagatttattagcttcaggacg

SEQ ID NO: 28109 - DNA, 567 bp, Oryza sativa
gagctcggtacccaatgcttttagttggctactttatttacggaaaagtggttgaacggatctttacgatcaatccccaaaaaatgacccctgctcatgcaatgagtgatggtgttgattatatgccaatgtcaaaaaccaaaatttggctgattcaattattaaatatcgcaggcaccggtcctattttcggaccaatcttaggtgcattatatggtcctgttgcaatgctttggattgttctaggttgtatcttcgcaggtgcagtacatgattatttctctggtatgttaagcgtccgtaacggcggtgcaacaatgcctgtattagccggcaaatacttaggccgtcctgtcaaagtcttcatcaatataatggcattacttttattattactcgttggtgttgtattcgttgctagccctgcgcaattaatggccactattacaatggatgtattaggtggtactagtggtgcattacagttaaatgatgctgaaacagttcaccaatcattacaaacaacaagtttaacggtttggggaatggataaagcgaccattattt

SEQ ID NO: 28110 - DNA, 559 bp, Oryza sativa
tttaggcttacatccactctatattgcacaacatcaatacaccgatttagatttactcgcgaaccactaagcaaagcaagacagacaatgctccgcgattgcagaaattggacttgataaaggcatagcaacaattgcgaccaccgcaatgtggtataaacaatgtgaattcttagaagcacagcttgcgctcgccaaacaagcaaacttagcggtaagtttacattcacgtaacacgcatgatcagctcgctgttttactcaaaaaaaatccattaactaaaacaggggtcattcatgcttttagcggtagctatcaacaagctaaacgctttattgaattaggctataaaataggggtcggtggcattatcacttatacgcgcgccaacaaaactcgcaacacgatcagtaaattaccattagacagtttagtcttagaaacagattcaccggatatgcccgtttttggctaccaagggcaagctaaccaacctgaacgaatcaaactgatttttgaggctctttgtcaaaaacgttaagaatccgctgaacaaatt

SEQ ID NO: 28111 - DNA, 707 bp, Oryza sativa
aataaatggtttataatataaacgcacgccccaagagttatcttccaatttttcacctaacgccgcatataaatctcgactaaagccccaatcaatcgcagcttcagtcattcccattttactgacattatagaaacgtttttccgcattcaaagttgcttcaaatttaccattatgatggacttcaatttcagcagtaccgccttgatagttagcaccgtcagtaatttttatccctttaaaggtaaaatcataatctttaatttgaacagtatcgccaaccttcatccgtacatttttttcaatactgaaattttgactaaacgtaatgccaaagactaacattgccacacctaaatgcgccaaaaccattccccaatgcgaacgagaaagcttaaatataccaacaagaaagctgtgtcgatgtgtagcacgttgatacaactcatacaggctcaacaacacgataataaccgccatcatgacaccaaggatcaaggtatcgttattcgatctataaaccaataaggcagtcaaacaccaagaatcaacatcagtacaaatgaaataatcaccggtagcctaatagctgaaacctgatctctacgccatttgactaaaggcccaatacctaaaaaaaatgcaaatggcaccattaaaatcaaaaacatctgatcaaaaaaacggcgcaccaattgaaatcgtgc

SEQ ID NO: 28112 - DNA, 852 bp, Oryza sativa
agcatatttgtagatcaagcggtcgatttaagcaattttttgcaaattcgaccgctttttattatgcgtttaaaaattatttttaagttatgcttgttttggttagaatggcaaatacgttacggaatagatgataagaggcgtacagatgaaacacgtttatatttttagtgccgggcctgcgatgatgcctaaagctgttttagcacaagcacaacaagaattattaaattggcaacagcaaggtacttccgtaatggaagtcagtcatcgaagtaatgcttttatggcgcttgccactcaaactgaacaagatcttcgacaattatatgctatacccgataattataaagttttgtttttacaaggtggtgctcacggacaatttgctgcaattccgatgaatttaattggcaagaaaggcaaagcgctttatttaattagtgggcattggtcaaaccgttctgcgcaagaagctcgtaatttttgtgaggtcgatcagcttaatatattaactcaagatgaagcgggtgttttttcggttaatcagacagattttagcgatattgctgagcaatatgattatgttcattattgtccaaatgaaacaatcagtggcgttgaaattccggatattccgattgtcggtaaagcggtattagtggctgatatgtcttctaatattctttcacgtaatattgatattagcaaatttggcttaatttatgcgggagctcaaaaaaatttaggtcctgcgggcatcactattgtgattattcggcaagatttaatcggtaatgcacagcgtgcaaccccgtctatttggaattatgccacgcaagtgaatgccga

SEQ ID NO: 28113 - DNA, 596 bp, Oryza sativa
cccgaatgccaacataatgcgcatttattttatttaaaattaacagattcagccgatcggaacgcgttattaacttggcttaaacaacacgatattttagcggtgtttcattatattccattgcattccagcccagcaggtaaacaatttgggcgctttgtcggtgaagatcaatttacaacacaagaaagtgagcgcttgctaaggttacccttgttttataatttgcatctaacagagcaacaacgtgtgattgaggttggacggattattttcagtaatgcagttgttaagtaaaatagcgatttggactacattagcgaccttattcaaattagtggttggcttgctcgtgctgaaacttttggggtggcagtttggtacagcaggcttaggacaagcagccaattttatgacgttgatcacagtcttgacggtctttgctggtggcggtatcgcgaatggtgtaactaaatatgtagcagagtttgaacatcatttaccaaaacagcaggctttgttggcaacggctaatttgattacggtattcttttcttgcctattagcggtctgttttattagtttttctcacaaaa

SEQ ID NO: 28114 - DNA, 599 bp, Oryza sativa
catcaacaattttcatttcattggttattcagtattatttatttcagtaccttttatctaggtttcccgtgctcaatgttattggcattgctgtttgatgtaacgctacctaactatgaaatgttattactcaccttattgactgcgttagtgagctacttactgtattacttcgtttataaacgagtaaatttgattcgacaagcggtacagaaaagacaggattttgctaaatcagaagctattttgaccgcttcactattgtgtatgattggactatttagcttaatcgcttttatctcaatgaatggcttgttaatttttaaattagaaaaatatagccaaatcttttctagtatcgtacaaggtatcccactaaaacgctttttttattttttcattgccggcttgttagtcttcttcttcctatatgaaaataaaaaaacttggttagcatttttattgattggcgcattttttggaggttttgcctatcttgcagtgggcggaacacgggctaaccttggtttagcgatcgtattattcttattattaggcctttataaaggctatttatcatataaatggttgctcttcat

SEQ ID NO: 28115 - DNA, 773 bp, Oryza sativa
gcgtcaaacattagtaccgccaattatcacgactcccctttatttcttgatttttggtcaattaattggcagtcgttttggcgaaatgaatggggtcagttatatacaattttttgcacctggcttagtgatgatgacagccattacagcgtcttatgtaaatacggcctcatccttttttctaagcaaatttacccataattttgaagaactattagtttcttctctttcaacccataacattatttggggttatgttgtcggcagtatcgtgcgtggtgggctttcaggtattttagtcacgctgatttcattgctattcgtttcttaccaaattcattcttggagcattattctgttaactttattaatgaccacaattgccttttcgttaggtggcttaattaatgcggtatatgctaaatcttttgatgatattggtagcattcctacatttgttttaacgccattaacgtatttaggcggtgtattttattcaattacattattaccagaattttggcaaacactctcaaaatttaatcctattgtttatatgattaatgcctttcgctatggttttttaggtattagtgatgtatccatcgcttatagtttctcggtattaatcatttttattctaatactatactattttgctttttcattaattgaaaagggcgtgggattacgcacctgattttcattgttataaattgtacgagagataatgctagaatcatatccatctctcgtataaaacattaaggaac

SEQ ID NO: 28116 - DNA, 589 bp, Oryza sativa
ataaatgcccgggtcgttttgccgttgcccgtccagcacgttagccaccacatacaccgcccagcgcgcctgcacaacgtgcggatgttcgcccggtacatgcccgagccacactacataggcggcaggcggattgcgcacaatatggcgcacggcggaatcgtcccaatgtccggggtgcgtgccgacttcgcgcaactggtcgccgcatagctcacggattcgcgcttgtagggcttcactggttttcgcaatgttgctcatcagatataccccgtagatttatcacgcgcccacaccgagcctgcggattcgattatcgccacattgtcaccctcgacggtctcgccgctttcggcaatgccgagcgagattgtcccgttcgccactttctcaagataacgtaagctatcttcataatcgcggcgcgcctgatccgtggcgcggtttttttccaaaaaatagcgggcaatgtagcaacaatggcgttctaacaccgcaggcacgtttttaatcggcaagctataacgaccggcaagatagctatcaatggtctgcgacgcgtcctctaacgcctcttggatttttg

SEQ ID NO: 28117 - DNA, 664 bp, Oryza sativa
atccgcaacatccttatcatcaagtgtcaaaagcaacttatccctattttaatgcgatgaaaatgcccactttgttgaaagcggttgaaaaagtagatgactataccgtcaaatttaccttggctaaacaagacacgacttttatttcaattcttggtatggactttacctctatttattcagctgaatatgcagataaaatgttaaaagcaggcacgccggaaatgattgacacgacaccaatcggcacagggccctttgcgtttactagctatgtgttagatcaagcaagtcgctacgtggctcataaagattattggcaaggaaaagctgatttcgaccgcttgatctttgaagttgtaccggatgcgacaacacgctatgccaaattaaaagcaggacaatgtgatttaattgattatccgaacatcacagatattgaaaaaataaaaaccgatccagccgtgcaattactgtcgcaagcgggtttaaatattgcctatgttgcatttaatactgaaaaagcgccttttaaccatattaaagtacgccaagcgctcaatcttgctgtagataaaaaagcgatcattgatattgtttatcaagggggggggattgccgcgaaaaaacctttaccggctactatttggggctacaatgatag

SEQ ID NO: 28118 - DNA, 673 bp, Oryza sativa
cgaattattaagaatgttaatgtaaacgcaacgtcaccattatggttacaagaaaaattacgtcgttgtggtattctctccattgatccaattgtcgatattacaaatttaagtttacttgaattaggccagccaatgcatgcttttgatgccgagaaggtaaaggcccctattcaagtccgcctagcaaaagatcaagagcagttagttttattagatggtaccacggcgaagttacaaacgaatacattagtcattgctgatcaaaaaaatgtccttgcacttgctgggattatgggcggagaagcaagcaaagtaaatgctgaaacaaaagatatcattttagaagcggcattttttgcaccattagcgctcaccggccgtacacgtcaatatggcttacatacagacgcctcgcatcgttttgaacgtggtgtagacccaacgcttgctcgtcaagcaatggagcgcgcaactacattgatcatagagatttgtggcggtgaagtcgctgaagtatgtgaagcgataaatactgaatatttaccaaaacagccgatcattcgcttacgtcgtaccaaattagattcagtgataggccattatattgaagatcggctagtgacggatattttagttcgcttagggctaaatgtgacatgcgaaaatgatg

SEQ ID NO: 28119 - DNA, 917 bp, Oryza sativa
ctttagtttcacgtattaaatcaagtttcattcggatatttgtttttaagcttttgcgctctgcgagaataggcatattttctaccacttggtataagctatacattgcggaatagcgactaaatcctaaacccaatacttcacacaagggttttaaacgtaatactccttctgaaaaatcacattgtgccgataacatagctcgactaatcacgtcaatgctttccacaatgcttgctatccgtgcttgtttagcttgcatcgtttgttgcaataatcgttgcttagcggtttgttgttgacgtaatttaaccaataaatagaaagcgtaccctgccatagtaaatacgatcaggacagctaatatgataagcacaaactgaaacataaacgcttccgactaattatttaaatttattaatgtctatcgtttcaaattgacgtagtaaaagatcctcgttattttcttcatcatcttcaatacctaattcaattattagttcatgtacacgatctaaacattcatcaacaaactgttgatcttgggttgatagtactttacctgcttctaactgatccaataattgatttaaacattcattattttctaattgcgttaattcaacttccggtgaaaccgttgcttttgtggcgtgatttgatggttcaagcggtacgggtttaatcatttgtcctttttctggtttattgacaaattcgaccattaatggcacttttttgcggctgccaacacgtggatcctttttaacttttgctgacgctgtcttttgctctgttattacattacgagagccggttggtaatcctttatgcttacgctttttcttctcttcacgtgcttgtacatctaattcatagcgtgttggtttccgcttcttaccgttgcttattggcaa

SEQ ID NO: 28120 - DNA, 572 bp, Oryza sativa
cgactctagaggatccccatttgcaagcgggaatgtcgctcagcatttttttattcgataatttgatcgcacaagtggatttatcaagtaaagagggcaaatccaagttggcggcgcttgcagaaccgttaatcaatcgcattccaggcgaaatgttacgcgtttatttacgtaatatgttaggtcaaaaactaggcattttagatcctgcacaattagaagctattttgcctgctaaagtacccgcaaaccgtaaatcaatcgcacaagcgttgccgattaagcggacacccatgcgattattgatagcattattgttgcagaacccagaattagtccagtttgtacccgatatttcagcgctacagagcttacaagaacccggtttccaattgctagtggaattgatcgaagtgtgccgcgaaaaagtcggtatttcaatgggagtgttattagaacattggcgagataagccacattaccgtacattagaacggttggctaattgggatcacctagtgacgcctgaaaatgtggaaagtacttttattgaaacgcttgattttttgtac

SEQ ID NO: 28121 - DNA, 602 bp, Oryza sativa
attttttatttaattcagcttcaattgtttgaccatctgcagcaattttgtctaattgagcttgtaattcactaaatgccttttgtgcttcaggtgttggatttttagctaattcactattttgtttgatcattttagcaccaagtgtcattgcttgaagagatttatcttttaatgcttttacttgttcatctttaatctctaaagatttagcattttgttggattttctcaatttgatcaagaattgcattatttacagtgtcttgaacaatagtttcatctttagctttttcttcaccaagtttctcaagttcgttattaattgcttcaccaattaatttttcttggttttgttgccattcttggaattttttgtagtcttcagcgccggtatccattttagcttcaacttttttatccgcttcaggttgtgttgccgccgttgcagcaggttttgtttctacagggttgtttgcaggcttatcacaagcagttaaaaataatgcaaataatgcagctgcgctaattttagtaaatttagtcatttgaaagtcctatgtcagaaattgatagtatttactctaagtggttaactttatc

SEQ ID NO: 28122 - DNA, 534 bp, Oryza sativa
  unsure (1)..(534): unsure at all n locations
ttattttttgataatcagtataagcatcggttggtatatgctcaaacacgcctagttgttgtaacattttttcacctggcggtattaattgcactgacgcgattggcgtagtatttttgggtttttggtgcggatttttcaatgattttaatttggcaagggctatcttttaataagccagcaagcgccaaaccaaccattccaccaccaataataataagatcagcagatttcataagcgttatttttacatataaagcggtaagaaaatgtgtattagttaagtttttttatgatatttttcaaggctacggtggcggattttgacatttttgccacggctttgaaagtatttagctaattgttcagtgataaagacggagcaatgtttccacccgtacaccgatgcgatggttaagtagcttcggttatttttttctaacattggcagccaagtttctaaataattgcgtgttnnnnnnnnnnnnnnnnnnnnnnnnnnnnnnnnttcaagaaagtcaatgaccggttgtt

SEQ ID NO: 28123 - DNA, 659 bp, Oryza sativa
cccataactaaaatattaagcgggtaaggttcagctgtggcacgtgctttaaaacgttgggccggatctaataattcagataagtcttttctaacggggttaccaacggtttctgctttagcaaaagctgttgggaatgcttgtaagacacgttttgcaattttggctagccatacatttgttaagcccgcgattgcattctgttcgtgtaaaacgatgggcacattgcatagccttgctgcaattccacctggtccggaaacatagcctcccatacctaatacagcatcagggcggtatttttttataatgttaagtgcttgtaataccgcttttagaatagtaaaaggggctttgattaatgctagaacacctttgcccttgagccctgaaatttggataaattcaatggggatattgtattggggtacaagctctgcttccattcgatctttggtacctaaccaacagatttgccagccttgtttttgtagttcttgtgcaacggcgattgcagggaatacatggcctccagtaccgcctgccataattaaaagttttttgctcatttatgatctcatgttatggctaaggatcaaagagttctttttacaagatccatactttgattttcaatcgaaaatttgcttattctacag

SEQ ID NO: 28124 - DNA, 631 bp, Oryza sativa
caattcctttcttactgatgccttatctatcgcgtaaattaggcgtagaagggtatggtgagttatcctattaccaaacatatttagtgttattcttaattttggttagtcttagccaagatggtgcgttcgcgcgctatttttatttttacggtaagcggtcattaaatgtaattgtacatacaggctatttttatactttaatcgttggtggcattattttggctgtttgttggttgttacaagcggaaattattgcttatttggcggtttcagctatttttcaatcttttcttgcagtgcaattgagtgtccggcaatgtcagaaacaggcgttgcaatatatgattattcaatcattaactagctttacttctatttttttgaccgttgtgatgttggagttttatcaaacggatttggtcgaaaagcgtattttggctattttgtttggtaatttaatggttttctgtttggtttatttcttttatgtgggcaaagtaacgagtaataaacattattcattgcggcaatatcaattaagtttggtctatattttaacgtttggtttgccgttattattaaatcaagcaggcttttatttaaaaggacaattagaccgtatttttat

SEQ ID NO: 28125 - DNA, 634 bp, Oryza sativa
ggtatatggaaatatcattaatagaaggcaggaatatcctgccttttctatttgctaaattatcaatgtatttttaaatttatttaggccttatttatgcttacgataatttctccagctaaaacattagattttgctacaaccagtccctcttttgcttattctcaaccagtattgaccgcttacagcgaacaattgattaatttatgtaaacagcttactccggcagcgttaagttcattaatgtcgattagcgataaattagctagccttaatgttgcacgttttatagaatggcaattagtacacgatcaacaaaattcaaagcccgctttatttgcatttaaaggcgatgtttataccggtttagatgcacaaacattaacagaagcacaagttgaatatgctcaaaaccatttacgtattttatccggcctttatggattattgagaccattagacttaatgcaaccttatcggttagaaatgggcactaaattagctaatcataaaggtaaagatctttatgcattttgggataatatcattactacgaactacaaatggcaattgattgataggcaagcggataatattttgattaatcttgcatcggatgaatattttaaagcct

SEQ ID NO: 28126 - DNA, 687 bp, Oryza sativa
gcaattggcattgcactttatattagcattaatgccttcaaaatgttttgggaagccgtacaagtattactggataaagctttaccagaagaagatattaatcaaattttaaccattgttgctaaccagccacaaattatcggtattcatgatttattaacgcgtcaggctggtgctgtacgctttattcaactgcatcttgaattagaagatcacctttctttactagaggctcacacgattactgacaatttagaacaaaaaattcttgcagcttttccgctttctgaagtaattattcatcaagaaccgacatcaattgttcaacaggagcttgttttaggacaagtaaaaaactatgtaccaagttatcgctaatttttcatttcaaaattttgaacatgaccctgttatattgataaatcaaatcatcaatcaatggcgttataatgggcaaattattgggcgtgaattctcggtgacctaccatacacagcctagcgcacattttcaagttcgccttgccacaccagaacaaataagcttaatgccagaatggaataacgatcaagtgacggaagccttatcgcaagcggcagaaaaaggcgtagaatttgaatcttttgaaattattggtcgagattatcaagcagaacaaacatctgagaatagcaacgcacgttttta

SEQ ID NO: 28127 - DNA, 556 bp, Oryza sativa
tagccagcttagcattttttctttatttaagtagaatccgctatgcttgattttacaacctacctaccacgatccaagcggtttaatttacactttttttgttcattaaaccgcttgtcgtaaaacacgcccagtctgcgccttaaagcaattgatccgcaacaatccgtccctgttcaatatgaataacacgatcgaataatgcctcactttctgaaaattgatgggtcaccattaatagcgttaattgacgctgacggcaaatctctaacaccaactgttgcaattcattacgccgaataggatccaacgcagaaaaaggttcatctaataacagaattagcttatcttgtaacaaagtacgggccaacgcaacccgttgtttttgccctcccgataattgatccgctcgccgtaataacaattcagcaatccccatttgaccagcaatcttttttaccgcctgttgcttgtgtggcgttaaatgcaagcgaggcaccaacgctaaaccaatattttgctcaacagtcaaatgaggaaaaacattattttcttg

SEQ ID NO: 28128 - DNA, 562 bp, Oryza sativa
tacaattagctaaagcattggctattttaattaataatggctttgtaaatacaccgcatttaatgctagaaattattgatagcgataaaacagaagcctataaagatcctgtgctttatgatgatattagaggcgtaccaaaacacttttggcaagttgcaaaactaggtatgtataatgtgattaattcaccaaatggtacaggtaaaaaagcgggcggttctttttatcaagccgcgggtaaaagtggtacagctcaagtatttaaccttaatggtgcaaaatataataaagatacattgaaaaaagagttacatgaccatgcttggtttattagttatgctccttatgaagatcctaaagtagcggtcgcgattatcttagaaaatgcaggtggcggtggtgctaatgcggcaccggttgctcgaaaaataatggattttgccttaacgcatacttttaaacaacattcagacaatgtagaacaacccgttcaaaccatagaaaaaaacacaaccgcttgagcgaaaaaaggataaagtgagtaatgaatagagctgta

SEQ ID NO: 28129 - DNA, 555 bp, Oryza sativa
aaattaatccagaagttgcggcagcagacgcgattaaaccatcattgcctgatactcaagaggttgcaacgagcaatgacgaattgcgtattgaaattacaggcaaagaaagttggatcgccgttaaggttccgaacagtaaaaaaagcctagtagagaaactgtatgcaaatggtgaagtattaacgttcaatggcaacgaacaatatcgcctcactatcggcgcgccagcaaatgtaaaaatttattataaaggcgagcccgtactccttaaaattgatgggcgagtcgcgcgaattaaattacctctagtacaacagtaacgagaaaatgttaaaagaagttcctattaaacgtcgtcaatcgacaaaaatttatgttggtaatgtgcctgtgggaggcgatgcaccaattgcagtccaatctatgacgaatactcgtactacagatattgaagcgaccattgctcaaattaaagcgcttgagcgagtgggcgccgatattgtacgggtatctgtaccaacaatggatgcagcagaagcgtttaaagtgatc

SEQ ID NO: 28130 - DNA, 541 bp, Oryza sativa
caccacaattaaatgcgcaaacttatgtgttaatggactataactctggtgcggtattagcaagtttaaatcctcaacaacgtcaacatcctgcatcattaactaaaatgatgacgagttatgttgtcggtgatgcgattaaacaaggtaaagtaaaaaacagtgatatggtcacagtaagtgaaaatgcttgggctcgaaaatttccgggttcatcattaatgtttttagacttaaatacccaagtgtctgtagccgatttaatgcgaggcttaattattgtttcaggtaatgacgctgcggttgcattagcggaacatacttcaggttcgcaacaagcgtttattgatcaaatgaataaatttggtcaacagtttggtttgaaaaatacgcattttacaacggtacatggtctagatgaagagagtcaatattcatccgctttagatatggctattattggtgctcatgttattcgtgatcagccagaagaatataaaatctactctgaaaaagaatttaaatataatattaaaaaacc

SEQ ID NO: 28131 - DNA, 748 bp, Oryza sativa
atagtatagcaattaatttcagataaggccaacctttgcctgtgctatgtttgcattctatttcctgctggcttagaatacattgttctcattggggtgctgaaaataagctgagaaatacccatagaacctgatctgattcgtatcagcgtagggatttgaggccatttctactacaactaggaattttaccgctcaaatccttctagtttatgttttgttagaaggactttttatatgaaatttaccaaacttatagcattttctgcggtgatcttcagtggcagtctatttgctcaaaaaccacttttaacggtttatacctatgattcttttgtttccgattggggggccgcgcccaaattagaggaaaaatttgaaaaagtatgcgattgcgatgtgaaatttataccgtttgaagatggtattactatgttgaaccgcattcgtttagaaggcaaaaaaacaaaagcggatataatgttaggcattgataatttcacaatgcctgaggcggttaaatcaggcttatttgctgcgcataatttgccaatagatcaaattaaatggcaagacaatacattttttccatatgattacagtgaatatgcttttatttataataaagaaaagataactaatccgcctaaatcgcttaaagagctagtcgaacgtcaagatttaaaagtgatttatcaagatccacggacaagtactgtcggcagaggcttgttattttggttaaata

SEQ ID NO: 28132 - DNA, 1020 bp, Oryza sativa
ttctgaatctgcaaggtatttaccattagctttttcagcattagttaatgcataatcgtaagattttcgtccgctgttattttctgcggtaagggagagtacggcttgctctagtgcatcatttaacctggccttatcttgaattatgcctgctacctctaatgaaacaaacaataaggctacaataggtagcgtcaataacgcaccaaaaataatataaacgccagattgattttggataaaccgtttggtttgagtaataacatattttctcataatcattattcctttttagttttgctaataacagattatttatcgagcgacgcctaatgaagaagcacgtaaccaattattagaataatcttttctatttaatgttaagcctttaaataaattatccatttttttacaaactgttacctgataaagggtcgcataacgattggtaccacgtaaattctccggtaatggagaggcttttttaatatcatcaattttaattgattgacaattttgtgcgttagttggatatattttttcttttgaggtatccagtgttatgtctggcctaggttggtaatttttattttcatcaagctttgatgaattaatatctttgaagccatatttatagatagtaacagcaatctgatcttttttttctcccattaagttagcggctaattttgttatttgtttcagttcttcttcttttatatcttcatctccagcacgctctatatgtctttccttgataacattggttaatgaataaaaagtgcgctgtaatttaccgacggtagcctgtagaatagcaacgtcaatcaagaaaataagaatgacgaaatacataaagaaaaataaatcaaaattctattaagacagcaccttgggtattttttagaaattttttgatctttttcatattcttgggagtaccacgattttacgttcaaataatcgctgaacagcttgttcaggtggtataaaaaacattggtttatatggatatttaaa

SEQ ID NO: 28133 - DNA, 684 bp, Oryza sativa
cgttattattagcagtaataataatcccccaaacccgaatacaaggtaatagagaagtatcattgagcatgctccctaaaaatattttgtaattcaccggtgaggttaaatacttgcgcattttgatacaccgctgaacgcgttaataaaccgtgattaacaaatttaccgataattttattattttcatcacgatgttggcttgcttcaaatgagaagatgtcttgtaaaacaatctgtccattttccatacccattacttcagtaatattcattactttacgtgaaccgtcatttaaacgagatgcttggataatgatatttaccgcagaagcaatattacgacgaatcgcttctaatggtagagaagcgtttgacatcatcaccatactttctaaacgtgcggttgcatcgcgtggtgtattggcgtgcagggtagacattgaaccatcgtgaccggtgttcattgcttgtaacatttggaatgcttatgcaccacgacactcaccgacgatgatacgttcgggacgcatacgcaaggcattgattactaagtcttgcatggtgatttcacctgtacgttctacaccggctaaacgcgtttctaagcgtacaacaagcggttgttctaagcgtaactcagcggtatcttctaaagttaacacacgctcagttggtgagata

SEQ ID NO: 28134 - DNA, 949 bp, Oryza sativa
  unsure (1)..(949): unsure at all n locations
tggctaaggtgatctttcgttaactttttattattttaaacaggaaatcattatgaataatcttgatccattagcattgccattaaatggtaccttannnnnnnnnnnnnnnnnnnnnnnnnnnnnnnngttcacaatggcaaatttatatttacgtttattggtgggccttggttgtcagccgttaacggtagaaaaaaatttagtgggtacttttaccaaagcggcaaccgaagaattgcgtgatcgtattcgtcgtaatattaaagcctgtcgaagaattttttgggattatgaacctaaccaaattgatcaaaataaatataatttctatagtcaactttatgaaagggttgataatttagatgaagcaaaattacggttacgtattgcagaacgagaaattgatttagccagtattttcactattcatagtttctgccaaaaaatattatcgcagtttgcgtttgattctggcattcgatttgataatgattggcagacagatgaaagccatttattacagcagttaagtgaagagatatggcgagagcaattttacccgctgagtttgcaagaatgcgagatcatttataacgaattagaagaaccattaaaagcacttaaaatggttcaatcatttattgggattgaattgccggcgttatctgccgaacaaaaaagaatatttacgccagagctatctactcgttatctaattgaatataagaattttttacagcaaatcaaacagtattggcaaataaatggtaacgaaattgttactattattaatgcggaattaaaaaaaatatataaaacaggggagaaaaaagccttaaatcgtacctcttatcaaccccgttatcttgcaacatatcaatcagagcttgataattgggctaattcaatggatcttactttaccaaaaaatttcgagcgcttttgt

SEQ ID NO: 28135 - DNA, 576 bp, Oryza sativa
aaagcctagtggatctcgatctaaatcataaacaaaattaagcgatctactttgttgcacagtgccttaacaaaaagtttgctggccaataataattgcacgattataatcttgcattgccgccgcaaaaatttcagatgctgaggcgctatggcggtttatcattaccatcaattttccgtcatataatggcttatttgttgttactactgacttatctacttgtatttgaggctcatcttcgtacactttgatacgattaaaagcatctcttacctgtacaacaggactgcttttaataaataacctagttaattcaaccacttcagttaaagaaccaccaccgttatcacgtaaatcgacaattaatccttctattttcttagtcttaatttttgctaataatttgtgcatatcattagctaaaccgatataaaaagcaggaattttaatcactgcaatatttttacccgctactttatcaattgttaatttagcggcactgtcttctaaccgaacggtatcgcgtgttaacgtaatgattttagttttatgcgcttttgctggctcaatctc

SEQ ID NO: 28136 - DNA, 618 bp, Oryza sativa
tattgattttaattttatcaccagcaatgagtatggtcttattgtgaaattaggtgagcaattaaatgatttattagctgattcagcttatgttgtgcgaggtgagcgtcgtcaagcggtatcaacttttgcagaagcattagattggttagtgaaagaatctcggaaaggtttaaccattcaacgttataaaggattaggtgaaatgaatccagaacagttatgggaaacaactatggatcccgttgcccgtaaaatgttgcaagtaaatattagtgatgcgattgcagcggataaattgtttagtacgctaatgggcgatgaagttgaaccacgccgtgatttcattgaaagcaatgcattatatgctaatttagatatttagtttttgctactaacaaaaagccctaaataaagggctttttttgttggtaagaatggttaatttttcaataaattaaaccgcttattgtgcttgtttcgccttacgggctttataccatttaatgcacacataaatggcaagtaatcctaaaccagcaaaaataatgtgttgtccatttttaacttgttcatgtaaccaattgatattttgtgcaccataatcgcctaaatata

SEQ ID NO: 28137 - DNA, 534 bp, Oryza sativa
cttttaagcccgctaattgttcagccgatttaaactcaacctgcccttgcccgtgtgatacggctattggcatatgtgagcctgccatgccattaaaccaagccgagtgagtgtcattgattttgactaatcctacacgggcttcaaagcgttcagatttattacggacgaaacgtggccaattttctgtgcccgggataatttcagctagattagacaccatctggcatccattacatacccctaaggcaagagtatttggattagcgaagaattggctaaattgttctcgtaacattggattgaataaaatagattttgcctaaccaccaccagcgcctagtacatcaccatatgagaatccaccgcatgccactaaagcattgaaattggctagatgatggcgtcctggcattaaatctgacatatgtacgtcaatcgcattaaagccggctcgatcaaacgcagcgggcattttataatgactatttacgccctgttcgcgtaaaatcgcgaatgttggtttgaccccgg

SEQ ID NO: 28138 - DNA, 553 bp, Oryza sativa
  unsure (1)..(553): unsure at all n locations
ttcaaccatgggtcgagaattatcgactccaataatgcgaaaattttttgttggcgcatttcgcctaatagctaaaatgctagcgcctcttgaacagcctaaatcatagacattcgatccttcagtcacannnnnnnnnnnnnnnnnnnnnnnnnnnnnnnnnnnnnnnnnnnnnnnnnnnnnnnnnnnnnnnnnnnnnnnnnnnnnnnnnnnnnnnnnnnnnnnnnnnnnagtaaaatcacctaacttttcgatgggggttgaaaaaatcgtatctctattcattatagtctttgatccttgtttaaaaatttagtaatagctcgtactacagcatcaggtttttctacatgcacccaatgatttgcatttgctacaataaatgatatagcctgaggaaattgggctaggattgttgctgtatctttagcttgaatataatgtgaatcagcacctttaataaataaggttggtttatcaaagaaaaccgcttgccaatccattaaatatggatattgtgcttttaacgcgcttaaattaaaacgaaaacgtt

SEQ ID NO: 28139 - DNA, 750 bp, Oryza sativa
aattcacggccgaactcccacgtgaggtggtattaaatacgttcgctaatttactgactaatattgacttaccgctactttccccgccgacaatagcaattgttttaacaaagaatggccgaacttccttggggataaagcgccaatatttaaatggattattgcgaatttgcgttgctgagatattaaaagatgtacgctcaggatccatcaaacagacttctagattcaaatattgctcataagatgttttatcttgtttttcactggtaaacactattttgggctgaatatttttctcagcaaataattctttaacgcgctcactccaatcaatccaaccatttggatagctaggaataccgtcttcttttaaatgatgaataacaatttgcttttgttgatatttaaaaatttgttgtaaccaacggaggcgatcttcgttagtcggcatacgtttcattttactatttttaaagagttcaagatcacgttcagtatccgtgcacacgaccacatgtaatatatccactttactaaacgcttcataaatcatattaatatgaccggtatgtaccgggtaaaacttgccaaagataaccccaacccgctggttcatatcttcaacgagatttaatacctgatgtaatgcatttaatttattagcgcttggatttttaatttttccactaaccaattgattaaaataggctctagtcaagcccgcttgtccacaaatatcattaactt

SEQ ID NO: 28140 - DNA, 669 bp, Oryza sativa
ttctttgatttgttatcaaaatgccgaacaagtgttaggtaaaaaagcggcaattttaggggcgatggctacggctgattattatgctaagcatcaacagttatccgataaagcaaaacaatggatcgatcaagcgttagctttagatgctaaagaaaataatagtttactgttattagctacaaatgctaatgctaataaacaatatcagcaagcaataaattattggcgacaagttttagacagccaaaacccggcagttgatcggcgagcagttattcaaaatattcaaatggcattacaacaattgtgatcaacaaaaagtaagttgatctttacaatttacattttaaagattgctaaaaataaggattgaaatataataaaatgataccattttgctaaatttgatcgagttttacatagaatgttaagtaaggagaacttatgagcgtaacgaatcgccaagaagtgttacaaaaccgtttagggccagaaattcaagagttaaagcaagatattcaaacacttgtgctttcgactgtcgatagcgaaggtaatcctaatgttagctatgcgcctttcgtaattaatagtggcgaataccaagtattaatttcaacgattgcacgtcatgcacgtaatttaattgaagtgccaaaagtatcg

SEQ ID NO: 28141 - DNA, 981 bp, Oryza sativa
acccgccagatattgttcgtacaggtaaggtttaaaatcgcctcgatgtgcacgttggatcatactcatcaaataaccctgcggttttttcacttctcccttgccaatacgctgttccacttcaaatagcaaggctttgcatatccccaagtccagacctttcatcgtttgagccacagcttgttgttccaagacggagagatttaatgtggttggccattcaatttccatacggttacccgtacagtacttatttatacaaatactcgtacttgtactgtactgagtcgctgagttccgtatgggaacgctgtgattttttactgagttccatttgggaactctgtatatttttactaagttcccgctctttttgactgagttccgtatgggaacttagtatgttttgaggaagttgacgcagttgatgttgttgttctaaaggtatctcatcttcttgttgtatgcgttgttgatacgcattaaagcgtgcttgtatccaatcaatatgggaaacataatgccattgggtcgggtcggcatgtaaattatcaataatatgattggcaacattgcgtacggtgatgtcacggtgattcgccgcattttcaagcagcttgaggtaattgttatttaattggatcgtatcaacaataggcatcggttcgtcatgtaataaataaacattccccatcacttgtccttgttcgttgcgtacggtttcacaaagcgtcagccagcgggttaactgtaataataagagtgtttggctcacaagcttacgagagagtttaccctcggcatacgttttatccgaaagtaactgtcccagtatgtcataagacgggaaaagtacggttttaaattctcgggctttatacttgataagctgccaagctaatttggcccgtgatgttaaatacggatcgaacaacaatcgagtcggtaccgtctcgtgctgattgcaaagaaaagcaaacc

SEQ ID NO: 28142 - DNA, 2090 bp, Oryza sativa
  unsure (1)..(2090): unsure at all n locations
ttctctatctcttgcaattcctgtttggaaaaaccgatactaccgcaaaaattgatgtttccttcttggagattggatgaggatttcattaaggacaacttgatttaagctactaaacattgtatgaatggcttcttggcaatataacgaactaaaccaaataaggggaacagcttgactagggtcacatcgtcaatcttctccgcatctaataagaaactaaaggttatcgaaaccgacggatagcttgtctatctaccgtttgtaacagcatgagcaagtcatagcacattttcaccatttcgttttccactgcattttctaaaggcagcatacgataggcataatccacccggtgtgtttaccacatgctcaacataacgttccaatccgacggattccgcaatatctaatgccaaagaataagcttccagtttatgtttgcgggcggggtaaatttgccagatatcatctaccggttgacgaccgacccaagcaaaagtcaacccgtagcctctgcacgctgttggcgttgctgttggatattgacgcccggtgcgataccctactgggtttccacactctgtgaaaagtcatgtaaggcgtctgtgggcatattgtaagattctgtcgactcgtcctcagtcggggtgctcgccggtgccacgggcgggtagcatattaatcaatgtcgaatagtcttcctcatcggaggggtaaatccggcgtatatgttgtcggactcaccgtagaggaaacggcacctttagcatggttatctgtaggcgtctttatactctcggtgtgcatgattggtttatgttgggggttatcatgctcactacactatgtaacggatggtgaaagtcggcaatatcttgcaaactttgatctaccgaggcgttaatctcttgttgtttttgcgctagctttttgaagcgttgttcgtctaaatcgatttcatgataaagtaactcataggaggtgttgtcacccaatacatcaaccatctcattaatgaggttgtcctgaaaatctttaatattaaacggattatcttcgttacaacgtgaaagactatgttgccagatgtcgtcaaactgaatttcagtgtcaaatcgatagttgtgccaaacggtcagcgcattgatacaaatggctagtagcttatcaataggggcatgccctaatccgttaataaaacgttttgaatatagggataaagaaatgaaatacatttctccattttatcaactaatgtatgagatataatatagcccatctttttcaagctcggaagacagttctccacaggaaagcgctttgtttaactttttctcgtaatatgctttcgcttgctgaatccccaatgctttctcgataaaggagaggtcggcgcgggtatcgttctcaataagatgaccgatcaataaatccaactcggcttgtacgctgtccgccgattctcctttccaaggtttgaattgacattcaatcgaccaaaaacgttgatcttgggtttcgggttttccgtgggttgtgctcataagggcgtaatttatctaatgtcaccgtaatatattgagattctgtcggatagtgagtcatacctgcggcaatatatgacggtgtcgtattggtgattggttgcacatttaagcctttggcgattgcctccaatctggcttgattctttttatctttggctgaaaaagtagcattactcataacggctatccttattatccatgttctcaaataatgagtattgacctaaaaactttgcggtaaccgtcgctaacggannnnnnnnnnnnnnnnnnnnnnnnnnnnnaacacaaccgcgttgttcggactgtgggttataaacttcatcgcggtagaggtgataaatcacatcggcgtcttgttctaacgaaccggaatctcgtaaatcggaattgaccggacgtttattggcacgttgctcgaggctacgattaagttgtgataaggcataaaccggacaaccggtttctttcgccaactttttcaactcagaggagatttctgccagttctaaattacggttttcaaacttgccggtgctg

SEQ ID NO: 28143 - DNA, 560 bp, Oryza sativa
atggttaaaatggctgaacaacgtatgaatacagaatctctgccagcaataccatttcctaacgcattaattattgaaaaagtattagcgcacacactgcaacaagcgcaagatatattaattgtcgttccaagccacgctttcgccgatatcctacaccaaataaaaccgctcttaacgacacaacatcggattatgtgggcaacgaaaggactagaacataatacaggccgactattacaaactgttgcaacagaaataataggagagcaacatccatttgcagtcttatctggccctacatttgccaaagaattagccttaggcttaccgactgccattacattagcctcacacgatgcaaaattcgcagatgaaatgcaacaacgaatccattgctcaaaagcatttagagtttacctaaatactgatatgattggcgtccaactaggtggcgcgatcaaaaatgttatcgcgattggtgcaggcatttcagatggaatggggtttggcgccaatgcacgaacagcacttattactagagggctcgccgaaatcag

SEQ ID NO: 28144 - DNA, 652 bp, Oryza sativa
ttacaacgttaggtgctcactttgttaaacagcttcacgacagaaaatttgatgtttttcttgatttaaaatatcacgatattccaaatactgtggcaagggctgtgcgttcagccgctgatttaggggtatggatggttgatttacatgcgtcaggtggattaacaatgatggaggaagcaaaaaaaattcttgagccttatggtaaggatgcgcctttattaattgcggtgacggtattaacaagtatggaagatttagatttgttacaaattggtattaatgcttctccgatggaacaggtgattcggttatcccaccttgcaaaacgtgcgggactagatggtgtagtctgttctccacaagaggtagaagtgttaagaacgcattgtggtgatgattttaaacttgtgacaccgggtattcgtccagccggttcagattttggtgatcaacgtcgtgtaatgacacccaaacaggctattcaaacgggggctgattttttagttattggtcgtcctattactcaagcacaagaacctttatccattttaaaagccattaatgcttcaattgcataattatgtatcataatgagggtgagctttgctcaccttttttattgtaagcggtcaatttttgagatttttat

SEQ ID NO: 28145 - DNA, 548 bp, Oryza sativa
tgttgctaaaagcattacctgaattacatttacgcttagatgctaatcgtagttggagcctagaaaaggcattaaaatttgcggaaaaaattgcagatcaacataaagcacagattcagtttattgaagaaccttgccagactccagaattatcacggcaatttgcacaacagagtggtattgcaattgcttgggacgaaaccgttcgtgaggcagattttgtggtaaagaaagagccaaatttagccgctattgtaattaaaccaactttagttggttcgttacaaaaatgtattgggttaattgaacaagcgcatcaacaaggtttgatcgcggttataagttcaagtctagaatcaagcttgggtttaacgcaattagctcgttttgcgcagcaatatacaccttgcactatgccaggtttggataccttgaatttaatgaagacgcaaatattgcgtcaatggcccaattcaaatttacctattgcggatttaaatagcccgtttattattgagcttgtgtcataatttggtgatgttaagcgg

SEQ ID NO: 28146 - DNA, 764 bp, Oryza sativa
tttgcattccaattgccacctcttcttgtaaatacggcatttctggagaatcggaattaaagactaatacatttggcactagtttttgtaaacgttgataagcctgcttaatttctgcttcttctgtattcggtgatttaccatcaagcaataaagcaatatgaaacacttctcgtgcatcattcattaataataatttgcctttatattcatcacgccataaatcttcccagcttgaaactgtgtgaggatctatttctttggcattgacgccaatcccagtcaattcatagacataaggcaatgaataagtattgtcaggatcaaatggtttacccattaattcaggggtaatattttttaaattgcttaattttgttttatcaatggcggttagcataccttcttttgccattttattaacataatagctggaagggaaaacaatatcgtaaccggttgaatttgataatttcaatttagagtacatttcttcattgctttcaaaagtagaataaatgacctcaatacctgtttctttggtaaattgctctagcaaagaagaggggacatattccgtccaattatagacatatagtttttcagcagcttgtgccgcaatactaaagtaagcgagagcgattgccgttaattttgcaaaaaatgtatagcctaatttgatcaattttatgaaatccttattgaatgcgtgatggttaatgattcaactgaatcaggtaacaaaagtccggcattatatagat

SEQ ID NO: 28147 - DNA, 704 bp, Oryza sativa
cgtgataatcgtaaaattcaccatcaggaatgatttgcaccgcaggtaaaacttcgccatctaaaacagggactgaatattcagcaccggtcaaaaattcctctactaatacgatagtatcaaattccagtgctgcggtaatcgcgggcagtaattcttcttttgttttgactttgaaaacgccgacacttgaaccttcacttgatggtttgacaaaaacaggtaaacttaattttgcaataatttgattaatatcgattgcttgtcctcgttgcactactaccatatctgctgtgggtaaaccgacagcattccataataatttggtacggaatttatctaatgtgatagctgaagccattacaccacaaccagtgtatggaatccccatttgttctaaagcaccttgcaatacaccattttcacctattccgccatgtagaatgttgaagactcgctgaatgcctttttcttttaatttctcaatagcgatatcttttgtatcaataccttctacattgtaacctaggctttttaatgcttctgtgactgctgcacctgagtgtagagacacttcacgttcttgtgaagtaccgccatataacaccgcaattttttcggtcttaatattcatgtatgatgagttcctttgattatgcttgccaatcttcagccaatttgcgggtaagtttactgatgttacc

SEQ ID NO: 28148 - DNA, 561 bp, Oryza sativa
tggctattttttcatcttctagtggataagtattataaataaccgcttccatttcaattttatgttgctgacaaactattaaacttaataaagtatgattaatcgagcccaacttagcggaagtcactaaaatcaacggtaattgttgttcaacgatataatctaatgttgtttgctgtgaattataaggaaccgccaaaccacctgccccttctaataatacatagtcatatttttgcgctaataacgcactggcttgtgcaatttttgatggaagtattggattattttccatttcagccgccaaatgtggcgaacaagggtaacggaataaatatggacaagttatgccatttaaatcttctgccgttagttcaatcccttgtagctgacggtgtttaataatatctgccgagatgtgttgacaaccggtttgaatcattttttgcgtaataacggaaaagccttgttgcatcaatcttttggcataaaaacctgtcgcaatagtcttaccaatatcagtatcaatacctgaaacaaaaattattttacccatttttc

SEQ ID NO: 28149 - DNA, 625 bp, Oryza sativa
cgattttttgttcactgagcatagtcaattttttaatttgtgtttgtgccattttagcaattttatttgccatctgtttattcactggcttcaactgtttttctaaactggtaaaagccacttgtgacgccatatcattgcctttgctatcaagcaataccctaaccggggtgggcggtaaaaaacgagtcagatttaaactttttggtgcttgtgcttctactacataaattgcttcaagcaatacggtgccggctggtaaatttttattaattaataatgaaatagcgcacttgccaatatcacctgaagtaattaaatcaataccatggcgaatcattggatgatcccaggttaacagttctatctcttctcgcattaatgctagttggcgatcaaatgtaatcgttgttccttcttcagataagcctggaaaatcagacactagcatatgccctgttggattcaatgcgatcaatttttcgcctaaatttcttgttctaaaccgatgatatcaaacaaatttaaagcaaaatttaccaagtgtggattattatcctcttgagcaatagcttcagccaatgcttgtgctgttcaccaccatttgaattcaattctaataagc

SEQ ID NO: 28150 - DNA, 870 bp, Oryza sativa
gatcatattcaaattccaccaaccaatattcatagtattcgaggtgagcaacctcctgaaactgaactggcaagatttactcaagaattaaatgaatgcctgcctaatttaacttttgattggatcatcttaggtatgggaaatgatggccataccgcttcgctattcccctatcaaacagattttgctgatcagcatcttgcaattatcgcaaaacaccccgtaaccggacaattacgtatttcaaaaacagccaagctaattgaacaagcagcgcgtattacttatttagttactggtcaatccaaagccactatattgaaagagatccacgacttaccggcaacacaattagcttatcctgcggcgcatatccgcgcaaaaaacgggataaccgagtggtacttagatcaacaagcggctgaattattccgttaatttgcatttaaataaacctagtatgaaagatgaaaaattgcgcaaaaacttaaggcataccattgatattagcccaatgagcaaatatcaatgggcaattgtactaatggccactattatgaatttcttagatggttttgatgtattggcaattgctttcactgccagtgcgatttcacaagattttgcattaaccaaaactgagtttggggtgcttgtcagtgttgggctgatgggaatgacaatgggttcattagtgttaacccctttggcagacaaaataggttgtcgcttgatgctattaattgctgtaacattttcagcgatcggaatggcgatttctgccatttcacagagttatgaaatgcttggtttttcacgagttattactggcttaggtgtgggggggattttagtcggcactaatgtgat

SEQ ID NO: 28151 - DNA, 607 bp, Oryza sativa
atttagtgtactatctgctattgctattattcttttcacatattatgcaaatcatttatcaatcgcaatgatcatcggtatcattgttggcgtattcgtcaatggctgtgttagtggtttatatgctatcacgcccatgacttatgctgctaatattcgtagcacaggagtaggctgcgcaataagcgctggacgtattggctccattttagcaccaactattgccggtattttattagatggcggtttagcaaaacaagatttatatctttgcgttgcggcgattatgttagttgccacttttattctagtatttaaaaaaccacatatcgatgcagtggcttaattgatcggaaccaccgcattctgcataatatgcgaatgccaaataagcgatgaaatttgcgcaaaataatacaaattaaaccgcttaaagctattaaccaacaggagaaaacaatgtcaatcaaaggtgatatcggcgttattggcttagccgtaatgggacaaaacttaattttaaatatgaatgacaacggcttcaaagttgtcgcatataatcgtacctgcatcaaaagtagatgaatttttagcgggcgaagcaaaa

SEQ ID NO: 28152 - DNA, 1237 bp, Oryza sativa
aagccccgaaagacgaatgaagtggaaaatatcgctactcaacttgcaatgttccaagatattgttgaacccactgccacagtggaaaatatggcgtatgaactcgctttgcgtttaggttttcaattaacgaatagcattgagtttgccgatcaagtggtttggctgaatgataaaacaggcaaaagaaaaactgcacttttattagcacagtatcacaatgaaatgcttaattgcattattggcgcacaaccacaaaaagtgtttgctttagataaagtatttaatggcaatgatgacttaaaagctaatctcgccctgcaattaaaagacgcaggtattgcctttgaaacattttagggggcgttatgcaattaaaatttgaagaactcacccaccaacagcaagccattgaagcggtgattgccttatttaaaggcgaattaaataaaaccacggaattttcccttaataacctaggcagtcagccgattatggcaaatcagctggcgttaccccttgaagaagtcgagaaaaatttaaatgcggtgcaggagaaatttcatcaaaaaacgaccgctctttccgatcacggtttgcatttttccgttgaaatggaaacgggtacgggcaaaacttatgtctatttacacaccatttttgagttaaataaacaatacggctggcagaaatttgtgattgtcgtgccaagtgtcgccattcgtgaaggcgtacaacaaaccgtacgaaccaccgccgaacattttactaatttgtttgataaaccgaccgttaataccacggtatatcgtagcgacaggctaaatgcgctacgcagttttgccactaataaccagattgaaatcttgattatgaacattgacagctttaaaaaagatgacaatgtgattaaccgtataaacgagagtggcgaagccccgattttgcaaattagccaaactcagccaattgttatcattgatgaaccgcaaaatatggaaacagatttagccaaacaggcgatagaagccctgaatccgctatttgtattgcgttattctgccacgcataaaaatccataccataaaatttatagcttaaatccgttagacgcttataaccaaaaattggtaaaacaaatcgaagtcgaacctgtgctggcagaaaacgatgtgaacggggcttatgtggtgctaaaagagcctgtggttggcaaaggtaaactcaaagccaaaat

SEQ ID NO: 28153 - DNA, 674 bp, Oryza sativa
gaattacaaactgcgggcaggttattaaccgcggggcctaatcctagtgaagaaggggataatataaccggttcgacagtgattgcggaatttgattcattagcggccgcacaagcttgggctgaacaagatccttatgtcagcgcgggtgtttatcaaaatattatcatcaaaccatttaataacgtgttttaatcttcaatataaaagtacaaatgaaaatttggcttttctcttcaataatcatcctattttatgttttctcaacttgattttaccggcttaccacttgctaatacgggagaaaatagaccgcttgcaatcgcagtggctatgtcaaatttcgtgaaaaaaacgctacaaaagcaagctgatttacgtgatgattggcaacgaaaattgccgacattggcggattgtggcaattatgctgaacggttaacaatatatttgtcaacgattaacgatgaagtgcaactaagccattgtttgcgtaactttaggcaccgtgaaatggcacgtttaagttttattcagtcaaataaattagcaacggttgagtttgtttttgagcaattatctgatttagcagaggccataattcttgccgcgcgagattggttatttacccgttgatgtgcagaatatggcacgcctgtgaatggtttaggtga

SEQ ID NO: 28154 - DNA, 1875 bp, Oryza sativa
atagtaaataagcctattgatgactcattatttcgtgatttttatggcattgggatcactaaatatcactttgatataaaaggaaataataaaatatatggtgtttatattcatctgttgataatcaaagaaaagaacgtaatttggtttataaaaaatcagctatagaggctttagccgctaagtattcaaactggaatgttttgccatcttcaaggaaatttttacacagtgaataaaatatatcgtgcagaaactatggtttcactattagtgggaatagcaatttttgctattttatttagcgcttttagccattggcaagaaactcaagtgagtcaaacaaattatttatatcaacaacaggcattacatattttagaaaatcaaatagccttaaaacaagcaacacaagaatgtgaaaaacaacttcaacaaaacgacgtgttatttacgattgactgtggtgcttcatatattcaagtgaatttcccattaggcaacgtcagagtgaataagcaaatggcagcgcaactatcgctagaatagcgtgtttcaccacttataaaagtgattgaatatcagcgctaattagtagaaaatcaaattctactttaggagccattatgtttacggtctatttttctcagaagctatcatcactcgctaaattatttattcaattacagcaaagcaatcctaatcctaatccatttgaagcagaaattgttttagtgcaaagtgtaggaatggcacaatggttacaaatgcaaattgccaatcaaatagggatcgcaggtaactatgaattcccttttcctacgagttttttatggcaacaatatcgtgtcctctttcctgaacttcctactgaaaatatttttgaacgtgaaacggttacttggcgtttaatacgtttaattccagattatttatctttacctgaatttcaatctttacagcactatttaactaaagattcgcgtcaataccaattaaagctttatcaattagctaaaaaagtagcggatttatttgatcagtatttagtttatcgtccacattggttggttcattgggaaaatgatcggcttgagattgttcaagatgaaattctgacccatgcaaatttaaaagtgaaaaataccaaagatatttggcaaaatttaagttggcaggctattttatggcgcgcattaattaatgatattaaattagattgtgatgaatcggtgtttgtgacttcacatcgtgcttatttgcaagaacagtattttaataaattagataatttaacagaaatagaaaaatcaaaattacctaagcgggtctttatttttggtatttcctctttgcccgcgacgcaattagctgttttaaaaaagctcagtgaacattgtcaaattcatctcttctttttgaatccaagtgcagaatattggggagataatgttgaagatcgggtattagagaaattagcacttaagcagaaaatgaccgctaaagaattagaagcgttatttgtacagaaaaataatcagttattatcaatgtggggtaagcaagggcgtgattttttagcacaaattcttgagcaagaacccgaccaaattcttgatgtttttgatgcttgtgaaggcgattcaaatctgattaagttaaagaacgccattctttcttttgataatcctcaacaattattgcttgcttcgcaagatgattcagtacagtttcactcttgccatagcattatgcgagaagtggaagtattgcataaccgtttattgcaaatgtttgctcaagatccaacattggctgcaaaagatattattgtcatgtcagccgatattaaccaatatgcgccttatattgaag

SEQ ID NO: 28155 - DNA, 601 bp, Oryza sativa
actaatttgacatagtaagcggttggattttttaccaaaaatgtatttccttgtttttgtaaaatcagtttttcttcccagggggaccccattttttcgggaagaattgctttcgggcgataaaataattttacatgcgtttgcaaggcaatttgtaatgtattggctttattacttttaggtgggatttcacgtaaattagaataaaaaatgattccctatcttgcggtaaactgttaattgctggtaatgcttctattttcacttggcttgatttctcaggctctactcgttgaataggcggcaacacaacaaacggagaggtaatttttttgccattaacatcttcaatccacgtttgggcaaggtatggtaactgtttgttgttattagaaatacctaatgacatcgcttttttgtcaccttcaaaaacaacccgagtcctatctaatccattcacagcttgagttgcattgtaacaaatactccaactatgattcctgtaatgctgacatatatttatttattttcataccgctatttcctttattaaatgtttaatcaaaattatatattgttgttttttaatgcttcaccatag

SEQ ID NO: 28156 - DNA, 1333 bp, Oryza sativa
gaaatcttccgtagaaagttcgccggttgggaagttggaaaaaaaatattctcctagccgtattgttacattacaacgcattgcaatttgaatgctattcatcaacgcttgtggtaagtcggcaaataaggcgcacatttcttcttctgaacgaaaatattgttgcggagagtatttttgagggcgtttgggatcgtcgagtgtataactatcgtgaatggcaacccgaatttcgtgtgcatcaaaatcatcttctttcaagaagactacgtcattgactgcgactaaaggtaattgatattttttggcaaattgaaccgcttgctgaaggtaacgttcctcatctgagcgccctgttcgacaaagagaaagataatagtgatccgcgaaatattgttgataaaaagccactaatgtggcggcttcttgttcattttctttaagtaaagctttgcccacatcacctgaacgtccgcctgaaagtacaatgattccctcatttaattcagctagccacgctttttcgacaataggaaactcaacatacccttgctgataagcacgagaaagtagaacagtgatattgtgaaagccttgattattttttgctaatagtgtcagttcaaaaatatcttcactagttggatcagaacgaacataaatatcagcaccaataattggctttaagccggcagttaatgattcaccataaaatttcactaagccacaaaagttactaaaatcagtcaacgccattgcagccatctgtttggcagcggcagttttgactaaggcttttactttagcaagcccattaatcatagaaaaatcactgtgtactttaagatgaacaaagcgtggttgagtcatatgcgaattgtttagatgaggaaaatagaaagcaatgttaacataaataagcggttaagtttttgcaaatttttgcagaaatttaaccgcttttagccgggggaaggtatattaatcgcgttttttagtaagtaaccaccaaacgatcgctaaacagataaggcttggaattaaagctccaatggcgatgggtagccagctaaagactaaagtcatattgccaaagacgatatttgatacgtagaaaatgaagccagcgataatgccgataaataattttatacccattacactcctacgcaatggtccaaaaataaaagaaatggctaatagcatcataactgccattgagataggctggtaaactttacgccaaaaagcaatttggaagcgttttgaatcttgccctgtttcagttaaaaaactgacgtaatcagttaagcctgcaatagacaaggattca

SEQ ID NO: 28157 - DNA, 615 bp, Oryza sativa
aaccattcttcatctaaagttaaatcttcattcaaattgacactaatacctttagccaatacatcacgtgcaatttgatgagcatcttctagagaatgttctgagaatgtaccacattgataaatattcagctcaggaatttgtgtaacatcagatactttggttaatatatcatgcatagcatttttccatgcatttgcgaccgcttgtgcgcttggctcaccaataagcgacatataaaaccctgttcggcaacccatcggtgaaatatcaataatttccaccttatcgctatttaaatgatcacgcataaaccccgcataaaggtgttctaacgtatgaatacctttagacgacataatctccatattagggcgacaaaaacgtaaatcaaacacagtaattaaatcacctttcggcgtagtgatggttttagcaactcttactgttggtgcattcatacgagtgtgatcaactttaaaactatctaataaaggcatattttactccaaattatatgcataatcaagactattctgcgattgcttgatcccaacttaacgctttggctgggatcttacgttgtaaataaaaaccgcgggttggtttagcttg

SEQ ID NO: 28158 - DNA, 1448 bp, Oryza sativa
ggaaatcataatggttgggagccttttgcaccaaaaacgtgatcttttaccggggccaactgaagcagaaattactaaatatggcttagacttggcgtggaaacgtaaacttgtcgcacgagaacagcaagatagaagctattcattacaataccaattcttacctgaaaataacccttggattaatactgtcgcgcagctcagccactcgagcacttatcaacatgatacacgttcagaacaagcatcaaaaacatatttggcttcattaggtaatgaaagctggacgcgttataccgatttaacattcgatgtcaacaatactagtttgtttaatgtggcaaaaacatctcatacacttttagtcggtttacaatgggtaaaacataaacgacaaacgcttatttttgatccgagtaaactccaaaaagcagaatataaccatggatatttccaaccatcttacatgccatcagggcatcaatacacacacgcattttacgcacaggataagataaaaattcacaacctaacggttagcataggtgctcgttatgattatgtgaaaaatataggcaaacctaatatagctactatttataatgaccccactgcagggcatgattacagcagtaaacattatcctggctggtcttcttacttaggtttgaattataaactgaccccttacttaaatttattcagcaatataagtaacacctggcgtgcacccgttatcgatgaacaatatgaaacacagtacgcaaaagcaactttaagcccaacagcgagctcgttagacctcaaaaaagaacgtatcacacagctacgcgtaggaaagcagatacatttcgatcacattttatcaaataacgatcaattaagttttaactcaacttttttttactataaaggaaaagatgagatttttaaaactcgaggggtccgttgctttgaaagtgcacaaaacaacaataatgaagtttgtagcaaaaaaatcggcaattaccgcaatttacccggctatcaaattaaaggatttgagttagaggcgaattatgattcaacttattggttcaccaatcttagctattcacacacaataggaaaacgattagcatcaccaagaaacccttggctagccagtacaagctggattgcagaaattccacctcgcaaagccgttgttactttaggtagccatattcctgatacaaatttaacgttaggatggaaaagtgagtttgttcgacgtcaagatcgttctcctacagatcaagataaagatgcaggccattgggcattacctaaatcaagcggttatgctttacacggcatcttcgcgacttggcaaccgaaacaaatcaaacatttacgcattcaattcactgtcgataacctattaaatcgatcatatcgtccttatcttagtgagttagcggcgggta

SEQ ID NO: 28159 - DNA, 1091 bp, Oryza sativa
ggtccaaaaccccataagttcaccaaaggccctacagtcacattaaatgcgccctctgtaattttattcaagcggatagcttctgccaccaccgtagcaaagtctggtgaaatctcaaacggcgtattaacttcacgtaatttattaaagcgactgatttgtgaatcaagttggtaagtagacatctcatcattaacgactttaagcacatcatctaactgtttttttacttgttcagcggtaggtaaattagcgatcttaccatcatcaatatatttgactgtataagtggtgcccattgttttaccttgtaaagtaatttgttctgcagatttattacaagcggtcagaataaacgataaactcgcgacacataccaacattagagatttaagtttcacctggtttcctcatataaaattaattgataatcaattagcaaaaataacgagattaaatcaattatctattagccattaaatgcgttaagcggtacgatatgcaaaaaagtttacaaatcgtaccgctttatcatagtgtattaaagcaaattaaccaccgaaatcatctaataagatatttttgtcttcaacacctaaactcttcagcatacctatcactgcggcattcatcactggtggaccacacatatagtattcacaatcttccggtgcttcgtgatttttcaagtagttctcattaagcacattatgaataaagcccgtgtaaccatcccaattatcctcagggagtggatctgaaagtgctacatgccatttgaaattgtcattttcagcttgtagttgatcaaaatcctctacatagaacatttcacgtttagaacgtgcgccataccagaatgacattttacgtttagattttaaacgttttaactggtcaaaaatatgcgatcgcattggtgccatacctgcaccgccaccaataaataccatttcattgtcggtttctttagcaaagaactcaccaaatgggcctgaaatagttactttatcacccgcttttaatgaccaaatatatgaagacatttgacctggaggtgcatctggttggcgtggtggcggagttgcaat

SEQ ID NO: 28160 - DNA, 692 bp, Oryza sativa
caaaaataacggcgtggcgccatacccgctgtgcgttttccgtcacgatcttcaaaatgagagtcagggatacgtgttgcaccagtcgttgaagccacttcaggtgaatgacagcctaaacattgattagtatttttagttacttgtaaaccacgaatactatgcggtactaaaggtggctgaaatgggaaggtcgtcgggatattacccgtgtctttttctggattagtatacgcaggcactacattttctggcaactgctcaatggaatcactaatattgctaacatggcctgtagcagctgccaaaccggcaaataatgttaaaactaaagtgagatattttctcatttcgggttcactccgttaatttatcaaattaaattgaccgcatcatcaacttctcaagttgatcaacactcggcttaaatattttttactggtaattgcttttcaaaacgtaagccaaaagcaaatacattttcagcacatacatcaatacaacgcccacaacttatacaatctttggataataccattgggcttgcttctggtttaacaatggaaaggtaaccccaatactggtgattcaggacaaacgttatagcaatccatacagcgatcacaacgggtacgatcaacgacctttacgcggactagtgattgagcaccaattaagccgtaaatagcacc

SEQ ID NO: 28161 - DNA, 1617 bp, Oryza sativa
  unsure (1)..(1617): unsure at all n locations
ctgcattaaccattcacggtcgcactcgagaatgcctttttaatggacaggcagagtatgaaagtattaaagcggtgaaacaagccatttttatgccgattattgctaatggggatattacttccccacaaaaagcaaaagatgtcttgaatatacaggggcagatgcagtgatgattggtagagggagtttcggacgcccttggttgtttcaagaactgaaacagtttttagagacgggtgacataatgatttatcaatcgatgaaaaatgtcaattgatgttgaagcatatcgaaaatctttatcatttttatggtgaacannnnnnnnnnnnnnnnnnnnnnnnnnnnnnnggttggtatttagatcaattaacgcccaggctcaaattttaaacgtactttcaatgcattaagttcaacaacagaacaattgatagcattgaaagaattggtcaaatccattcgttagaatcctttgttaagttggatagaggacaatgttagaacaacaacctgcacaaaacccattaacggtatcaatgctgaatgcacaagcacagcaagtaaatagccacttcgtgataatgtgaaagcggcattaaaaaactatttatctcaattaaacggtgaagatccaacagaattatacgaattagtattatnnnnnnnnnnnnnnnnnnnnnnnnnnnnnnnnnnnnnnnnnnnnnnnnnnnnnnnnnnnnnnnnnnnnnnnnnnnnnnnnnnnnnnnnnnnnnnnnnnnnnnnnnnnnnnnnnnnnnnnnnnnnnggctaaatgcttaacaagggtaatcaataaaaaaacttatcggcaagaatcaagattttttgtgtgtgatatttataaataagcgcacttatttgctatttttttgcaaataagtgcgctttattatttaggattattgaatttttaattttttgccgacaacaatatgattgttttggattttatttaatttactcaatttatctggtgtggtgttatataaacgggcacacgaataaagcgtttcatttttttgcacaatgtgatagccattgttcaatttaccattttctttgttggccgttgctgttgattgggttgttgaagttgatttttgggcgctatcttttttaggcgacggtttaacttcttttttgttattttctttcaccttgtttatattagggtgatatgcccaataagtatttaagcctttataaatagcttgtgcgattttgcgtcgataaatagagctggcgagttgtttttcttcaattgcattagataaaaaccccgtttcgactaaaattgaggtgatatctggcgaacgtaagacgcttaaacttgcgtgttgaggcgtttttttagcaagtggagtaactttttaaaggtagataatacggttgaacctaattcataacccgaacgttgtgaatgagaaaactgtaaatccaatacggtttgattaagataatgttcatttttattagataataatgagcctgcactggcgagtaattctgattgcttttggtgatcttataaccatttacccatttcattgctagcgcgtctatttgataatatccatattgaagcaccttttg

SEQ ID NO: 28162 - DNA, 682 bp, Oryza sativa
ccagtagtaatacactgttttttgccacaccagctttaacgatatctgctaagcaagtggcataaaaatttacgttcataacagaactcccacatttaaataaaaataagaaataattgcatttagtatgttataaatgacaaaaggaagtaaaattacttccttttgtatgcttgaataaaatgataaaaatattcaaatttaaattttattgtaccgctttatgttataacgtatagaaaaatggaataatcgccatagagactaccgcagcaatcacaccataaataaacattggtacaaccggtttcttgaagattgggccttcttgtttttaatattcaagaaagagctgaagggtacaatggtattgatacaaaccatattacccattgcgccatctactgattggaatgctaatactaaaggagtggaaatgccagtaatttctggagttgataatcgtacactaacaaaagttaagttagatactgtattccaaccggaagaagtatgcgccaacagccctctaaatatggtgcaaataatgtcgaatattcgcctgttgtatcattcatcatagctttaaatggcagctgttggaaacgtgtagtaattaaaaataagattaatgcactatacccaaaccaagtaggagtatccccagcacccaaaataacgg

SEQ ID NO: 28163 - DNA, 724 bp, Oryza sativa
gagctcggtaccctaccgaatctcagcgaaatattaagttggaagatggcgctagcaattagcattggcatatttgttgcttggttaggcggacgaggcatcaatttaatggccactcaaccattaatcattacaggcttattgatcggcacaattatcggcattgccttttttgggggaataccagttgggccattgatcgccgcaggcattatgtcgttactagttggcaaattgtaaccgccaacgtcaaatgaacattttatattataaactcacttaattctttgaatagctatgtattacccacatcgaatgaaacgtcacctgcaaaaaaatcgcgtaaatcaaccgcttgatgctatgcaaaaagcattgtggcacaattaaccgatatctctaatttagattattaccgtttacgtagccgtattcatagcctgtctaatataaaaaaactgagctcaaacaagccgctacacacgaaatagcacaacaactacaaacggcaaaaaaccatttttcagtacgacaagcacaacatcaacaatagattaccccgatttaccggtttctgcccggcgtgcagaaattttaaaagtgattgccgaacatcaagtggttatcatcgccggtgaaacaggttcaggtaaaacgacccaattacccaaaatgtgtttagcgcttggacgtggtgtaaaagggatgataggccatacacaac

SEQ ID NO: 28164 - DNA, 579 bp, Oryza sativa
cccattaccctgaataaaaaaaacgtgcgtaatcattttatttttctcaattctttaccttatacgcctgaaaccaacaaaagcttggccttattaattttcggggcgatattgtggttaactgaacccgtacacatcgccatcaccgcgtattaagccctattttagctattttcctagatttggttaaatcaaaagcagctctcgtgacctttgctgatccccccttttttctcttttttggcgggtttgctttagcaactgccttacatattcagcaaacgggtataatcaaagcgggctttttactcaatattttgtgtgtgttgctaattgcaactgtaggtcattgccttttgcaataaatgtaccccaaataactgaatagcaattgcataaatgctcaaaaatctaataatttatgcgctttacgcactcttatttatatttaataatactttgttagttcattgtaatatatgtaataaatagctatttttgggttatttagatcatattactttgcataaaaattatcttttaaagtaaattaccaacactttttaaaaataatgcatg

SEQ ID NO: 28165 - DNA, 783 bp, Oryza sativa
ggatttaatagcattaaagaacacgaataaacactaaactatttcagtccctttaagtacaacgtaattatagaattttctttcacctgcaacaaactaaaaattttaatttttataatcaaaaaaaataatgaaatagttaatcgccatctcaatataagggctcgaacaattttatgaataagaaacttcctccgcttaacgcattaaaagcctttgagtcagccgctcgtcatttaaactttactaaagcggcagatgatttattcgtcactcaagctgcggtaagtcatcaaattaaattattagaagactttttaggcgtaccattgttttatcgtcgtaatcgtcttttagaattgaccgaaataggacggcaatattttgaagaaatccaaccgctttttcaacaaattgcgctatcgactgagaaaataaaattaaaaaatagcaggcaaattttatcaattagtaccacaccttcttttggtatgcattggctagtgcctcgtttaaatgaatttcatcataaatatcctgatattgaagttcgtttagttacagccgctcaagacgaaggattgttaggtaaagatatcgatgttgctatttattatggtagcggtaattggcagaatttagaagcggtcaaattagtacaagcgcgtattatgattttagcctcgtctgaatatttgcaacgaaatccaatgaccaagcctgaagatttaaccggtaaaaatttgatccatgtttgttcacatactaaatggaaacagatgg

SEQ ID NO: 28166 - DNA, 575 bp, Oryza sativa
tatataaaaggatatttaaatatttccgtggccgttatctaaatgggcacggataaaccattgtaatttttctaaactacgggtttgtgcgactaataaatcttcactaattggatctagatgaccattatgttctaacaccacacgatgtgcttcgatattgtgagagtaatataaatcaatcaattttaaatgatcttgtgcggttgcacgaccgagtggatattcagggctctggcgagtttcaactaaatttccggataaaccatttggagctacccctagcgttgccatacgttcagcaatttcatcaataaaatcgcgaacttcatcaacttgactgtctagcatttcatgtactgcaataaattgtgggccaaccacattccagtgggcgtgttttaaaatcaaagctaattcatttaagccttgtaaacgcatttgtaatgcctcagcaattaaatggccagtcgcaacggttaaacctggcactgtgtggtcagcatttttgtgcatatcattagtcagcgcttgcgattgtccagttaattttaaaacaggaaaagtaattgttt

SEQ ID NO: 28167 - DNA, 681 bp, Oryza sativa
gtacccgtaataagcgctgcccgttactgcgattaaacccagctgagcctctagattgggtgataaatattggaataaaaatcccccaaatacacctaatactgtcccgattacccgttcaactacccgcttttgggttgcggaataattgggttggcaaacaaaaatagcggtcaataaaatccaataccctttactgtctaactctgctaactgcacaattaaactaccgataaatactacaattgatagccgaacggcgtggcggaagagttgtgatgacagcgttaattgctcacgtactgcggctaacatattcttgaagcctgatacattcttatcggttaagcgggcagatttttctttttctttgctgatatccgctacattagccagttgccaaattcgactaaattgatactcaatatggagtaaattttcagcaattaataaccaacggtgtgcatttgctagtcctcgttcttgatggtagtgcaatgaatttaataaaccttgtaaggctttttcgctccgtccacaatgttgatagccggagttttgccgtaaggcaatcgccacccgttgacaagcaatcgcctgtaattccattacgcgttgaaagcggaacattagatcactatttcgtaactgttgaaaaagttcgtgatattgataatagct

SEQ ID NO: 28168 - DNA, 651 bp, Oryza sativa
agcgtatcagcgcatcaagattacctcactaaagcgctctttttagccgatttattaggggtaagcaatgccgaaagaacttgttttgctattgggcttgagcctactcaagcgattgagtatctcaagcagaaaaaaatgctggcagaaaaagtcttaaaaaaagagttgcacgaatcggctttagcccgtgccacaacgattgcccgcttgacctcgcttgagatgactaaagatatttatgcgtccatggaacagctcgtcgagaaggcaagagttttaatacgtggaaaaaagggctggttgacgaaatggagcgtaaaggttgggtggcaggacgtgataaaaaactcggtcgtggattagacggtacactacttgccgaccctaaaacaggcgaatattttggcacgcctcgcagattgaatacgatttatcgggtcaatatgcaagcagcatactcaggagcacgttatcaacgaatgatggataatgtcgataatcgcccctactggaaatactctgcggtaagcgatagtcgcacccgccttgcgcatttggcattaaacggtcgagtgtatcgttatgacgccccattttgggcgacgttttatccaccaaatgggtttaactgtcgctgcacggtgattg

SEQ ID NO: 28169 - DNA, 1121 bp, Oryza sativa
ttctgcgtgttgtataaagctacatcacttttactttgcattaatttaatggcacgttttaatatatcaatattggtatcaagtaaagcaagatgatgtaatacttgtttacgctcaaattctaattctttgagtttcttatctaaggtataagccattacttcccctactgccaaatcacttcttgatgaacgattttccgttgccaataaccgcaccattcgttattttcattagttgttgttaagcatttaccgagaatatcctgagattgccaaccattggcttttctacgattatcttcacggtaagcgatttcatttgcatagttgagtaaataaagattactcattttgtgaacgtgtccgtagtacattcgtttaaagcgagagaaaaaggattcggcttgattgttggttatgcctaaatcgctacgatattcttctttatgattcactgtgcgtaaatcatagtcgagtaataaactttcgtaagctgtactttcgtctgtattaatgcgactttcacgaacaataaagcgatttgagaagtcttttacaacaggttgtgattcagaataagtcacaaaaacgtgtgaacgttttgccccgcgattaaattggttttctgctttttcttctgcggaaaaatgttcacgagctaccataacacagcgtttattaggacttttattttctttcaagcgatagtccaagcggtcgattttcttgttttctttacggaggtgcagggtgaacataagtgccgtccatatcaacttcgcctgaaagggggtgcatatctcgattttctaacaaggctttacgcaatttatgacaaagcacaaaagctgtacgataattaattttagcgtcacgagagatttctagtgcagatacgcccttaaccgcattcacaaaacgagctaatacatacaagtaggtttgaatggaagccttacggttggcaaagattgtgcctgatgtcactgaaaaggtatgatgacaatgtttgcaacgccattgtttatgactagcaataaaataggcttgatgttgtacaccgcatttaagacacgttacgtgctgtttacttccccaacgcatatcacaaagcaagtc

SEQ ID NO: 28170 - DNA, 1327 bp, Oryza sativa
tttttatttttcacgatgccgtgtattgccgatccattttatggagatgtcgcaaaaaataggaatgaagtaataatagaaaataatgttttaacggaaaatattatgccctgtgcattacctaatacgttatcaaacattagtttgcctgtaaaatttgaacaattaaaattgattggtatattaaagaaagggcagcaggctaaagcattttaattaatgataaaaaacagattttcgatttaaaagttaatgattttttattagatgagcatatacaaataactcgcattgatttgaaatcactacattatattgattggcataaaaagaaagattgtcaacatccaaaagaaaatgtggatgaaattataaggaattacgatgagaatacttttttctttattcttttttatttcattatcattattagcacaaccgttatcgctgtctttaaaaaatgcacctactgcagaaatattaagttatttagctgaaaaaaaaatgaaaaatatcggattgagtgagcaaatagacaaaaatacgacctcttagaattgaaaataggcattttgatgaaaatggtgaaaggattgtgcgcgctaatcaattatcaaaaagaaaagaaaaacaggtttatttatcgggcatttaaaagaagataaggcaatagagaaaaaaaaaaatggggagaaggccaagttaaacactcaaaccattaaagggggaaatgctaaaagttcaaaagaaattggaatccttactaaaggtaaaggtaatggtaatgtattgtcagaaaaaggggtatttatattttgatgagcgaagtaaaagcttaattataaaagatagtcctgattcaatgaagcatattttggcattaataaaaaatttagataagccaacagaaaaattgcaattgaggctagaattgtgacgattagtagtcaagatttacaagagcttggtgtccgttggggaatgttttcgccttctgacgattatcataaggtggccagtagtttagaaaccaagggtttaacaacagcaaatcatttaaatgttaacttcccagtaaataatgcaacttcacttgctttgcaagttgcaagaattaatagtcgcgtattagatttagaattaacggcattagagcaagagaataatgtagaaattattgctagtcctcgtttactgaccactaataaaaagcctgcaagtattaaacaaggcgctgaaattccttatgtattgtataaccgtaaagatgaagtaaaaaatattgaatttaaagaagctgtattaggattacaagttactccgcata

SEQ ID NO: 28171 - DNA, 541 bp, Oryza sativa
aaaggggttgatttaccgtatttccgtaaattattacgtggtacagcattatatgttgaagcaatagatcatgatattaggcttatttagatcgaatggaaaatgatgttgatccaattgagcggacgattttacgtttagcgacctatgaattaaaatatgaattagatgtgccttataaagtcgttattaatgaaggtattgaagttgcaaaagtatttggatcggatgatagtcataaatatattaatggtattttagataaattagcacccgcattaggtcgtaaatagtgatataaggtaagcgaaagcttgcctttttgttttgaagtttacaaaggaaaattatgggtgaatttgatctaattaaacgttattttaaccgtcaactaccgaaattcggtgttgaactttcaataggtgatgattgtgctattgttgctcatcaagcagatacaagaattgcgattagtactgatacacttgtggcaggtagccattttttagcgaatatatcggcggcagatcttgcgtataaa

SEQ ID NO: 28172 - DNA, 1727 bp, Oryza sativa
ttacattggtctatatctgttacttgaagatgattatgatagtgctctagatgcatttaatgctgttttagaacttgatcctcattacaattatacgtttttaaaccgtggcttagcattttattatagcgggcgttattctgaagctgaacgtgatttattacgcttttaccaagaagataaagcagatccctatcgtgtcttatggttatacttcaatgagctagaatttaaacctaatgaagcaaaagcaaatctaattacacgatcaaaagcattatctgctcactattggggcacaaatattattcattattttttaggggagttaactctcgcgcaacttcgtgatataatggataaagaagctcaaccaaatacagcttcatatgcagaaattttaactgaaacatatttctatttagcaaaacaacaactcaaattaaataaaacggatgaggcaattagtgctttccggctctctcttgcaaatcaagtgtttaactttgttgagtatcgttttgccctgtttgaattatcacagctaagagctatggaaaatcaaacttatcctgttgttgggataaattaggacgcaaacaagcggttaaaaatggcaaaattactgtttttttaccgcttgtactcatttagacaaattgtaaaagcattgaattcgcttcgttatttcattttttctttcctaaaaactcaacaatttttatcaattagtaataagataatcttgaatataaatcagcatatttaagctaggtttaatgttttcatttgcttattactcattatttatggttttttatgacaaataatactttaactttctctgacttaggtcttcctcaatcaattctcgatgctgtcaatgatatgagttttgtaactccatctcctattcaacaagaatgtattccccatttattagctggtagcgatgtactcggtatggcgcaaactggtagcggtaaaacagcggcattttcattgcctttactcgcacaaatcgatccgaatcaacgccatccacaaatgttggtgatggcaccgactcgtgaatagcgattcaagttgcggatgcttgtgagcaatttaccaaaaatatgaaaggtattcgtgtagttaccgtttatggtggtcaacgttacgatattcagttacgtgcattaaaacaaggttctcaagtggttgtgggtacacccggtcgtattcttgatcatattcgccgtggtacgttaaatttatctaccctcaaatcaatcgtgttagatgaagccgatgaaatgttacgtatgggctttattgatgatgttgaaacagtaatggcagaattaccagaaaaacaccaaacagccttgttttcagccaccatgccagagcctatacgccgtattacacgccgatttatgtctgatcctaaagaagttaaaattcaagcaacacaacgttctgcaccagatattacacaaagctactggttggtaaatggtttccgcaaaaatgaagccttactgcgctttttagaagttgaagaatttgatgcggctattattttcactcggactaaaacaggcacgattgatatcaccgaattatgtgagcgtaatggctatcgcaccgcagcgctcaacggtgatatgactcaacaagctcgtgagcaaactttagataaattaaaatcaggtcgtttagatattcttgtggcaacagat

SEQ ID NO: 28173 - DNA, 548 bp, Oryza sativa
tgccgcgcctaatgcggcggctttatcgtgataaaaaacgcctaattcgcgcaatggctgataaaattcaggcgccaacattaaacaaaaaaaaccaataaataagctaatttctagctgataaccgccaaaatgaagttctcctaaataactaaagccaaaataaaccgccatcagcgcgattgaaatcgccgtaaaaaactctaacaccgcagaagacaaaaaagccatttttagcacatccatcgtactaagtctgaatgcttccgtactttgatgaatctgttccacttgctgttctgtttggccaaataagcgaatagtttccagacctttcaatttatctaaaaattgaccgctcaagcgagaaagaatgccaatattacgttgattcgcttctaccgctttcaaaccgactaacgccataaataaaggcaataaaggcaaggtgatcaataaaatacaacctgccgcccaattaatgggaaaaaccaccgctaaaatcactagcggtacaataagcgataaaaattgttgtggcaaatatc

SEQ ID NO: 28174 - DNA, 547 bp, Oryza sativa
gttaatgatgagaaataaaaactatacaataagttcgcttttcaaatattgaagaatctcatgataatttttagccggtttatttatctgtttttctttttgcgccatacgaatgaggttacgtaaatgttggcgatcaagttgaggatattcactaagtagctgattaagtgatgcatcacccatatttattaattgatcacgaattaattctagcttgtgtaataatgcttgttgttgattgcgtctattttttactttatctaatgcatcttgaataggtgcagaatctcggttacgcaatagtttgccaataaattgaatttggcgacgacgagcttctagtttgaagctttgagcttggcgaatagcatatttaagatcttcatctaaggggattttttctagattttgtggtgttaattcaatcagttcggcgcctaacttttttaggtgttcagaatcacgtttgatttcgcttttacttacccaaatgatttctttatcatcatctgtccagtcaatttctggtttgccgcgtttttta

SEQ ID NO: 28175 - DNA, 668 bp, Oryza sativa
attcgagctcttggcccattaataccttaaccgatgacggtaattccaggctaaacaaagtttatgctgattatgtccgtgtagtgggtaaagatattgagcttgctaagaatgggcaaattcatgcggatcaacaacttatcttaaacgccacagggcatgtaaaactaaacgatggttcaagtgttatatctaataataatttggggattagtgcgttaaatctaacattagaaaacgcgactgtatcagcaaataacttaagttttagggaacgaatgataccaagctaaataacttatctaaagtttcagcaagagcggcagatcttcaaagcggtaaccttaacttagataaagcttcagtattagcgcataaactcactttaaatattagcaatgatgtttctttaaataaccagtctaaactttcagccaataatctaaaaatcaagaaagtacgcgatcttaacttaaacaattccgagcttagcgcaaataacttaacattaaacacttctaacaatatcaccttaaagaacaaatccaaatttacagcgggcaacatgaccttaaacgtgactaataatgttacgttaaataatgattcagagcttgcagccaataatttaaccttaaacgtgactaagaatgtaactttaaatgatg

SEQ ID NO: 28176 - DNA, 1188 bp, Oryza sativa
caccctgagctacttcttccacaactaaatacgtatctgagatcactgtttcatctgctgctttagcactatgcgcggcttctttaatcgttaattgatgatgatgtttctgattgaccgcttttacacctaaattacagaaaaagccaataaataataagcccgccataatatacatcgttacactataagcctgtgccgcaggcacaccactatcaatttgcatatgacgaatataattaactaataccggtcaattacggctgcagttgaccaagctaataatactcgcccatgaatcgcaccaacttgatatgagccaaacaaatcacgtaaataagctggaattgcggcaaaaccgccaccgtacattgaaataattacacagaagcctataacaaataggactttattaccactttcaccgatcgatggaatgataaaataaagcacggcacctaacaaaaagaaaatggaatacagatttttacggccaattttatctgaaatacttgaccagaaaaaacgccctgccatattaaataaactaagtaagccaacgaaacccgctgcggctaaagtaccaatcgcagcttgttttccaaccgaaacttcagagaaaagctctggaatcattactgatgcttgccccaatactccaattcctgccgttacattcaaacaaagaatcgaaaacagtagccaaaattgtggcgttttcatagcttgattcacaccaacattgtatgcactgactagcttatctgcttttttatgttcaacaaatccttttggtttccaagttggatgaggcaaacgaatagtgaaaacaccaaacatcataaaaatgaaatagaaaacacttaatactaaaaaggtttctgctataccaaccgatgtctcactgctaaagaaattcatcaaaccaacggaaataggcgaagctaacattgccccaccaccgaagcccataatggctaaacctgtggccattcccggcttatctgggaaccatttcatcaaagtagataccggcccaatataacctaaccctaaaccaataccacctaaaacccccgttacccaaatagagtaaccataaattgtgttgatacacaccgattgctgcaacaacaaacccaaggctaaaacaaatcgtcgccacaaacattgctttacgtgggccaa

SEQ ID NO: 28177 - DNA, 713 bp, Oryza sativa
ccattggagtcactccataaattgctttgaaagcttgcttaatgtaattctgattggctttggcattaactaagaaagtgtactttcttggttctgacatcatgatgccataagttttttcagtaagtattggtttaataagtacgtcagtaatttgcatgattagttcaacctttcaactcagttattaattgcacttttttgcgctaagacacagttagcatcaattaagtcttttactgatacttggtttcatagtttgtatgaaacgttaggtaagttagcactagatttttctaggttttcgtttttttcaaaagctacgattaatacttttttattaaccttaagttcttttagtaatttagcaattgcttttgtacttggtttatcttgtttaatcgaatcaactaatcctaagaattcgttgttattaactttagaagtaattgctgatttgaaagctaatgaacttacttttttatttaccttaattttgtaattacgatttggtttaggaccaaaagcgataccaccacctacgtaatgagggttacgaatcgaaccttgtcttgcacgacctgtgtgtttttgttggtaaggtttcttaccaccaccgctcacttcaccttttttaagggttgagtgagtcccttgaatttgtgataggttttcagcaagaattgcatcgaagattgcttgtttatgtactt

SEQ ID NO: 28178 - DNA, 739 bp, Oryza sativa
agctacgtgtaactgtgccaacgatgtacggcgtaaagtttccgccatcacatcggctgtaaattgtgttcagttaaaagaagtgacggttaaacagacaccattcacggctatgctatcgcctaaatgtacatctttgagtaccttgcaagcattaatgggcagtaccgcaaaatcacctggatgcttgatattcgcaactttacccacttcttcaataatacctgtaaacataaattctcctgctgtcagttgctaatttttgcgatgatgaaacgtcataatctaacaagatatcgtcgcctatgtattgtgtggatttaagcgttaaattaaccgcttccgctagttgcaaaatacctgcaccaccgataggacttttggcagtgcttccgcctaataatttaggtgcaatataacaatgaattctgttaacaacgccagctttcaatgcactaaaattcagtgttgatcccccttcaagcaagacactgtcaatttgcattgcacctaatttggctaataaatcaactaaatcaacttgtttgttggctaccttacattggataatttgcacgccaaaggctttcaattgcgctatttttgtactatcagttgaagcggttgcaataatggttggatattggcgcgctgtttgaactaattgacacgctagaggcgttcgtaagtggctatcgcacacaacgcgtattggttgtttagcattcggcattcgact

SEQ ID NO: 28179 - DNA, 631 bp, Oryza sativa
ctgctcggtcgccattcaatagcaatcctcctaatttttcaaactgatcacgtaatgttcgatactggcgaataccaattaatgaagggggtaaagtgggtaattcaaataaagccaacgccgttgcttgttttaaactatcaaaaaacctttgatcatctaaaccaaaacaagccagtaaaaataccgcttgtgcattccccgccgcctgttttatttcttgtactaaatcttcaaacgctagtttatgctcaagtaattgagcaatattaacactccgaaattctcgcgcattttgacgtaaatagtctaattctggaatattcaaatatcctattgagaaatcacaatgcgaaaatgctgcgttctgctttaaattatcgactaatatttgtggctggaaatcgtgataaccttcgatacctaaaatagcaatctgacgataagggaaatgttcattttctgctataacaggcacacttttaggcgataaccaagtatggcgtaaaccacctaagggcgtaacacgtaaatggttttgtttatggctgccaaccaaacctaattcttgcataaattgctcaaattgttgcactttagctacaacttgatgttgacctaataaacaata

SEQ ID NO: 28180 - DNA, 1062 bp, Oryza sativa
  unsure (1)..(1062): unsure at all n locations
agcgtgttgtatgaagtattacaaatcattttggataatgaacatttacgtgcgattgaaattcaggtctatggtgcagattattggaatgtcacgattgataatgcacccgcacaaacatgggattttactgaaatagcggttgaaaatgaaaaagtcgcgcgattaggttggaagccgtcattattatgcccagatgaacgataattaaaaatgtttctgaaatgatcggccgtagtctatacgttttacaagtcaaaaacaacaannnnnnnnnnnnnnnnnnnnnnnnnnnnnnnnnnnnnnnnnnnnnnnnnnnnnnnnnnnnnnnnnntcgctcactttttttaaaattcaaattagcttattgaaatataatagcgaaacggtgaaaaattggcataaacagaaaacgattttagcggattttgaaaaagcgttaaacgaggcatatagtcagttaagagagctattatcgacttttcgcttaactattgaagaacctaattttaacctgtgcattagaacgtgttttggattcgttacgctcacgaacttcagcaaaaataagtttaaattgtaaattgccttcgcaaacgtttagtgctcagcaacaagtccatgcattacagattgtgcgagaagcggtcattaatgctataaaacattcaaatgcaacccaaattgaagtgattgctgaaactaatcaagatggcgaacaatgtttaattgtacgcgataatggtaatggaatcgtgaatggcattgaaccagatgatcattatgggctgacgattatgaaagaaagagcggcacaattaaaaggcgaatttactattatcaatcgtggtgaggcggtgtacaagtaatggtaacattacccaataccttactttaagcatcattcactttttattattcagtaaagcaattagcaacgtatttgaaattatgttggttatttataatcaaccccatccaagctagcaatcaccgactagcataaaatagtacaaacaaataatgttagcttaccaataacgtaagcgagttgattaagca

SEQ ID NO: 28181 - DNA, 685 bp, Oryza sativa
ttcagcagagtttgccgctaaaggttatcgggtaagcatttttaatgatttcattgactatgcgaatcatacggattatccgcttgactcttttccaaattttaaatacagcgtttcgccacaatggctgaacgcagtaatacaaggtgaacagccagaaacttatcagaataatcaatttatggtgtttgaagtttcatggggcagtttggaaaacgcaaagaattatacacaacacattgtcggcgcttatcactttaatacggattggatcgaaaatgcacccgtttggaatttgtctgatgctaacgtgattgaacagcatctattgcaaaatggcattactaaagataaaacgataattctttattctgataatcaattggcagcctatcgagtgttttgggcattgaaatgggctggtgtagaagatgtacgcgtattgaatggcaatttagcgagttggattgatgcaaattttgctaccgaaacaaaagttaatttaccacaacctgccacaagttttggcgcaacgattccggtgaatccgcagattgatattattacgcctcaacaagtgatggagcgacagcaacaaggtttgaaattaattagcaatcgtgcttggaatgaatatataggcaaagtgagtggttatgattatattcacggcaagggagagcct

SEQ ID NO: 28182 - DNA, 905 bp, Oryza sativa
ccagcgattgttttaatggaaccgaggcattcaataacatagctaactgattaattaattgagtgatttgttcgctttttggtttcctaactaaaataaaattaccttggaatatggatttttgaatagcctttacctaatagcccgtggttctaattcatcgtgacttttggccagagatttacctttttgccgttgattaaaacgattaaaagcccgccaatgaaattcatatattttcagcatcgcctaatactctgttaatttctgctaaggacgtaatatcagcctctaacttatgcttcgcactatgatgtaaactagcaaaatcaaggtaagcggtctctttttcaaagatttttcccgtacggcttaataattgataaatgccaatgcgtcctctatagccctgatagcaagcctgacagcctttaccaaaacattgcgtgcatagcttgcggacaagccgttgtgcaatgactaataataaggcgtttttaagctcatattctttaatacctaattgtaatagccgttcaattgcagagggcgcatcattagtatgtaatgtagaaagcacaagatgccctgtttgtgcagcgcgtaatgcaatttcggcactctccggatcacgaatctcacctaacataataatatcaggatcttggcgcaaaaatgttcgtaatagatggctaaaatctagctgaatcgctcgattaacttgtgtttgaatgattccttcgatctcaatttctattggatcttctgccgttaaaatatgcttatccggttgattcagatgacttaatgcactatacaatgtgatacttttgcaaaagtcggtggggccagtaactaaaattagactttgtggttgatgcaataagtgtaataacgtagttttt

SEQ ID NO: 28183 - DNA, 687 bp, Oryza sativa
ccgttctaccaagattataaacacatatttctacatcggttttatacgctgatgaagcggctaataactcagataacgcagcttttttggtataactattgtaagaaggaatcgcaaccgtggctaaaattgcgataatggcaatcacaatcattaattcaattaaagtaaacgctttttgtagtggcttaatcaaaaataaagatgacattgttctctcctatataatattcaatatcaataaaaaaatagcagagatagtgtgcaatttgtcagcaatttatgcgacttaaaaaggttatttattcgatctatatcgcaaaaataagcgggtaaaagcctgtgtatttagtcagtattttttgttatactttgaaggtctgatcggatttagaaggttaaaatggcaaaggcagcaaaaacggcttatgtatgtaatgattgtggggcggaatattctcgctggatggggcaatgtagagaatgcaaggcgtggaatacaattagtgaaatacgcctaatttcaagcaaagaaatgaataaaaatgaccgctttagtggctatgcaggcgaaacatctggaaaaatccaacgccttgctgatattagtctgcaagaagtgcctcgttttagtagtggttttaatgaattagatcgcgtcctcggcggtggtattggccaggctca

SEQ ID NO: 28184 - DNA, 798 bp, Oryza sativa
aacgctaagtgatacgttacgggaacgcgctattcgaagcacttatcttgaaggtgatatggcgcaaacacaacgtaatcaggcaattacacgcctaaaagagggcggagtgaatgtattagttgcgacggatgtagccgcacgtggcattgatattgatgaagtggattatgtcattaattttgatttgccatatagtgaggatacttatttgcaccgaattgggcggactgctcgtgcgggcaaaaaaggttcagcgatttcattagtggaagcgcacgattataagttactgggtaaaattaagcgttatacacaagaggcattaaaacctagaatagtagaaggtttagaaccacgtacaaaagcgcctaaagatggcgaattaaatagcacttcgaaaaaagcaaaagcacgacttaaaaagcgtaaagaagccaaaaagattgaggctaaaaccaaactaaaagttcggcataaagagagcaaaaacataggtaaacggcgtaaagtggcaacaacaaatgcataaacgcgtttttagcaaaatgttgcgattatttgatcgcttatcttagccaatcgaataggaaaccgtatggatttacacaatattcgcgcagactacactaagcaacaactttcaaaaaaagagtgtgatgcaaatccaatgaagcaatttgagcggtggttaaatgaagcgataatggcaaaggtgaatgaaccgacagctatgaatatggcaaccgttatagatggcaaaccaaccagtcgtatcgtattgctaaaagaagtcga

SEQ ID NO: 28185 - DNA, 1171 bp, Oryza sativa
  unsure (1)..(1171): unsure at all n locations
aatactcattatatccgcgccggtcgttttttaacggatcaaacgattcctttattattcatttcttgttgttggtggctaatcgcatttggcttagtgatcagttatccaaaatcagctagcctttggtctaaatctattacagcaaaatttatttttggcttctgcacgttaatcccattttttattgcaatacttgcattacgattcaacaactacgccttcaatcaatttcaaggcgcgtatttattactttatgtatgcctattagtatggtgtgctgattctggtgcttatttcttcggcagagcatttggaaagcgaaaattagccgctaaagtatcacccagtaagtcttgggagggcgcattgggaggcttaatcacttcttgcgtgatggctttattattcataaaactaacgccaaataatatttttggtcgcgaatttgaaacactcccctttattatagtctcggttgctacagtcgccgtttcaagtttaggtgatttagcagaaagtatgttcaaacggcaagctaacataaaagacantaataatttaattcccagcccatgccgtattttagatcacatttatagtttaactgccaccattccattttttgctaccttattcttttttgtattataggatattatgaccgctattcttgcattcttaattttaatttgtgtacctgtttttgtacacgaatatggtcatttttgggcagcacgtcgttgtggtgtaaaagtccttcgcttctcgattggctttggtaaagttctatttcaaaaggtagataaacaagggactgagtttgttttttccttaattccacttggtggctatgtacaaatgtgggaaggtaatgaatccattaacacggataaaacacaatccctaatgcaaaaatcccgtttacaaagagcatttattatcatagccgggcctatggctaacctattatttgctgttttggcttattttgtagtgtttagttatggtatgccgacactcaaacccgtcatagctgaagtcacgccaaatagtattgccgccgccgctaaattaccgacagaatttgaaataaaacaagttgatgataaacaagttcaagattgggatgaagtcacgcttaccttagttagcttaattggctccaaag

SEQ ID NO: 28186 - DNA, 1005 bp, Oryza sativa
tttatggcgctgatcagtgtcaatttaggtataatgaatttatttccaattctaccgctagatggtggccaattagtcttgattgctacagaagccataaaaggtaaacctatatcaacaaattttcaattacgttttcaacaattaggtgctgtatttgtattggctttaatgatctttaccttacttaatgacgttattcatttttaattatagcggttaatttcgctcattatttacaatcataggatagtttaaatgaaaaaattattactctcttctcttttagttgccaatggcgttattgcggcaccatttgtagtaaaagatattcgcattgatggtgttcaaacagaaactggcaatgcaattattgcatctctaccggttaaagttggtcaaactgcaacagatggagatgttactaatattgtaaaacaactttttagtcaaaaccgttttgagaatgtaagtgctgcacgtgaaggccaaacattagtcattaaagttgctgaacgtcctttgattaacaatttaactattaaaggaaacaatgcaatccctaaaaatgcattagaacaaaacttaaaggcaaatctaattgtggcaggtgaagtatatgataaagcaaaattagaagcgtttaagcaagctttagtagatcattatcacactatgggccgttatcaagcagatattcaaaccattaccactcccaacaataacggcagtataaatgtagaattaaatatcactgaaggcgagattgcctatgtcaaaaaaattaattttgaaggcaataatgcattcagttatgatgaattaattaaagaactagagattaaacctaatgcgccttggtggaatatttttgaaagtagcaaattccaacaacaagaatataacaaagatatagaaatcttacgcgatttctatatggatcacggttatgctaaatttaccttaaaagacaccgatgtgaaatttaatgagaataaaactgaa

SEQ ID NO: 28187 - DNA, 630 bp, Oryza sativa
taattatggaaggaatcatattatttttttattgctatttatgattaggcttggttagaacggtagttaaattttttaagatagtcgaaagcatttttatgaaaaaagcggtctaatttacataattatttgcaaattagaccgcttatattatctaaatactgagcgatattgtggcttagcgcgtttaaattgactcataaagacaattaagaaaaatagcataaataaactaaaggcgacaattaaccattctggcatcccccagcctaacatttgccattgcttttcactacaattgaccgtaccagcagcaaaaatattgggaaaccattcatcaagcggtattgtttgtgggaattgtggtttaaactcacattgattccaaggcgatggattggcttgataatcataatgtttaatagaaagtgataaacctttaaatgcactgaaaccccataatactagcgctagccagcggaatagaaagaaattaggtgcaattaaggcaattaagccagcaattaaaaaaccagtaagtgcaacgcgttcatatatacacataacacgcggaattaggcctaatttatgttggaaataaagaccagttacttcaagggtacaggctaa

SEQ ID NO: 28188 - DNA, 584 bp, Oryza sativa
ctgttattgaacagaaaggattgtcatttattagccaagcattaggcacaaaagcaactgcagcagacggcgtaatattgcaagactatcagaaaatagaaagtattgaagcattacaaaaagaattctcagttaaattttactaatgtatagcaaccagcggtcgtaaatgaaatcaattttacgaccgcaagtaacgatcactaaataaaaaagcctcattctatgaatgaggcttttttattatttaccgagatgagtgaaaaagtttttaacactgtctaaaaaaccggcttgttgcgggcgatgatttgctttaccgtccaaacttatttcaagttggcgtagtaactctttttgttcttcattcaattgaactggagtttccactacaactttacaaattaaatcgccagcatatccaccacgcgggctcacgacgccttttcctcgtacacggaataatttacccgtttgtgtttctgtaggaactctgagtttgagcttaccatctaaagttggcacttcaatttcaccacctaatgcggccatgctaaaactaatcggtacttcacagtagaggt

SEQ ID NO: 28189 - DNA, 767 bp, Oryza sativa
  unsure (1)..(767): unsure at all n locations
attacccaggtgaatggttattagatttaccgttgttatcacaatcattcaaagaatggtcgcaagctcaacaagctgtagatcaaggggagcgcgttaccttagccaaaacgtggttagaagcggtcaataaaattgatttattcgctaaagcggacgaaaatcagttagctgatttaagcgaaatatacaccgcctatttaattaagtgcaaagcagcaggaatgcaatatactcagccggggcgttttgtgctaccggcagaaaatgctaaaggtgcgcctgtttttcaattttttccattattacatttatcagaagcagaatggcaacggctagaaactgctagcgacaatagcacttacaaaatattaaaaaaacgttatcgctattatcaacaaaagattattcaaccattttatgctgactatttttcacaatttgatcggcaagtgattttggcggattgcctaacaccactgaatcacggttatcctgcatttatcgaaatgaaaattaggttacaacagctatttaagcattttcattacggcaatcgttcactttttcaccgcttattctncgccaaaattgataagttattnatttttagccacctaagagcgatcatatttagtagccgatcaagatcgcccaatttagaaaagtttaaatgcgacaatttagtccaagaagggcggtcgttatgctgaatttgacgggattgaaattggctatcaagctatttcggctatccgtgccactga

SEQ ID NO: 28190 - DNA, 558 bp, Oryza sativa
tagtaatcaaggaataatcaatatgtcagtaattttaggatcagatttagtaaaacgtggtatggcacagatgcaaaaaggcggtgttattatggacgttgttaacgcagagcaagcacgcattgcagaggctgcgggggcagtggcagtaatggcattggaacgcgttccttctgatattcgcgcagcgggtggcgtggcacgtatggcaaacccgcgtattgtgaaagaagtcatggaggctgtttcaattccggtaatgcaaaagcaagaattggccatatcactgaagcacgtgtactcgaagcaatgggcgtagattatattgatgaaagtgaagtattgacgcctgcggatgaggaattccatttattgaaaagcgaatatacggtgccttttgtttgtggctgccgtgatttaggcgaagccttacgccgtattggagaaggtgcatcaatgttacgtaccaaaggagacccaggtactggaaatattgttgaagcagttcgccatatgcgcaaagtaaactcacaagtgcgtaaagtggtcaatatgagt

SEQ ID NO: 28191 - DNA, 521 bp, Oryza sativa
cttaagtaatttgagcaatactttaagtaaggttgattttccgccaccattagggccaacgatagtggtaatcgaatttttataaatagtgagattaatattttgtaatgcttgcttttcagcaaaagtgacctcaatattttttagttgtactaaaatttcggatgtttttgacgatcggtctatgggagtaagcggtttaatttgcattttatttagaaaataaggctataataaagtaagttaaaattagctgattttgattgagctgacaagaatgaatttttatgaatttttttagagaatgcttgtcaaagtacttcacaagaaaaatagagtttgttaataggatatattttgcgacatgtagtactagcgagggaacgccgccgtaagaaattacgctataaaataatgttatttttcatcgcgttattatcaattttaatgagtattttccttgtttcaaaaaatgattttttaaataaggattcgttatctgatgtagatcactatcttat

SEQ ID NO: 28192 - DNA, 642 bp, Oryza sativa
tctatagtattaaccaacccgccgctgcgcgtggttatcaaagcgtcttttggaatatttccttatatgataaatattattttgaagctatgtttagccagtttgttttccctgattttgaacgaccaaactggcaaacaaccgcgaaattacaacttttctttatgaaatggtttaaccaagaacggactaaagccattttgacttttcctgttatcacggcagctatgctcacagagcacggccaatgcaaagataatcaatttgctgatcaaatggcagaagaactttcgcaaggtaattcattctttatctaccaatcagataatcctgactctttagcgtcttgctgtcgtttacgcaatgaaatcgcggatcatacattttcctattcgcttggtgcgggcggtgttgctaccggttcaattaacgtaattaccatcaatatgaaccgcttggtgcaagataaacgcgatctggcaaaagaagtggaaaaaattcataaatatcaatacgcttaccgtaaaataatggaagactatttagccgcaggtatgttgccggcgtatgatgcgggttttattacgttagataaacaattcttaacgatcggcataaatggtatggcggaagcggcagaat

SEQ ID NO: 28193 - DNA, 628 bp, Oryza sativa
tgatactctgtacgaagcgctaattctggtgtaattgcatattcaacacctgtgcctaattataaagaaggtttaagtgtgtgtaacttagtttcgtctttaacgtgctgatctttactttgaagatctaaaataaatttataatcattacgcactaatcccataccaactttaccatatacgtctaagttaggcagaatttcatagctcggttttaagcttaaatttgcgccatgtgcagtatgtttaaattgacgatttaagtcgcctttaggcttaggtttatgaatagggggtcttggtcctctaggagtaggaacatctaacgctactttattttggctactgcctttcatttgaccatagtagtcataacctaattcaagcgctaaacccattttattttgattaaaaatttggtaaccaccaaaacaccataggtcaccgaattacggtgaatgccccaggtagtgaactccggattataacgtttatcattttgatatttactatcaaattgattaatatctttatgtgtgcttgcccaacctgcttttgcccctaaataaaaggtattggcatctggtgcagccaatgctgcgcttgtagcagataatacggataatgt

SEQ ID NO: 28194 - DNA, 919 bp, Oryza sativa
ccacgtaataaatcatagttataaccattttgtagatctaataaggttaattctgtttcaaatttaactttttctgctgaagaaaggttggtattacctagtgcagcgttaatcatctgtcgccgagttgcattatctgctaaggctaattgtgctttatcaggcacggcattttgtgctactaaattaccattgatagtggttaattcggtctgaatcatttctaattcagtttctaaactcgttaatgctttttgtaaacgccaatcgaacttttttccaacatatcaactgttggcacaattacattttttagtttttcaatattcgcttggctaatgcctaatgcaacgctcgcgcctttaatctctttcgttaaatcttcattatcatttttttgttgagcaattttctctaacaaactgcgcgtttcttctaagtgtttcaccagtgcattattgctatcgttcttatctagcttttttgcatcattaatttgcatttcaatcgctttatagcttggtaattcagccgcaagtagcacactactacatacaaataaattcagcccaaataagatgacatttcgcatcagtttcataattaattttgccctaataatttagttaatgctgtttgcacttgttgtctagcaattttaatgttgccctgttagtcataatcttgaatatttaacagataatacgcgatccacaacttaaatttttctaatttatcggttaaccaagcggtcagctttgtaacattttcagtaaaatcaccattattaaattgaataatcgcaaccggtcgctggccaaattcactatcttctttgggaaaaacaaatacttgttgcacccaactggattgataaatcagctgttctatttcttctggctgaatattttccccacct

SEQ ID NO: 28195 - DNA, 569 bp, Oryza sativa
cggggagccgttacgtgaatttggctgggtagtacatacgcataaatcacgctcaacacaagcagcgcgaaataactattccgaacgcttgcttggctgtatatgtttaagcattactctgtgcatgattttgcggagtttttagagcttaacggtatgccaattcgcattggtaaatatggtgcaggtgcgacaaaagatgaaaaaaatacattaaaacgtgcactcgcgaaattgggcataacgctgcagggattatgcccgaatctatgagtattgagttgcataatgcagcaaatggggtggccgcgggaaataacccatttttacagatgatagattggtgtgagaagtcaattgctcgcttgattctagggcaaactttaacctcgggtgcagatggcaaaacctcaaccaatgcgttaggcaatgtgcataatgaagtccgccgtgatttgttagtctcagatgttaaacaacttgggcaaacatttacgcaacagattattttgccgtatttgttgattaatttcccaagcatcgatccgacacgtattccaacctttgag

SEQ ID NO: 28196 - DNA, 9182 bp, Oryza sativa
cccatatgggatcatatcatatttgaaggcagttagtgctgctgttctttggattttttgtttgatcttacaaccaagcttagctgctttaatttcttactgatgtgggagtttttcaaatgcagctacgtgtttctcagtgtttctgtccagtgttatgcttagataccctctcttgctcctctttcatatgcatggtcttgcatgcctttaatggtactcctttcgtccaaaaaaaaagcaatctaagaggggatgtgatccctcgtagataatgaatttagatggaggtttgtctagattcatcattgtactaggagggataggatggagggagtagtggttagctcttaactattaatatatggtctacgtctttttcacagattttcttgattcctgtgtcttagccggttgtaagctagcttaccacccgcttcccctctctctcctctcttatccaactcagcattcagccatcttaggccattcccaacccaagaaactagatatagttctcataaacttcatgtcatcaagaaactagttctagatgaaactagttctagatgttctttttcaatacaaacactactattctatacttaaatttaatgctacttatctcacatgatatcttagatgtgtagaaattatgtctcatgcaaacacatggtttccttctctttcctcatttattcatttgccacatcatttttcattctaggtgacagtttatttaataatatggatattattctagttattgggttgggaatggcctggtagccttctattagtacctgcttactcctagccttctattactactccctcaaaaaaagataaaccctaggtttccgtgtccaacgtttgaacatccgtcttatttgaaaaaaaatgaaaaaaattaaaaagacaagtcacgcataaagtattaatcatgttttatcatctaacaacaatgaaaaatactaattataaaaaaaattcatgtaagacggagagtctaacgttggatacggaaaccagatttgtctttttttagacggagggagtacttgcttactcctagctttgctttgcagcagctagcaggagtaatgcattgcagtggcaacaatgtgcctctcctctctgattgaggaaaactagacttgctggtgtggcaatggcaggtctctgtgtgtgactggtaggagttctgcatgcttctacatgaccagagctctaggctagcaggtttgccctgaggaagaaagagaaaaagggttgcatttgaccactatacatgtccatttccatgctgctctttacacatcaaatcaaaggcatggctgtaaaagcttgcaaagatcacacacacactacactgccagtgccttgcattggatgttctcttgcatggacagccatttgttcatggggtaataggctgctctctcttctctttgtgatctctcatcagtcatcaccaggtattactcagctagccaacaggaaactggactactggagtactacgcactgtcacactcctttgtcaattgtcagatttgctgcagcttctcatgtacccctactgtagtacttgtacagtactccccttattttaagtgtatggctgtgtccaacgcttgaccacttatcttatttaaaaaatttatatattttttaaaattaattcacatataaagtattatttatattttattatctaataataataaaaatagtaataataaaaaaaattaaataagatggatggtccacaactcacgcttattatgggcgagggagtacagtagtatagctgagttctgacctttgaacaatggccgtgcggctcttccttcaagtcggaaaaaaaatccggtattttctttgatatgcagctgcattaatacctttgtgatgcctacctcttgtataaaaatttcctcttttacgatattgacatggttttaaaaacaatgttgatactaattcctactttatccgtcccattttgagcgtaaccacgagttttaattccttgttcaatttttgattgtctatttcttttcaaattcttttatcattagtatttttgttgtttttagttgataaaacatgaataatactttatgcgtgactttttttttaacttttttcaaaaaaaaataaatttaaataagacggacgataaaagttggacatggaactcatggttgcgtttaaaaatgagacggaaggggtattgataaaagatataaaacactcatttttttgttaaaacaccttttttacgatattgacatgggtcctaaaatgattccttctacaaatactattcagtgctattaatgaatagtattttttttgacaaagaaagttttttcttcaaatatatatatggctttgtgtatttttagttggtgcacaggtaggaagttatacttgttttgttaatttttttagagtgctaagtttttgcttaaaacatgtcgaaaagaatcaacaatatgttttggttatttttttgtgactggagggagagagtatggaatgaatggctgcattcagggcattgatcttgtttcattttcacgccgattgtttttgccaattgtgtggggactggggatctagaaagtattattatggttgagttgtcccctcgaacttactgtattttgacgttgataatcttgtgttaaatattgtatcatactcactccatttcattttaagtgcagctgtaggtttctatatataacatttaaccattcatcgtatttaaaaaaattataaaattttctaaaagtaagtcatatataaagtactatttatattttatcatctaacaacaacaaaaatactaatcataaaataattaaataagaccgatgatcaaacatttaacatagaaatccatatctacacaaaaaggaaaaaaaatactagttactgtgaataacaccgaggtcttctataaaaggccttaattaagaaacactgaagtaaaggtacaaaacaccacaagttagatctttgatttgaaaatatcagcatacgaaaatataccaggagttctgagttaaaagaaatattccttttgatcgtcgttctgtcacttgcccgaaaagaaaaggagaaatattcttctcgatcccaaatgaaaataatttttagtattttttagcttatttgaaaattttaagttgttttggtatatattacttttcttcattatttatttcttatttactcttaaagaaaatgcggaatctcttacaaatatttgactcatctattctagtatgaatggagggcaacaaagtcatttcagccatctttaaaattcagcttcggccgagtttagttccaaacttttttaacaaactttcaatttttccatcacattaaaactttcctacatatataaacttccaacttttccgtcacattgtttcaattacaaccaaactttcaattttggcgtgaactaaacacaccctgcatctagaacaacttatatttggattaaaaaaagagtatatatattgtacttgtatcataaacgtgtaattgtactttacccaaaatattacaacatatataaaatttcttcaggaattgatacatttgattattagggcactagttgaattacagaagttaattagtttaattctttagggtgataataaagctctcaattaacaactttggataccatcctggttgctttagttagtagatcaacgaactctttatttagattttgttgatgctacatttctgtcgtttttccgttttaattatatggcagtttcgtggtatatagtatggtgggtgtgactttggaaattgtacgcttgtttcttttcgctgtcattttccttcgtggagcttttgccagctaaatgctgatactgtcagtgtcgatcatacagtgcctctctcactgtatccatacacatctaattaataactcatctaaaaatagtactacatcttatcttattttatatcaagcatatttacccggttttttattttttaaaaaagtacctctcccacattctctttttttttcctgcgaaactgagatgtactatactacgatgcttgatttgagtacatattatatatttgaattcatacatatgcttgatttgacactttattcgataaattcgggtaataattaagcaagttctagtcatgcctagtgcaggaaaaccccctttgttctgcaaatacaatatttgagaaaatatatatgcatgttctgttgtcaatcgctcattgctcgtcgggtagctatatatagatatttacttcctagaaaaaaatgttgctcacaaaaaaaaaaaaccctactccatagcggaccgagcagtattctgcatatatgcacattctgcctcagatataatatgagtgaattgagcacttaatttgtaatcgctcatgatcattatgcttattcaattcagactgtcgttatcggtgactaacaaagtaattaacaatacaaaatattgagctacctaaagaaaacaaactaaccatgaattggcaagaacaaacaagtaataattacttaaccatgaattggcaagaatcaaactaacaatgaattggcagatatatatctagggaagtcaactataaccgaccccagcttataatatgtacgtgtgtgcactgcgtatttactcaaaatctacgtgcacacgttcagtgtgtacatatatatatatacagtatatatagttaattagcgtcggtatatatagacaaagaacagtggtgaacgttatttcatgacgaaggttttccgtacatttctcattgaattatatacgggcaagaaggaacatgcatgcatagttaattgattaattaggtttgttgatgatatggtccagctacgaacaatctaatgaatactttggtttcggtcgtcactactagtagttagtaaatgggataaaatcgatttgatctccaggccaattgggtatttttgacaccattcaattttcaatattgttagactaatttagggtggttaaatgctccctccgtccctaaatataagagattttggttggatgtgacgtattctagtactgtgaatctagataggagcatgtccaaattcgtagtattaggatacatcccatttacccaaaatcccttatattttgggacggagggagtagatgtctatacagcagtccattaaaaaaattatattttaaaactaggtcattggaacccatatatataccagtgacaacttgttaattatctttttcctccacctctcttctaaatctctcatcccttgccttttctcttctacctcctttgtgagctaagggaggtcctaatgacaacaaacttagactgttctcagctgcctatgccacgatatatccatcgaagcatccacaaatggaggaggacgtggcaataacatatagcgagctagcaacaacgacggtggtgaaggagcccaatccctagtttctagagagttgtattcattatcgcgtcacctggcctccccacccctagcacacctctgtctcaacttcttcaagatctacctactcgaatgtagcaatgccttactcttagctaggtggccatgcaagagggggaatctcgtcgtcgaaggcatgagcttgggctcgctgtcggctgcgcgttagatttacagtggaggtgttgatcgaaaagaagggattcggtgagagaaaggaggatggaagaggggagaacatagtagaaaaagccggaccagccagcgaaccatccgaacgtctaggtcacgggtcgagcggttggaccgctaggtcaaccggttcaagtgcaggtgaaaaaccgttatttactccatatattcctttcaaacactatatatgtgttgctctattggctagcaaagtttgcgatctcccagagacccacgtttgagtcccatgcgcactagattgagtgctatttttgcctgttgggctgcaaattgctggtttgggccttgatttggcccatccttttgtgttagccgtttgggcatgccggtttttttcccctccggtctttttgcgtgaacatactggccacatcgttggttccagtttttccccgttgaaccgccggtccggtctggttttttgcacaggggggagaaggaagctaagcagtattgcaagagttgcggccctagatttggttgtggactcattgtcatctttgcctctgtcaacagttagtgccaccacctcctcgagctctgtcgtctctagctacctccaccgagtatcgtcttctcctcgagcttgtgtcctcccttagcactgtcttctcctcatgctttgctttaccaagtttaatctccaccgtctcacccgctatgttcggcgatcgagctttgcttccatattgcccccaccgagcgtgcaagagagtattagggggaggaggggcagagagcagggtgtgcggtggataggtgggtcctatatatagagagagagagatgcggaggaatgagagagatgataggtgggtcctatatgtttttaaacttttaatgttgattgggttgtcacgtttggtgccacatagcaatggtgatcaaataagcgcgataaaaaggttgaagctatcaaatatagaggtgttttttaaacaaagagaagagtagtgaatactttctccatcccaaagaaatatagttctatgttatttagcataaattaagatatggaagaaaaaacaactctagtgctcccaatattcatgtgtgtatgcttactggtgtactccctccgtcccaaaaaaaaaggcaaaccctgggtatccgtgtccaactttgactgtccgtcttatatgaaatttttttataattcgtatttttattgttgttagatgataaaacatgattaatattttatgcgtgatttgtctttttattttttttcataattttttaaaataagacggacggttaaacgttgggcacagaaaccagggtttgtttttttttttgacggagggagtacgtaattaagtgtcaagtgagtcattgtcgaatcgtaacaccctgccaaaaaaaacaatataaaaatttgaaatttgtgtcagtgctaaactcaagctagaaatatcaatattttttggtattaggcgtctgagcgaatgagacgcgtttaaaagctgcacccaccttcgagtctacctcccatataatttcccaccgcgacaattttgaggagacattaaagtattttgtattgcagttaatgaatctttccaaatgttacatatgacgttgttcggatgtttcaataagtattttattttgcttaatttgtcattttgatggtccaatcgttttctctcatatcagggtcctagaaatgtagtagtacacacaaagaaaatatctgcatacactagttcagtgaagcatcgatcgaattaatcctcgtctcgttctctgatttctccgtccgtctttcaaatcgccggtgccaattaatcacaccgccgcgcgtccactccataaccactctcagtttcaggtggtgaagcagaaagcgtagttctccctccgtcaaaaaaaatctcatatccagattcatccataatatatcgttctcattctcatgttcagatttatctttaggatttaattctttttcgacagagtaagtaagaaattgtgacgcgcccccacaataattaggaagaaaagaaaagaaagaaagctactgggtatagagcgagtgggctgtggttgccttgttccttgggcttgccggccgaccatgcaagcaagcagtagtgtactagtgcagcggcaggctcttggccttggcccaaacggcgatcagcatcagcaagctaggccttaatttagtcctacctctctaaccaacagagaattaacggcagcagcttataaggtggattgcctggagactacctaaaattgcaggttaatcactcatgttacagtgtagtgcattttcactagccattggtcactggctgcagcgtcgaccgctatccgccagcgaaaatattgcattttcattggctttggccgctggctgcagcgtcaaccattgaagaaaacttaaaatgtccgacaggaaaaaaatttttaatagtgacagcatcactaccaacattttaaacattttaagtagcatagatacgtatctagaaagtcctaacgttcatgaaacagttttcttgggttaagatcctagccagtttcttcatttcagattttagctttcttctttttcttgtagtctactacatcggtcccaaaaagaattaatctacgatagaatatgacctaggcaaagtaaaaaaaacggaccagagatcgacccgctggccgtcggttcaccgatcaaaccgccggtttttatttattaatagtatatttgatttgcattattttaaatatagaatcatcacaaattggtgaaaatatgcataaataaactagtatatatattattatatggtcacaacgtcaaaagaaataaatgtagtgtggtaacataataaattcataatgccatactactaggacaaattaaaaactggttcgattattaaaaaatcacaaccagttcaccggttctcataaaaactgcccgattcaccgttcttttacctattcgattgcaggggccgtctttttgttgaaccgagccgccaaggttgccggttccggttttttccgattcaaccgtcgatctggtccgttttttttactatgatcctaggacaaccaatccgggtgtcacatcctagttgattcattttggacggagtgagtacatttaatacatataagaatttaatttgaaacatggtattggcaaccattttctgtatcttcgttaatttgctaatcaataaagatccatctttttttcctcgagagaaaaaaaaagatgaaatcgctatctgtccagttggtaatcacctgtaacaaaatttatatcacgcttccagatggccaccctataatatagcgtctggtacttctacaatatatatcaacggcctcccaaaatatatagctcgtttaataatccatgtctaaaattacaatcttggccactataaagacccgactattatacgctgaa

SEQ ID NO: 28197 - DNA, 4140 bp, Oryza sativa
caatgactcgatgtcatcatgttaattatcatcgcagttgagttacaaacctttcaccatgttaattatcatcattgtaagtcgcaggcacgtctgctgtgctgccgtgcgtggtggcaaaacaccttcaaattaaaactgaacacgagagagattatcttctaaattggctttcatatttttaagaataggatcgttctattaaatggcacattctccagactcttaaaacagtactctctctgtttaaaaaaaaattaaactagaaatagatggaactatctagaacaacgaatcaggtcagtcgatccgtttctaagttattttttctgagacggagggagtacgtgtgattaagtaaaaaacttaattttatatatgaatttcttatcaaactgttttaaatccattataaattttataatactctctccgtttcataatgtaagactttctagcattatccacattcatataaatattaatgaatctaaatatatatgtctgtatataaaaatccaaatcctacgcatgcttatgtctggaaacagagagagtatatatatttttgtttactagttttgtgccttacgtattaatcttgtttcattgttttctgcttttcgtgatagatagtaatttttaatctattgttatatggtaattagaccataagttttacatgacatgtagctaaagatgaatgtataaacacccacgaatgtgtcgtcccaacaaacactgaatggacaaaggctgaggatattagttgcatgtttgtgtacaatttgtatgaacaaatcaatattcatttactagtggaacatcatgtgcgtaaaatatggataccaaaatttaatcccttgaggtaaaaccatacacctcaaacaaaactctagtttaagctcgaaggtctcttggccggatagaaatgtgaaaaacaaaattgcaatcctgattaagagtactcttcaccgctctagtacttcttaagccgaagcgctgttctggttttacatttcagatgacgagaagaagacctcccatttaaaggacctgcagtcacttggccccttgaagatctttcgtgtcgacttgaacgaagaaggaagcttcgatgaggccatcaccggctgcgtcttcgtcttcctcgtcgctgcaccggtggtcgtcgactcagaaaatcttgaggtaattgaatattgatcgattcattacacaaaattaacatagatattagttttaacttaacttccagtaacaccactattttgttgctaacggttgatagtcaaatttagtagaaagctaaatttgggctaagttcagaaagctatgaaagccttcccgcaggggctggtctgactgagcacctagctgtctgactgacccttaggaacaggtctgaccgatggcgcgccctactgttatttgaccgaagaaatttggctgatctaaccagcaatcctaagtctaagttaattttgattccatattatgcttctttgcttgggaccggggtttgtttttattatagtcgtaatatacctctaaacctaatagaaatgaagagactttgtttcatgctaataaactatcaatcgatcatgaactgttcttttcctttaccctttacctaggagtagtttaataacataaatattcattagttcgcatggtaagacgtccatgctcgttccgagtgtgaaacccacggtaggtttttatatatatcgtcgccaagatcagaagctacatcgttgtttgatcataaagaggtgtcagcaccaactctgcatatatatatttcctgcatgctgcattttcttaattaagttttttttattattttttccatcaggaggacattactgaaaccaacgtccgaggcactttgaacgtgatggggtcctgcgtgagagcgagggcgacggtgaagcgcgtggtcctgacatcgtcggtcgccgccgtgctccacgacggcaggacgacgatgcaaggcggcgacgatgggcatgtggtggtggacgagtcgtcatggtccgacctcgactacctcgctaccctgcccaaccacccatctgcaaattgggtatgtatgcatatactttctcgtctctgaatattttacgctgttgactttttaaaacatatttaaccgttcatcttatttaaaaaatttaagtaattattaattcttttcatattgtttgattcattgttaaatataattttatgtatatatatagttttacatatttcacaaaagtttttaaataagatgaacggttaaacatgtttaaaaaaagtcaacggcatcaaatatgtagggacggagggagtatatcggaaaatttatgccgctcctctatttgttttgatcgatggaagtatgatttatgatttgatatgtaccaactaagggctcatttgaaacaaaggattctcggagaaattcaatcctatggataccccctaaggataaccatacttactttttgaatttgtagtttcaaccgaaaataattatattgatttgcagaaaaatcttgtaccgtattggaatgtggaattgaactgatgatctatgtgaaaaatcagtctctctttctctcttggctgaagtgctgcatggggaggtaattgcgtgcatatatgctttgtttgagatacaggctaaggcgtacgggccaggaaaggtgcggtcggagaaggaggcaagcagggtggcgcgggagaacggcatcagcctcgtcaccgtgctccccgtcatcgtcgtcggcaccgcgccggcgaccagggggttcaactccagctccctcgtcctcagcttgctcgccggtgagcgctcgcgcgctcgatcgatcgccggccgccgtgtcgtctcgtccatggcttttgcaattctcacctgtgactgtgaaaggtaattcggttcattgatcaggccatgaggcgacgacggagatgctgaaggccacccaggatctcgccggcggcacgacgccgctggtccacctccgcgacgtctgccgcgcgcaggtgttcctcgccgagaagggcgaggcggcggcggcggcgggaggaagatacctctgctgcggcgccaacaccaccgtggcgcggctcgccggcttcctcgccgggaagttcccgcagtacaatgtgaaaaccgatgggtacgtgccttagctttctccatcccaaaatataaaaaaaatagttaaacggaacacattacttgacagtttttaaattgatttggggcatgggttgtaattaaatgtttgtttctgtgtataaatttatctaccacttatagaatcatcaagacaaaaggacacgtttatgactaattttttgttaataatactgctaacataaatatttttgttactataatactttctccgtattttaatgtatgacgtcgttgactttttaaccaacgtttgaccactcgtcttattcaaaattttatgtaaatataaaaatagttatgtcatgcttaaagaacatttgatgataaatcaagtcataataaaataaattataattatataattttttaaataagacaaaaggtcaaacgtttgtcaaaaaaaatcaatggcgtcatacattaaaatacggaatataatttttttttggataatgagctttctttaattcggtctttatatctacgaatgatattcacggctacgtgagcgtacgtagtatatgaacaaaactttttgtacgaacatttagtcgtaaacaagacaaaacgtttacgacaatacatgttttgatgatgaagaatacattagtcgtaaaaaatacacgtttacgacaaaaacgtatgtcttgatttaataagctgctaaaaatacacgtttacgacacatatactgctaacaaaacgttttctatgacacaatatacgtatgaaaaaaaattgttcataattatcttttagtttgttttaattttctacagattatcatagcgtagtatattactctctgcgtctcataaaaaatcaaactagcattggatgtggcatatcccagtaatacgaatttaaacataggtatatcatttcctagtacaagtatatgccacgttcggtactatgttggttttttatgagatgga

SEQ ID NO: 28198 - DNA, 14599 bp, Oryza sativa
agtcagttgatgctcatcaaccaaccagaacgtttctgcatgataagtcattttacccttctaaaactttagtttgagataactctggcatgaagtccaatcactctacttaaacataaaagggatccttttaaatgaagaggtcttcataacaataaaaaaattgaaggccatctaaattgatagaagctggccggccgttgaaaaatcaggcccaaaggcagatcaccatccgtgtgatctcccccagtgatgtatacccacctcgtttttgacataatacaacacaactttcctcccagatacacaatgcatggaacatgtacagtgacgacgaaatacaaaagaattacagtgaccaccactaacctatctatcctctgaacaaatctgaacagtatggtgccgcaactcaaacctgtatgaagtagaaaaaaagatccaaagaagctgtggaggcataaaccaacactgactaaagatgaaccgccatggactttcagttggtcttgtataaacgtcctgttctcacaatggcgggggggcaaccgtgaaggataaatcatgtggccgcaaagcaccttgaactatgtcttgcacagttttgttccttctacaaacttctgagatttctgcaaatctatctgttatggaaccaagactagatcctgatgatgcatcagatataatattcaagaatcttgaacgttctgaatctgtcaaggcttgtggtggtataagggtaatacattcccttgcccaactcaacatgttcccaccaaatgatctgctaagggacaccagaacatacgagacctgcaaaattccaagtagaagatgaaaattcatcctcgcatcaaacataaggtggagtcaggatctagatttctagcatttcctgtaacattttaaagggaagacggtttcttaaggcctttcttgggaagatctctattttacaagcacaatcaaaattcttacaaatcagtgaattaacaaaactgtcaaatactgttcgtacaatcaaaagcaagaacctggagaagacaattggaactaaaaaaaaggcaggctatgagtacgaacagtttgtgccaatttagccaacacctgttgcttcaggccatagtaggtgcgtgggacacaaacaaggtcttgaaaagctttggaaaatgcagttggaagcatttgaacaaatagcacttccagtcactctattcataaaaaggactgaactgatcgcacagagctgtaggggatggaataataggctaggcagagctcattgaacagtgattgaattcaagaacacatccatacaaatacaataaagtgtaaaccatcggaatatatttcaacatctagttcaagtgttgaccacaatttgagcatatatagtgaggtgacatcagctgtttgataagagatgccacctagtattttttttcattattcctgttttatggatgcaatatgcatcttgtgcacctaaatttcaaattacacacaaaattgcttcctacaatcttgtcaacacagcttgaaacgaggatacaacagcagatttgccctcaaacatcccacattgtagttcaatgttattaaaaaatagcatcagtttattaaaaataatcggtgaaaacagtggtaagtgggaattctccaatgatttaacttttatttgggatgccagtagattatcatgacatggatgttttgtagtattccagagcatttgagatgaaatattatgggataatagttggaaaaacaatttacctaaatttagtctgattgtcaagcagaacagtagacattaaataacgttttcatgtcaatgaagatgagcagagagtaatccaacagaaaattgaaccttaacgcaacagactatgaaatcctcaaaaaggaacttgatgattctgaagaccaaattaggtagcgctcttttccgcttatccaccaaattattgccgcaaattatttgctccatgcttattaaaatatggtttctaaaaaaaaactttattttactgtattgcttagagcactcgttctaagctatttgttaggtttttaatatataatatttaatttatctgtcagttttcatccgcatttcatcactttagaacagtgagaatttggattatttttccccaaaaaaagggataaaagaacatgttttccaaggctttttaaaagtgaatgcttcattcttcttatcaattattattttaattggtgacacagaactctaatattgggtttgttagttcatatttttttcaagcatgaaatttcagtaagcagcacaataagaaataggaaacaccatataacacacaatcatattgtgtacctcttccaagcgactagatggcagagctcctgttaaggaagcaaccattattctagtaagtactgcaccccgctgaagtataactgtatttattaattctcggtacttttccccctcaggtgattttgcaagatcaaatacatcagatagaaaagataatatagacttgcatgcctccctgttacataacacaagaaaaagaaagacaataaattagccatcacaaaaccgcattaaagaattgagcacagaatataaagctcatgtatagtgcatttctctctgacgagtcaggtagactattcgaggcactacctgtgctgtatagttataccaaccattgcacagtcaaccaatcttggaaacatctctgtaggtacaaataaatctggacagtaacgaatacatcttgatgctagcaggaagcaatcatcagctatatccggtctagctgtaaaatcctgcaaacatagataacgcaattcagtaattacttgtcatgttgttgatcataatttgaatatttgaatttcccagattaaaaaaagaagaagaagagaacagaacctgaatagtccgaaggagctgtattgtatggccaaaaagtgcctgaatcagacttgcaagatagtttgcacatgctggatcggacccaaatatctaataaaaaatattgtcagaaaatcaaagatacaacaaaaaatgcattgataagatctttcaacatatataaccttaataacttcactcgacaagtaaaggaagcaagcctgattgtgttgctgatacagagtttggatttcttcaagcattgcaccaatggtgaatcccatgaacctcccgcatgtccttaccttcatcaccagagcaaaaactcattattgatttattatggaagtttaatcattcataattgcacgatgctcaactgataccaacagacagacactccctctgtattttaatgtatgacactattgactttttgaccaacgtttgaccattcgttttattcaatttttttgtgaaaatatgaaaatatttatgttatgcttaaagaacatttgatgataaatcaagtcataataaaataaataataattacataaattttttgaataagacgaatggtcaaacgttggacgaaaagtcaacggcgtcaaacattaaaatatggaggtagtaataatttataaggcatttaggcaactaacatgggcactctctattatagtgaagtacagagtggaggaaaaatacttaacatgaaatttagcatttgctacttttggaaagtgtgcgcgcactgctgtcgaactaatcctagaatttagccaaaccacccttatgcacttgtgacagtatttgtattccatcagagtgtacattgtattaaaaaaaacttccagacctaaataaaataaaatggtaaactcacagcaaatttgcaagaacgacatagtgactccatggtccgtgtatcccatgcccgtctgcagaagtagcaatacaacagaaacggatgaaacatttcctgaatataataccaaaagtaacttccccatatctgttttgttgaaatactcactgatcaaaaatacttttcaatgttggccaatatctattgacagcgtcagcaactacttgtggaagtttcacattgctgcaaaaaatcagagaatttagtaaataaagaacaaatttctgtggaaaaatatataagtgggagataaccacctaaaaatgcatgataatcggtctatatgcaaggttaattgccgaacaggaacttgctgaagcactgtatctccttgctggattatttcctattatatcggtatatactatattagcattgataaaaatcgaaatcatcaaatgactgtaaaagatcaatactaacctgcaagggattaattactggttggcagattaactccaatgctctttgagcatggtctggtgggagagtcgtgataaccacactgatgagtgcaagaacatgtaaggtgagattttgaacaaaaccaaaacaaaggtagcaacaaatgactaaagcactggtgggaacaaacgaaccttaaggcttcaaccaaatgcaatgagtcctctgaagaaactttgtaaccaccaactccacttaatgcaatttggtaaatctggaaaaggccatccaacgaaccagagaactttctcctacagtctgtcatagacaaggagacaatttaggtacagagttagttgtaacaaggcaattttatgttaagattcaaccagcaaggaaatagacgaatatctcatggacactacagtacatcacaactacaaatgttaaactacaaggactaacaaggccacacaaaccatttcagttacaggaaatagctcaagaatatcaaaattttgaaaaaaaatatatgaacacaaataacagagattctgttaaggtatgggaatactcaagtcataccttcacatatatacttgaatgccacagaagcagctgcagctgtttcctctgatgtactcatacccttgttgagaatatcaaccagaggtggtagtatcaacagttcagatggtgcggcttcaatccattttgaaaatgctccaacgagtgaacaaactgcagtttcaagtacatttgagctccaatcatcgtcataactcataacaaggctagggaagaaccaattggcatttcagaccgcaaacttcaatagaataactaccatccacaacaaagggaaaacatatgaagacacaaacgaatctgaaactattgggaaacataatatttggtttagggcaagtacaacaatgccaaaataaaattatcataaatcctggtatctaggaacaaacagccctaacttgtcagaactctaaatctcaaccagtgtcaatgagctactgtcttacagtgaaacctgaatcccagtcacagtataaaattcaaagcagtgagctgcaaacaaggacttatgagttatgaactttcaattaaactgaaacatacctgtttgcagcaactgttcttgatgaggaaagctgggaagcagtgacatgaccttcaaataacagcaacacatttcatgaccagcatccagtataaagctatggtggtaaatttacgcactaagcacagtagaaagtaaccacacagcgatcttaaccatcagttaaatagcaaatgatgcataagtaaaaacattaaaatacacccaaaatgatatacatacctgtggtagtatttcattctcttcaactgagactgacttagcaatggcttgtatacagaacagcgcagcctcgacaggctgccatttttggttctgtccatttccacatgcctgagatataaaagtccaatcttttattatagattactaaatataaatcttttacaggattaggaagccaggaaagtaatagtcaagtatcagatatagcagaggttaaaagccatagcaaaaaagcaagctgagacaccacactacaacaaaacctgttagctgagtatgcagtgacgcgacaccataatgcatggcaaatttgttgaattatttcagttattgaattattggctacaaactagtgtagcttaattagcacatgaccatatattagaaggccataaaagatcccaacggactcgttaaccaatgaaagactcacagcagacaagctgatctctccctccctccaaccaacgttctcctggcttccccccgtccattgtttgtatggttaggcagcaaccatgacgacagcaaccaagtgccacatcgtataatcaacagtaatgcaatgaatatagagactgtttggtaaccatgttaaaagaatcaccacgccatggacacaacaacagcatcaacctttagtcccaagcaagatggtggttaagatgagaccctagtcagaccacacaaaccaaatgggaaaggaactaaaataaatagaagtaggactagcgctagcacatggattgctagaaaggaactaaggtgtgtaattatgcataagataagaagccagcaaatggatggacaaaacttgtgatggtaacaatttaaagcacctagttcaataagatttgcataagtaactgaagtcccacaagatattcatcatgcataactgaaaatttagactaacaggatgaagtacacatccatgtcatttgcattgttcagagctttaggagtctgaaatgagattttctgcaattagtgtgttcaaacaaaagaacttttttgaaaaaaaaagtaggtaattattaaatagaaggaagatgtagaagtataggaaaaatttgcacgaagaatttgcataatttattcatcaattaacttagatcccaggtttcctccagaatatccgcaaacgaacacatgcaaactctgacaaacaacattgaatcactaagcacatttctcaaaaagagattctcatgccaggatttcagaacagttaaacatgcctaaacaaccagtaactaaaattccacattttgtgaggaaggttattttggaaccgtagataaatttaaagcaagaacaggtcaaaagctaagttcacctgaatcagcttcgtgaaaagtattttcagcgtcggatcacctccaagaacatcagttgcgtcaagtaatacatcactaaccgctgaagaaaaatggatccaattacttgacaagttgtatgaaaaggccaacattgcaagagcaactgggttaaaagaaacactgtaccataccatatctggaatgtctgaaatccctttggtcttcctccgaaaaggtgtggtagagctcaggatattcaactcggaaacttacctgattcagttagcatgacaagtttatttttacacgacacatcatacagaggacagttatactaataaacctcaccctctcaaaaacataccagagaaacaagaatttcaaaaggttgacgaaatagctgcaatcttctattcctctcagtgttgattgagacctcagatccatatgatgcgtacgaacccctaagatgtgtaagcattgaatgggttgtttcttgtgaaaaacaagttatcatttagtaaagtggtacctatcggtcaggttacgcataagatgatgccagaaattaaatgtcatggaggaaatgtcaaattctgaatgagaagtaacttccagtaatgcattcactatctgcatggcatcatcagaacctgtagaaagataaaaaaataaacacaataccctcatacttaaatgatcacaataaactttgttcaaacatgaatctcaggatatacaacagtaagcatcatccatgaagctttacctgctgcaatcaactcaacataagaatcacccatgtctgccaacaaacgggcaatagcttttacatcttcttcatcctagtaatgtagaaatgaattactatagacagtaaagtaatgaaaaatatatttatcacattctcatggcacaaaaagttaaaaggaacaatataatgatacaaagggcaacaaaaaattgtgaaagtgatacataggaaataaaactttctcaaaaaaatcaacataaagtctactacgagcaaatttgataggtccaactagccaactagggaaatgccaaacataatattatacattgttcaatgtcgtttcagaaaacttttgaatttgtgtcccataatactaagtgacatttcaaagagaaaacaaaagaaagatgaagttcaatcacaagtgaaatcaaatatatgtggcaacaatcaactagtgtagcgtgtgtttcaaaatttagattctccttaaactcattgggttatttgaaaggctcagcaccctcattagttcgcaacttttaattgttatctaaatcaaattatatggccagaggataatgagcacaaacaggtgacaaatgtcaccataattatcgcaaagtttctgctttgcacaaattcgaaggttcattttaaaagatggtttgttgtgggttgcttggaataaaaaatcaacaaaaccattataggataaaagaataatttaggtaacatgaaggcaacaaaaataatcactattgaatcctgtaaatcaaaatagagttattcacattttactgctttgctaatgtattgtatcacccaaaccattgaaatatatgaacaagagaagtttcgcaaatagagaaatcagatgttcatgtaaaattggtaggaaatttcaaaccttcgatgaatctttgagttgctccttaagacccataacataaggaatgagaacttgaatcagtggaagctgttcggtgatgccattagattctcgagataccgtaaaatgtatcaattcggaagtaactgtcagtttaaataaaatgaattagtgagcttccaacaaaaacatgggtgtaaaaacagttatcttgaacgtaactacctgcgaccaattacagtgagtatagaataccagaggtcctttaaactagcttaattgattcaataagccatcctttttcagcttcttagcttataagcccaaaatttcatttcaatataagtgatgagcttaaaaaattgcttggaagaagtttgacaccataaggataacagttcaaagatttctaccactagaaagcatatttctaccactagaaagcaacgacaaggttacattacctaaccatgctcagctttcatctgatctctaatagaactctatgaatcaaatcatttagaaaacaccaaattaactatgcctaccgttgccgataggatgctttattgaagataaacagcagcacagtagcatgccaacccagatcttggcagcaacgacgtatgtcagtagcaacagagtatgagctctggattgatgacagccaatgcagaagccacaaacttgacgacaggaagcaaaagcagtgaagacacacttgccactttaaatcctgaattcttcaatgcgccgtgagatatcacagcgagagagagagaggaggacgcacagggcatggaaggcctaatggagaaactgaaagagctggattttcggcagatcgcttttccaaaagaagatagcttcagcttcagaatctgacttaaagctggaaaagatccatcttttgaccaagcttgttgatcattgaaattagcacagaagccacagctcaagctctatctattacatacacactcagttgttcttcgcaacctccatgatgagcagtgctagacgagggtggggtagatccacaaatctatccttaatgagtgcgcagaggtggcattgcagatcataaaggacaagaagagggcggtgctaaagcagtccgcaaggttgtgctctgcaacagcatgcgatgacaaggagaacatggaccctcaggccagtatggcagccccccgtatggattggtgctgcatcaaagacagtgcacatcaaaccccaactgtcaccacctccctccaaacaacattactgccacctatagctgggttgacacttatgtcaccgccattggcctcatcgccatagcgcctaagcatgcactaacaccaacccatttacactaccctctagaagtctgcaccaggatttgatctttttattagaccttgttcagaactacattgaaattttggaaactcttgttgaagcctaataaagcctctcgcattgtctatggtcaacacctggaaactgcactttgtttttatagaacctattgaagcatgaaacatgaacactaacatgtcaaaacctgaaatctggtacgctttttgtactgtgctgtgaaagctccctttttatgagttataccagagttaattgctggttaacatccaaatgtgagtatacaatattccttattcctgaacttaaactatctacgaatttgacatcagaattgtcaagaattacacaacatcactgcaaattggcctgcatagactcaattctgcagcaagtgaacagaaacaaaatctaaaaatgttactgagatcaacataactatcgtaacaataatgtactaaaaactgatcaattgaaaagaacatgaagagaaagtgatgataaactaacggatgatgggtaagtaaaatacaatgaaattttgatcatatacactcagtaccatttacagctgcctccaaaaattggtcagagttcaacgaagaaagtgccgtatagaccaaaggaagcgaagcaagattagatgcggagattctggcagaaagaataactcagtaaattcctgaggccaatactgccatgaagcagatgtttaatatttactaagaatagaaaatgttcaatgtactacaaaagctacattataaaggaatagagtgctattagattaaagtccaataagcatacccatgacaaaaacgaagccaagaagcaaaaccctccagaacctgaaaaggaacaatcaggttagctacagataaacctcacataaattgatttatgtttacagattgcagattttatgcatttttgggttgagatcaagcatattaaagcatgcctgaatgtgatattgctgtctggaaaggctgaatgtttctcaccatctaagtatattaaagtggaatatgaaattgacatgaaacataaaatagcaccattctcatataccaagataatgagaatagcacattataaaccagccctccagtcaaacctttctattagcctaggatgtcatctgtcataatataaccaatgaaatgtggtaatagatgcttcacaggagatgagttatgaataactttgcagtgaataaactgcctgttatctctgaagagatcctaacatgcaagcttaaaatatttatcctaacatgcaaacttaaaatattttctttgccacttaagctcctaaggtgccaatgaaaaacaatcttgaagagaaggaaattgacctgttctttcagttgatcaatacccaagcaagcagtcaatagactaagtgcaacttcggctgatgaacgaaggtcattctcaaactgtcggcgcctttcaggacgagctgctattttatgactagaacattcctgaaaggacatcattgaagaaaaatgaagaatatgctatagaaatctgagtagctggcagtgtcctaaaaattggctctaggaaccaggtagccgcagcaatttggcatttgatggtgcattatgcagctgctctgcattgggggatctagttttgcaatataaatggtgaacagtctttcttttatgtcatatatgctcgctaactgcttcaaagtccctagccaagttggtcctgggacctaggtgcgccttggcggcagcaactagacgctcctaccgttaggcaccggcctcactgaccctctaatgtctagcgcctacttgaaccatggtagctggtgtacataactctaaattcaagcatgatcatatatgcacatggcaaaattacaagcataatagtacttatgtgatttaaaatagatatctggctacaggttcataatatttagaaaatatgtcaaaagtcattaatgtgattcatcaaaagtctaacttattattcagaaatagcatcaatcagcatgtacaatctactattactaaaatatctctcttttttttggaaatggcaaaaggacaataaaaaaatgaattgttttacttcaactcattttcttttactcaagacaataaccacaaaaatggtactactttggtgcttcctgtgcacaaaatataatagcacacattttacaaggcattgagatcatatttcagctttctttaacgcaaatccttcagtgtcagaaggattcatggtacttctatatgagttaaccaaactacaggacagacttgaagtaaaactgttcactcctatataggattataaagataggatgaactcagcgacatggaaacaatagggtatatgataggagtccatatgaggctagacatgtatgtacctgtggcaaaacagttagcagctcaaggaagcttgggataaagtcttgttgagagttcatttcatcacttagccaattcacaatcccaccacctccccagtcctctacaggtacatgcaccgcaagagcagccattgcaatgcaaatctgaagatggcacaaaaggtagtttgccattataactgtgaaatacaaaattgattgcttaattacaagctatatactcaaataaatgtggtcttagaatgtgtgcaatcaaactttgatatatttttttttgctactaatatacacgaccgtattaagatttttttgctactaatatttttttttgctactaatatgattatatttttagtatgctgtgagtatataattacaaaaggtataagtcaaaattgtgtactggtgattgtatcaatatcctaaatgacaagtacaaaggaatggaggtagtatagattacctgtgttctaactttttgtggccctttactaaattttttcagcaatgcctgcagatacatcacagttaaatgaaacaaaacaagatcttcacaagattatccaaatcttactagtaaaggtaaacaaatccatcactgaacatgacatgacataactttgaaaaattggttttattttattttgagcaagtgaaataacgcctattatcaaacagaaatggcagccaaatagaagactgattctacttgatacaacatttagttgaactgattataatatgctaataagaaaagaaaaacaagaacttcaaaaactggtgcttacatatagagaatcttgtagcggacggaaagcttctgaaggtaattcttcaaagtccctttgtacctggtattgggataatttaaaagataacaggaagaattagaccaatttcagagttttttaaataattagaagagaagcagtgatacatatcaatttatttaccttgcttctgagggtttgagagcagaagatttgagtctccatattactactttcatcatgaagtaagctgtcagctacctgcaaattaaaaatagaaaaatatatttggatgtcatcaagttaactagcatccataaatttactaaaagaacagcatccgcaaacacaaacaagatgtcactgtaacagggggaaacagggatctgccaaacactgaagagaagagagttttaaaggggggcctctaaatttactaggagtacacagttacgcactacacctacagtaaaacagttaaataaggaatatgataaaatttaataacacaaaattaaaaaggtgagtgggagcataaaaattctaaggaattctcttcgagtcacaaatatacacatccatgcgccgaaaatctatatgctgatttcatcatcctccatgtttcacttcggcagccagtccataagcttgtgtagccacattggtaagccacacatcatagcacaacccaatggtgagaactgagaacgaacctaagtttgcatcaaacactagcaagctttaactcatccaacttgcataaaagtccacgatgctgaactcgatttcccagcaaatatgccacgatctacgctcagtatccaaaataaaatctagtttgaaaggtacttcatgattcaacatactaataaagctgctgattaagctctaaccctaagttcaccagactgttaatgcatcaaccgtagcctcaaacgtaggaaccaaatacaatgtgcaatcagtcacctaaccagcggaacagaagtccgctccaacaaatatcagatcgcaatgccccctcccaccccccaacacacacacaacaagggccagagaacgccccctccacaacaaccccgctgcggaatcagcacgaccgcagccaaaatctcatcaggaccaacacaactaacgaaccccaaacaggtgcgagatcgagacgattcggctcgaggaaggggaagggggaaggggcccagacctgccacgcgtcgagcgtgtgctggaactgctgcagccaccggtcggcggcggtgcgcgtggcgtcgtcggggtggtggtacagcgccgccagcgccttcttcaccggcgacgtggcctgcgcctccatatgtcccccccacacgcgcggcgcggggagccccttcttccacacccacacacactagcaccaccaccagaaccctaccctcgccgccgccgccgatgcgatctccggcgagttcgctggatctgccggcgggtgggggtgggggtgggg

SEQ ID NO: 28199 - DNA, 7151 bp, Oryza sativa
ctccttaagtagtttatatatggctcacctacttatgggtatttacacaattttttcatatcactaccactcgatctaattgccctattaatttacttcacctttatttatttatacacttctatcacaaactaccataccttttactaaagcctacatattttctgaatttaactgaactctaacacatgcaaatcattaatattaatccattgtactacttctgctagaagtagagctcgtccctgtacacgcagttgctaccaccttggcgccatgctggttccatctctatgatctctcccatgccatgctcctcaaaccccatcccaagtgccatcgtggcatcgttgttgccaccctggcatgttccaaagtgggcccccaccgccatgtcgtcaccagttggccgatgttctaggaagctgtattgcagcatcgtcaggttaagcagtgcgctgctactaccggagttgtcgttgttgctgcagtggacaccgctaccactgatcatttggtccccaccaccttgcatgagtaccattaatggtggcaccgccgctgaccggtggtcgaacctgtccaccactgtcggatcgggcgatgagccaaggagaggtgccatcgtcgtcggcgaggaggggtcagtagagccatcggtggcaccgggaatgaaaaggtcgctgccactgcttccgccaccctcggcttctattgtcgatggcttcttcttgtcaaacaccctacatagcacccaatcctcctgcttgacacaaaagaatacatagaccatgattaattattatgtgaatctgagcacaccaaattaagtagtagtgcttagctattgaaaaatatttctacgagaaaggtaatatagagctaaggcacacaccttaggttgggagttaggtgtttcaaggcggaactcatgcatgacccatgtcgtcttttgcccattaggggcacggccgaggtaaaaaaccagcgtcttcctcatcccgaccaccgctcgtgttgtaccctcatggacaatccggtccttccccgtggccttccagtaacctgtcttggtcgcacggttcgtccgtgaccctgtcgcatatttccggtctctgaagctgaagaagtaccactcctctgcagtgagcttagccacctctgaaaaaagttaacaaaataaaaactaattaagctctcatatgcatccaatcatcagctaattaataaccatttagtgctatgttacacccttcattaaagcatcaaagttaataataatatacattagagatactaattaactgttgtatctgtacctacactgtagagctaggtacgtgagatcatgagagagggattggatacgcttgcacgtgaagtgttacagcggtcactgttactggcaaacagtgacgtttttataattctctgagtggccctagctagctagaagtggacatataaacaggtcgttattggtctctagcttgcgagacttggagtcttgtgacttgtgagctagctagccaaggaaccatcacgaaattattgccgctaattttatgattgcttgcaagctataatagctagctgatgatcatctcgtgcacattctgtatctatctatctacacctatagctatatgcttgtgctccaaggaaccccaaatgattaactaattatcaaacaattatcaaggcaccaacactgtatctctcttgtgtacagtgaaatttcgcacccgatctcaattcattgtaaaaaaaaaaatacaatacttctgactatgtgtctggacaaagtaggtttgtagggtaaggttaccgggaagctcccatggctcgcgggcgtgaaggtcgacgtcgacgagggtgccggaggcgacgcggtggttggcgaccttgttgcggaggtagaagcagatgagctcctcgtcgctggggcagaatctgaaccccggcggcagcgtcgactccatctccctcagcccggccatcgatctcttcgatctcaaccccaacaaaatcaactaatcaaactcactaatgatcactcgatcttttactctcctagctaaagctagctaagtaacaatagcttggagaagacgagacgcagctagctagagatatagctaaatatgatctcttcttcttcttgggaggcgaagcaatggaggggcttatatagaggggagagggggctagctagcacgggggtttgttaattagttagataattaagattttgggatgatttgggggtgaggggatagaattagattgaaatggtctctgtcgaggacgacgacggcgtcgccatctggcccaaaagatgctcgcctgatgagctgagctgagctagctatatcatatcgatgatcagctgagctatcacgcttgtgggatttgtcagaggctgctgctgctgctgctggtggctagcttagcttgagcttagctgcacgcacaggcccactcctcacaagggatcgatcgatcgatctaattatatacattgcgtttatctgctaggaaaaatagagagaaatgtcccgggatcttccggctaactccacaaggtaacgggctagccggtctgggtttgaagtctcacccattatatttatttgatattagatcattttctaatattcgtgttttttctaggaaaaataaatgtctaaattatttctgcaaccagcagagatcataatatatatgccttttccctaataataataataaatatgctttagtttctcttttcatgcaccaaaaacaagacataccacgttaattgtttttaattcttagatggttaattgtttttttattcttagatggttaatttatgacacaaactggctatttcctttccatttttcctctcacgaatctctaggcagataattttaattttctatatggtctatgataaccaaccaaattaaggtccaattaaatttttcataaaccacatcatttaatttcaattatttctaatcttttggccaactgatcgaagtttgcacattgtgcaaaataattaaagtaagttacgtcatctaacaacacaagctccatcttatacacacctactaccattactatatttcagcattaacccacggggtattactaatataattacgtagcgatcaaaacatactattatccaaacctgctaaatgtaagcgggaaactaatagattttgtctatagcaatatatatattcgatttcgaggacggacgctagctataaatgaagggagaagagactagaaagtgacgagacttcaggagacgtggaagcttgtcacaccaaatgatgattaaaaccaaatccgatatatatatgtacatacgtatgtgtgtatactttctcaaattttagggtcgttacgtgtgtgacaatgttacatggcacgtgaggactttgtcacgggccgggcaaattttgggagaagctataacggcctgtttagttggcaatttttttttatcttgcatgttacatcggatatacggacacacgtttaaagtattaaacatagtctaataacaaaataaattatagatttcgccagtaaactgcgggacgaatttattaagcctaattaattggttattagcaaatgtttactgtagcaccacattgtcaaatcatggtgcaactaggcttaaaagattcgtctcacaatttcgaggcgaactgtgtaattggtttttttagctacatttaatactctatgtatgtgtccaaatattcgatgtgatatcgtgaaaaaaattgtttgggaactaaacatgccctaagtgatgagcagtttaccaattagcatatagaaagaagactaaaaccccacatctccgtcgtcttctgccaagtgtgtaaatatgcctgaccatatatgctagatagcttcacccttgataccttcttccttgcatgctggctggtcaccttaatttgtgctcgatcccctggtggcactacatgtagtccctccgttccagaataatatagtaacaacttttcgtgaccattctaaaatataaaaactctcaccgatatctcatttttttttaaaaaaatcgggctgtttgagatctcactggggaagcaatcaaccattagtgatatgaaggttgatctctaagttcacaaactatgaaccaatacattcacatcactgcaactatttatacgaaccgtgagcttgagacaacaatttcttatatatagtacagtatatattatgtgaaagcaatataaaataaatatttttatacactaaacatacttatatagtttgatgaacgtggtcaaaatctacgtgaacttgaaattttaaaaagctagctacataagtaaaaaaaaagagatttaatatcatattttttttcttggagcatgtcctaattcatcaatacatgatcatgagcggagacaggagtaggatagttatggcaggagccctacatactcagcttaaatacccattgaaaaattacaattcaaaacttattttaaaaaatataggctaaattattgaaattacaatagtccatggacaaattcgatctggttccgcctctaagcacatgttagctgttttaaattaatgcgaaaacatacgaagacacaattgagctttgcatatgctccttaataatcctcatgcccctatagtactactgtctgcattgccaattgacagtcatgcttacatacctggctagctttgttcaatataaagaagttttgctagctgcaaaactatacttaacctaacctagctaactcaataacttaatttgttctatgttgtctatatatatatgccctagtttttctattttttggatggttaattatagcttctttcaaacaacaaacaacaaaatcttactcacgtgacaatgatattgccataacagctgactagctagttcccattaagcaacacacaaaacactatagcaaacttccacatgatctcaggttgttggactcttgtcagctttggtacgatttttaagcttctaagcgacacggctatgcaaaacaaaacacgaaaaaaagaaggaagaaactaattaaaaacgtctcacaaactaagatcatcttaattaatcaacaattagctagaatcacacacacatatttatatatattgcacatacgaatacacactacacacacaaacataagaagccaatagtacgtgtgctcgataatcacgagacatgcatatatgcagtgctccagtagttaacaacacgtcgcgattgcgattagcaataaagagggtgattaggacgggattaattagaaaagggaaggggaatctcgtcgatcagattgcgctctacgtctgtccaaatccatgcccatcaggcaaaggtcctgtgtcgatcgatcaagcagctagctgctgcctagctgatcgatcgatcgattttttagcgcgttaattaattgcaatttcttctccttaattactctggatggcgacattgcaagagattagctaatgctacactcagctagctgttaatgcaattgattagtagctcttgcaaatgcatgctgctgttggatttatgtgtggttaatatcgtaatcgtgtgtgtgttcctgtcaagtgcatccatggattaccattaaattaaggggcactttggaacatacatgaaaactacatactctcatgcgttattaatttggcaggaattatatatgcatacggtttcgtgcgtacgtagctttatttgaaccaatattttacttctccaggattttttggagtccattacttaaatataagcatgtatatatatatatatatatatatatatatatatatatactgtatattcgagttgtactgtatttatatgtcgaatttgctatatatttgttgataaattttcctccaaaaatttgtcaaatgtaattacaatacaatcgtagtgtaattacactgtaactataatgtaacttgtatgtaacttttaagaatctctcggtaacatgttatttcagtaaaatagaggtcgtgggaacaaatcctttcatatatgtgtgtgctgtgatttttttcctcaccagaacaaatcttgtaatagatctaacgattcaaaattacgtgaaacttacgtacaagttacactgtagttacatgcaagttacagtgtaattacatacaagttatagtgtaattacactacgattgtactataattatatctgttaaatttttagtagaaaatttatcgataaatatataggtggtctctttatatgtatactcccttttccttacccagaaactagacacgtgaatgcgctagatgctccctcctcttattccatgcattgcgtctatttgtgcatgtttgccatgagactctggagaaggtgcgtgtgaggtgactctgttagggtgagtttgaatttaccatttcatctattgtttttcacgtgcatgttttctaaattagtaaactatatttttttgcaaaaaaatccatagaaaagttactttcatattattattttttaatttttagctaatatttgattaatcatgtgttaattcatcgtgctccagtttgcatgcatggaggattaattagtttccaatccacaataacgaacacaaccctaataaccctactaattagtgcttggagcagatcattgaattcattttggtgcttgtatgtacaattaataccggtgtaacagagtcagtagggggtttcttgtagtgacctcactgtcaatacccaaatttagcttctaaagtaagaaataggtaaccatagataaatttggaatgaacttagatttgtcacgcaaggccagtctgatcgaaaccattgggccggtcaaaccggtgtcatgtggctggtcagaccggtggtgttcgactccaagtccgatttgtcggttctcgggtttccttgttaaagcttaagattttaaagtcttaattggtttctacacctaattagacgtgaaaaaaacctaggaaataagtttacccttcctataaatataatggggctaaggccgactgaaaaaaacaatcaatcatcaaaattaacttatttagccaaaccctctatattctac

SEQ ID NO: 28200 - DNA, 20822 bp, Oryza sativa
atttcatgcgagttttgctccgtttttgatggatttcatgcgagtttgctcccttttttgatgggattcgatcggttcggcgacggagccggaggtggtggggtggggagttttggggtacgagtgtttttcaaactcgctgaatttcgtcgaattcggatctagtgcatacatgttaattaaggtgttgttcagattggtatcatttcaaaacatactattttttaagcaagattgtcaaagatatatacatttagttatttaccaaacttttataaatacataaggaatcttaccaaaacttcgcaatattaatgtcaacttatcaaaatttagatattactaatatttggtaataaggtttattatttcggctataatctaaacactacttagtaacagtgatatggataagattatggcgtactgtagcagaatactgtagaagaaaatcagtcattagatcacaaaaacgcatggctgtggttgtgcagaagttgttgtatattgtgaacataatagcagcgacgaagttcgttctcaatagcatctggccgactggatctcaattcggttttggggtggttgtttggtatcttactgtagcatgatgtttcgtatatggtgtttggaaaatgatacacgtacacaattttgttatccatcgacatcttcaaaaactgatgtgccacactgtgcattgaattttgattttgttttcataactgtccactagttatgtccaacagttgagatctttgttactaagctcacggtttagtaaagatttttctaatactataaaagcggagtagttctttctttccacccctctctcaccagtgcacgcgggttggctaatcaccagatctaatgtttgtcgattactcttctagcccatatatgatacaccctagttatatgggcatgtcatgttacaacatatgtgcatgcttctacttaacctttgatggcattttcaaccatatcattttcagcaaagttgccaaaaaaaatgtctacgtttaatttgttgccaaatttggtaaatgcataagaaattctgctaattttttggtaatattaccaaatttggtaaggtttattttgactacaatctgaataggccataagtaatccagttatcacacggttaccagctatttctttgccaatattgtaagtagcaattttgaggtatccatgatatataataacacaaatgttcgttcaatagttttgaaacaaccggtttacaaagtcggctatcaaatttaaaccttaggcaagaatattttgctttcatcggaatgagttgtgctccctagcttgtttgtaaaacactagagagcctactactactactacctgttggtgataataagcactgtagttgatgtgctccctcttgcttgggtcacgttagatttccatatgtttccggtttcttttttggctaggaattgattttggggaaaaaaatcctgaaagctacttgttatatttgtaggttttatagatacatgaaagaaaatgttttggcttatctagaaattggaaatactactgtcggggctcctttttaaatgtagaaatttcgcaagaaattgtccattttcaacttctgtgctaaaagaactcttggtagtagtcatgagtgtaacctataattatccccttcatatgtttttaactgaaaaatcatcatatagatcaaattttatgtatttcaaacaggtttgttcacaggtcaaacttttcactggcaccatgaactaagcggaggtagaagcacacaattattgtgaaaactactgtcaattattaacatgtcgctgtcctactatatatgtcaagtaacaactgtttgttccctaccttaaatatttctacatatagtatactccttctaaattaatactccaacataaacatacccaaaagtagtgcctaattgtggcgcagatatgtgcatgcatacgatggtcttgttttatccatctgatgattggtcacctagatttctctcccgtgaacatgtacacactgtggctgtgtgcgtgccggtagttttggggtcacatttagttctttgggttccttgggagtaaagttttttaagtatacgaacacacatttaaagtattaaacgtagactaataataaaataaattacagatttcacctgtaaactgcgagatgaatttattaagtctaattaatctgttattagcaaatatttattgtaatatcatattgtcaaattatgatgtaattaggctcaaaagattagtctggcgatttaaatgcaaactgtgcaattggttttttttcattcatatttaatacaccatgcatatctccaaacatttgatgtgacagaaaagttgaaagcttgaagaaaaaaattttgaatcaaaaacacggccagttgattttggacgacaaacacacaagcgctagctttcatctatcgatcgtcagggggcgcagcaaaaccccacagccagagtgtttcttcgcttgtgcactccgggagttgggttcagtgtgagcgacactgttgctgctttgactgcaggacgacgagagctaagctagctagggccggggagcacgggtgagatgaatgaaatgaagaggaggagagcgagcttggattgggcgggccaatggcgctcggggcaagttgcgcttacggcggccaggcgtacaggagatttgctgtgctgctacagggcacttctgcggggattgttctccatcggtagctggcaacgtacactgcccaattaacaatagccaactgcccaattaaaatactttggtaataaagtaagtgaaaataataataattctaaatttttttaataaaacgagtgatcaaacagtgcaaccaaaatgttaaaatcccttatattatgggacggagggagtagtatcttaattcactaagataatacacattccgttacacaatttaaactgcattcatgggttttttatccaatattattgttcgtcttatttaaatatttttttatgattagtattattatttttattagatgataaaacataagataaataatgcttgacttaaataagatgcacagttaaatattagaaaaaaaccaacaaatacacgtaaaataaaatggatggagtactacataaggtatatgaggctagctccattttgaaacacgggaaaaccacataaagtttgaaggatttaaatactactactctcctataagacaattttcactgagaccctttggataaaggattacagtaggtacctataatttctttgaaatttctatggatagatatttcattgcaattttagaggatttgtagcataaactccaaacctccttcaaaattttcctttcttcctagctacctctcaaattcttcaaatgacgtgttttgcccgtgttcaattcaaatggttcttatgctgttttcctatgatctttgttgcttaaagattcaaggtgtgaagacagtctctaaggtctccttggggagcaataattttgtaaaggaatttaacgaattgaaatcctatgagaaaatgtcctttgagccctgtggattttatgaatggatttcgaaatttggattgaacgcacacatgcataccatatctgtatgagcatctcagaaagacttgtccagtaagtcttgacattgatgaagtcatcatggatatctgccactaaaaaaaataattagccataaatacgggtacccgtgttaagtctagaacttgaatctatgtggacttatttcactataaagagcctaaccaattaaattaagttacattcactttgcttaaggacatataattacacatactgccctcttcccatcaaatattttaaaaacttctatttttataaagtagtaggtcatacttttatctttaaggacttacttcttccatttcatattataagactttctaatattgcccacattcatatatatgttaatgaatctagacatatatacgtgtatagattcattagcatccatatgaatatggataatgctagaaagtcttataatatgaaacagagggagtatatggtaaccaacgaaacatctccttaaattattttagaaagcaagttttagtaaaattggtttgtcttgaaacttataagctcaaaccaacaagttatagtatccgtaacaatgccttcggtagtgtacggtgatagcacctttaaaaaatcttagtgctagtattattattcttttccaattttggatttttggtttccgtttgcacgctccataagttcctaaatagtgtgtttcctaaaatacttattttaaagcaactttttaattttgtagtaatttatttatttgtttgtgtccttaaacatatactactcccgtctaaaaaaatccaatgattggattttttttttctttaccaagggggtagctatcaaaaatcagataattcatctgtccattaatttcagctatctcatagggttattatatatacttcttctatccataaattaaatataagcatttaaagtgttttaaaattatctataaatatacaacctgctatacgtacgactcacgtcctactgtctcacgtctaccaatcactgagcttgttatcgtgtgggccagacaagcaacacctacttcctccgtccctaaaaccaacctagtactaaatgtgaccctaggactatgaatctagatacacatatatccagatttatcatattagaatatgtcatatctgattctagattcgttttttctggatagagggagtatgcatttagtacatgcatacggaatactaggttgtaggagttgtacataaagattggacgcataggagtatatcatttctcattcttatttttttcattttaacccgatcactctttcaccccaaccattctcactaaagtttttcacctcatccttaatctctttaaaataaacccgaaactagaaatactcatatatatatatatatatatatatatatatatatatcgggtggagggaggagaaatagtattatcttatttataaatatatactagttttttaatgtcctgtcagttagggcctgtttggcacagctccaccccttctagagctggagctcagccaaacagtttcagtaccaccaaaactgagagtggagttgggtggagctatctcacatctcacaaaatgtcctagagttgtggagctgggtttaggcagctccacaactccactccagactcaattcctggagcaatatttaggagttagagctgtaccaaacagaccattagacaatcggtcttgctctatatgattcagctagtgaagtcttttataatttgttttctctcaggaatacttcgtctttgttaattagcgcagttagtgaattacacatcactcattttgcaaaagtaagaaaaaagaattacacagcatatatcactcgcaattttctccatcttagtcagtcattaatattttgacagaattattggtcgatgatatgacgcaagttggtactatactccggccggctgctagggttttccggttactggccaactccaagccgccatggcggcccccgccatgagagatcgacagtgacagctagctagctggagctagcacgccggcaacggtggcccccgccggcgacagatgcatccgccgttccaggacgccgtacgtctcgatcgatcgatctcactccggcggccggtgacgaagacgaagggccggttcaagttgaaccaaactgattactactattacactgaaaactgacgcacacgtgatatggatccggccacgaagaaattaatcgcgttacaaacggacaaattttcctacattgataattaagtactagtacgtacagggttgtttatttagttgcgctgttagtttaatttgctgcttaattattaattaatcgtcacacgtggctgttcctcttgtctcttgtgacgactgatctactactagcaacgtagctagcgaagccattcccaattcaaaatactagaacatagacggtgtttcctgaaattggagagaagtttagaaaaagttaatagtttagaaaaaaagttaggagtttatgtgagtagaaaagttttggatgtgatgtgatgtgatggaaagttggaagtttgggggaagtttggtgtgaactaacataccatagttttcataaactttacatcataaaaaaaaactatcactagatactactctttcaatgcaaacaccacttttttatatttaaatttaataatactacttatctcacatgatatgtagaaactatgtctcatacaagacctagttttcttctcttttctcatttattcatttgtcacatcatctttcatcggtagcagcttatttaatgctatggtcactattctagtcattgggttgggaatgagggtgtgttcagttcacgtcaaaattggaggtttgattgaaattgaagtaatgtgatggaaaagttagaagtttgtgtgtgtaagctgagtttccaaactttatcttccaacttttaactttttcaacttttccatcacatcgttctaatttcaacaaacttctaattttaacgtaaaactaaatatacctaaagttttgatgtgatagaaaagttaaaaattcaatgaaaaagttggaactaaaccaggcctgacctgatatgacttgatttgcaggcgctcctgacctgatgcaacgtacctgctccaattaaatgcaaacagtgttcgtacttcgtactactacgatcccatcagctggtaggagtaccggcccgttgtttgcaatactcccctccgaacaaaataacttatactatttttttcctcaaaatatagcaacttgaaattaaataggacaaatcctaatcaaataaatatggctaagagagtgtgtagattcgttaaactatcggccgtcatctttccgcttatgcttattaagtcaaaatttaaactttcgactttaaaattagagttgatgtaggggagttttcatcgaaatttatttttcagcatttacttttatgtcgctaaaaatacatatataaaatttttattcacaaattaattttttgtttgcaaatatatcgtttcgcttatttgctgaataagcgaaacgatggagccatatgatatatcccatccaatactagattgttatattttgggacgaaggtaataactttttttacagagagagtatgttattgtgtatttccctcgtttcataaaaacaaacctacataatgtaacacatcctttacatcatagtgctatgaatttagataataatttattcacatttataatattatgatgtgcgacatcttatatcatttattttttatgggacgaagggagtgtgctaaattaaatacaacatgtctcaaaacatatctatatagcgtttgatttatgcacggagtatataaagtgaagtggtggatggttgaaatttgttgagatgagaagttttttttttgtcgaccagacggtgtgataattcattgtatagagtaggaaaaaaattacagagcagacaagaaagaaagaaagaaatgataaagatagctgctacttctatagttctatgtactccccccgtcccataaaaaaaccaacctagtaccgaatgtgcacaatctagtcctacgaatctggacatacatctgtctaaatttataggatgtactaggacgtgtcacattcggtcttaaattcattttttatggaacgggggagtacctcggagcccgaaattaaatactgatttaaaaatgtttttactaatatttgtgtactaatttggaacttacgtttggaaaaataagcgataaatttgtccctcgatcgactctcaaggttattgctaaaaaaaaattttggtactagtaaacctatacaccaatattccagtacttcggaagctaatctttatattgctgacttggaaaatagtagtagtatgattcatcagaatctagctgcatccgactgcatgtagcagtaatatatattttcttcatgtaataatataatttttctcatggattatcttgaaatgggacaaaggaatgtttcctactgttcctttctaagttggcgcgttccatttgacttcacgctgcatatacgctctttctcgaggacaaccagttgaatagtagtaatactcctgtcatgaaattgtactcttgattaaactaatccagtatattaaccatgttaaccactgctagttaaataaatcaagagacgtcagacgaataacagtaacaagcagtacagacgcaagcaatctctctccccatttcaagttccaacgccagctagctgtagaaattctatgcatatgctgtgggcctatttggtttccatggacttatttcaagtccctaagttcctatcacatcggatgtttagacactaatttagattattaaatatatactaattacaaaacctatttcataaccttggactaattcgcgagacgaatcttttgagtctaattacgccatgattttgacaatgtgatgctacagtaaacttttgataattatagattaattaggtttaaaaaattcgtctcgcggattagctctcatttataaaattagtttttttactagtctatgtttaatactttaaattagcgtccaaacacccgatgtgacatgggctaaaaagttttaggcccatataaacaccccctgtattctctccagtggtaaaaagaaggggaacgagatatcgccgtccaaattaaattgcatttgttttggccatatatgcaaattaggccctgtttagatagaactagagtttttaagtccctatcacatcggatgtttgaaaattaattataaatattaaacgtagactattaataaaacccatccataatcttggactaattcgcgagacgaatctattgagcctaattaatctatgattagactatatgatgctacagtaaacattctctaattatggattaattaggcttaaaaaatttgtcttgcaaattagctttcatttatgtaattagttttgtaagtagtctatatttaatactctaaattaatgtctaaatatagagactaaaattaagtccctggatctaaacaccaccttatagttggaagtaacaaaaactacgagtaaaattcttacagtactataaacggacttaggttacgttggagagtgttggagaggaggagaaagaagctgattggaaaatacgaaatatgaggttagccactagtatataattaattgattatttaattatcttaaaggtaaaaatgattaatatgatttttaaaataactatttatagaaatatttttgaaaaaaaatatatggtttagcagtttaggatgtgaagtgcgcgaaaaacgaaggacatatttctcgccattgtgcttcaaatggacacgctcttagtgtagctcggcccgttactagtttccgcttgtggagaaacctgtcaatccgaatttaagttataggcttagtacatgtgcttgtatttatgattattttttttttctagacaacgaacatgttgataacaaggtaataattttgatgactcatcgaaaacaatatgttagcctagtcattaaagttgattgtgaaggtagttgtgaaggttttcaagtaccgagtttgatttgtgaagttgagaacctttccctcctagatgtaaaacgaaatagctctttagcacataattaattaaatattagctaaaaaacttgaaaactaaattagtatgattttttaaaaaaacaaaccatttaatagctcgaaaagcgtgcacgtaaaaagttgaaggtgaggttaggaaaagtcatccccgaactctacctaatttttttcttcagcaataataaaaattgcagattttagcaactaacaaataccactttattcataaggataacatcacagttcacatatcactttgtctcatactttgagacaatttccaggtaatttttcaaaaattttctgaccgattcggcttcctgacaatgggtagtggccttgttgtatctgtttcagttttcgacaaaaaaagtttcaaatttgttttcgcttccgaaaattttcaaacaatgctttccgtttcttacaagaaaacatagatatttttatagttccaaatttgtcttaccaccttcgtcccaaaataaattcatttttcacccattccacacgtagcaatacaaaatcaaaaaagactaaaatacccctactttatcaaatcacaatataattattcctcattttatcttctctcaatacaactaatccctactttcacaaattgcaatgcaatggttgctctaaaaatgaacttattttaagacaaacgaaaggagctaaaaattaatttaatatgagacggagaaagtatatatctatttctctacctacttactcacctcacccaattgtaattttccatcattcaattccatctcctttggctcccatcttttgccctccaactaataagccgttaacaaatttgatttttaaaacttgattttgatggtcttttttttaatcaaagtttatatttcccctttggcttttaaatcactaagaacacatataaagttttatccataaattactcttattgttaataaattgtacggcttataatcaatcttaggcgaatcgataacacaacccttcatcaatcctctaaaattatttatatttagagacaagtgagtactctttctttctgtttcataaaaaaaacaacttttagccgggaacccaaaaattagttttgcaggggacaaggggagtactccctttgtaaaaaaaaatatcaacctcgcactataatgtgatatattttactacaaagaatctgatatagtatgttgagattcattatattaggatatatcgtatcctagtgcgaggttggttttttaggaagcggtagattttaagatggcatgagtgccgcgtcttttctatcttgttcgttcaatagtctgacaactctactaaaacactgttctttctaagttcatggaggtatggaatattcgcattacacttataaaaaatgatttactaaaaaatttctataaattaataatgtaaaattatttagataacgtacttttcacctactatttgctaatattataatctataaattttaatcaatccagcacacaggctcaaaatcagtaaccaataaccattaacacgaatcacctcatcgcacgtttaacatcagatcgcattgaaaaattaccatttggaggaatacataatttcacaccagaattgcacatcaaccagccacgaaaaggactctttgtgagcttgaggaaagggaagtgtgccgactctttgggctccttggctccacacacccacgtgagatcgatggggacctttgcacagatttttcctcgccggagaggtagctatctcctcctcctgtttcttccaaattcatcttccacgacattgccaaccaaagttcaatgaacatgcatggacgatgtcaccgtgcagatacagtgctctccttttcgtggatgtatacaaaagcagatcaccgttatgatatatctgcgtcttcgtgtcgcgacgacacttcccaagacataatatctgagccttataaattttcggaggaaatagtttttgtcctcatggatagggaacatttcataggcatatcacatcggatcaaataattaggaggtgcatatagacatatggacaacatattcatttaattaaggaggaggatattttgtaggtcatggtatgaagtactcccccgtccctaaatataagagattttggttggatgcgacacattctagtacgatgtatttggacagtatatagctgtgttcggaactgttgcttcccagctccaccgtctcgtcttccgcgtacacgttttttaaactgctaaacagtgtgttctttgcaaaaagtttctatacgaaagttactttaaaaaatcatattgatccatttttgaaaaaaactaaacttaattaatcacgtgctaatgagccgcttcgttttctgtgcgcactgtgcttgttgggaacccatggttctaaacacagctatagaccttattatcacggtaatattcagggtttgccacctatggtggatttttagttttttttaaccttttggtttttaatttataaaatacactatcctgaaacttatttctaaatctgaactttttgtacacgccactccaccagatgtggcaaaacaacattgtcatgtcacgcacaatgcacatgctagtgttgttttgccacatcaacttaggctgtgttcggcatcactttttactaacccatctccctcgtttttcgcgtacacgcttttcaaactgctaaacggtaagtttttgcaaaaagtttctatacgaaagttgcttaaaaaaatcaaattaatccatttttgaaaaaaagctaatacttaattaatcacgtgctaatggattactccgtttttcgtgcatacttgtccggttgggaaactaatgccaaacacagccttagctggtgtaacgaagaataacgctatcacgctaaagaggtagctatggaaaaaaattgttccaccatgctagcaagaatgtcatgattaaaaggtttagatttaaaaataagtttttagaatatagttttaaaatgaaaaatgataaaaaaaagattaaaaaatttctcgtatggtggcgtttcatgattcttggttccacgtatctatggtatctatgacatatgggtactaatcccacaaggcataaacacattaattatagggttcggagctttatgtacaacctctaaatccacatctttaacttgtgaggaaggattaaaaagaagtataatcaggcactttatgtacaacctctaaatccacagctttaacttagtgatttcatcatctccgttactatgtctgggaaagacagacaacttataatcaggccaagaaaattaagaataaaaataaagagggttaagttggtacgagttgtaagatgaattatatttaaagaaacaaattcatataaattgtgcatattttgcaaagcgagtgtattcagttagattccttatggtgtaaccagctcacccaattttaagattttagatttgatatgggtgttcgcgtttatgattaattattcttttagtgatagacccatcgatgtaccgaactagtcagttttaagatataccgaactagtcttttggagtattttttttattttttagactttttattttttttaattttattaatagtcctttccaaaaagtatgacactggcgtggctaaaaggttcagtttttggaaatatttttttaaaccatctataaaaaaattttcaaaaaaaatctctttcagatgtgctcataggataggatagagtatgcatgtgtgcttgcattgtgtttttttttaaagaaaatattgtacgtatttttcattttaatgggaaccagaataggagtacgagtgtacaacctccactagacaagggaggaccgaagtacttaagccaagtgcatataggggttgagaaggaccaaaggctaggcgcttaggttgatggagaggcttcagagtgccacccgcgtgccattttgtcggtgaagcgtactatttgcgttgccagaaaatggtgaccacggtgccatgcaaaatcgtcaatctagtatatagatgtctcattctcacgcattcatcagacatgtgcgtggatgcatgttaagcttctcaatttgtcgtgtggaagactgaaaagaaattaaactcagcagattttatggcaattctgcttggagggcttttcttttttcttttttggctgcataagacaagacaaggaagatacaccaccgatatagtgaaaagtaattttaggataagacttttttacacttgtactcgtggcggttaaaaaatcaaggctgagtttcaaattcgacaaaggaaaccataattaattctaaagttcaaaattagcaatggcttttaagctcaaacaaacggggcaactctattacgatccttgattgggagtacttggtagatatatgcaaaaatgaaggaagaaggaaaaaaaacatggtggatgtttgcgggagcagagtagtacagtttctattttacagctcgagctcatcctaaaaacctctgtatagttgtagctgcagtttttctaaaatattttttactactatattcaataaaattgacatattttgtgttagttcgttaaaaaatgcatgtgcttgtacgatactgtgaaataggataaattaattcatgcaaaactgtatttgtgcaggtggtatagtttgcttacatacctagcttctctttgtttaacttggagtatttgttggaagtaggaactgcaaccggatctggggcaacaaatagtatagcagacctttgctctcatagattctgacaaagacatttacaagcatttccttccaatttacgatgccgcagcaggaatccacaacttctattccggtacaaaacaatttactttgatttcattttgtttctttcgagatggttggacacgtgttcatcctgtttatttctgcaaaataagggctcaacaggtactccataaaatatgaaaatagcaccaaccaagacccatatcatcaggacaatgacaacacaacagcatttcttaaattaattaacatcgcaattagttctttgttccatgtgcttgtgctctcgtgtgtcccagcactacgcccatgttctgatcgttcgaagaggacaaggataccactacaacggtagcttcaaaacgcatgagacaagatgaaaaagcgtttgattaagcatgttaacgtacgtgcgtgtgtgtgctgtgtgagcatggaatttgctcggttttagtgtaagctcctcggttattgcagcttaagagaaaaggactaatcagggtgttgttaaatgctgagatgagtacctgtgaatcgtgtgagatgctgaagccaacaaacaaaacgggacggacatgcaccggtcaagaatcttgaatttggggtttcaaaaattggcatcgaacagaacaattggagatggtgtgtggtgcatgtacgaagcagcagcattgaaaaacaccactggggagaagatgtgtttgctgggtgatattctcagttgaagtagtggccgttctacagcctgacatgaaagctgtaaatgttagtaggtcccaagcattattagatgacactaaaagtacgaactaaaatttgggaggcaagcagcacagcttaaaagccaaaagtacacacttttcttatctaaaaagtactaaatgtatggaacatttccagttatttgacagatgctgtaaaacagtggtcaaatttctaaaactttgaatgctctgttggaaaaacatatatatatatatctataaatgcattatgcaaatgataggatattagtgattgacttccatacttccatattgttactttgctcgtacagggaaaaaaactcaaacgtgtgtaccagcactaaatcaattgtcaatgtgtctaaaaagtcaacataagaaaaaaggaggtatagtggaagcatacagagcaaaacaaatatgtgtgctgactagtatctgctacatcactacgtatatgtatgagatcagattggtaggtagactgtttaaccttcctaaatatcctgttcattttcaggactggattagatgccgatttctcatgccaattccagatttatttggccattaaaaaatggcatcctcccttggatgtggagagtgagagaggaggcattgtaccttagttttgattaactaaagcaaaagaggttccatgatcaagtaggcagattccataaggacgttgtaattcataactcaccaacacagagtaattgttcagtaaatatacaaggaacttgcaagcagattgcaaactcaaggaaacttctaggaaaattgcagttaactttttgctggaacaactcactagaactagattttcagcatcgtcaggtttcatgtgacacattgctttgttagctgtctgtctcttgcatgctaaatttcagtttcaaaacattggatagaacatcttatcagtagctgcaaaattttccagatgtaagaacgatgtaaaacatgcaagaacagtgcacttatatagttgatgggctctcatattccatagcagaataggctcaagttatcgaccatggccctcatgaagacaggtttatcaagattgcaatgccaaggggtgatccaacacaattacacaagttgctatcgatagtacgacgccaatatgcaaagcaaaacagatgaagctgtagtcacaatcaattcctggcataagatagccaccaattagttttacttcacctgaaaacaacagcaacaatattcactagcattcttccattacatgttctccaccagaaaaagagattgcacttattgcttactccagtattcttattagagtttttaacttttagcctccagcgaaaaaatattattttcaggaggcttgtctgtctttttaaaaacactaacaactttccagtttctactttatgacagaagtgaaattttttaagtgtgtaacttagcaaatgggagaaaatttaagtgtggaacttatcagcttaatggcctcatcttttcgcttatgcttatgcttatcagtcaaaatttgaattttcaaacttaaatttggatttgattttggggtttttttaacgaagtttatttttcagcctttgcttttagatcgctaagaacacgtatataaaagttctattcacacattatttttcgtttgcaaatatgccgtttcgcttattccccgaataagcgaaacaatggggctgtaaatgtgatcttggtaacaagaatgaatataaaaatgtggcactctgatccaataaaataatcccaaacaacatcagatatgctcaagcataacatacctggaagttataaacaacagatggaatatactgcccaagaaactgagaaaaattggctagcccagtgtagccctgaaaaggataaaacattagggtgaggatacgaatactgagaaacagtagagaaaactggcagataaaccaatagtttagcatctagatagcactgtatccgaacaacccactaaccagggatacagcaagtattgatccaagtaccaaacccaaactacggagtactcgttttgccatgtgtatgccacgaccttcaacctcaccatactcctgccacaaacattttatttcaatattatatttaacaattaagactacaaataataaatgtagcgcaccagcacagatacaaggataaatggtttaatattccaaactttggacaatatctacttgttccgaacgatgcatcatttaatatattatttttgaacctaacagcaggagggctgccgctttgtattaattagcatgcaagaaacaaagagcaaatccttttaaagactttagaaaacaaacgcatactgactacctggtaaacaaaagctctaagcaggacgcagccacccaagagcaggcatgtacacccctgttctttaattttgtgagcaggggctgatagagtcaatcgacattttttttaaaaaaaaagttgatacaggcatcatttggttaaacttgttgtatatgtagttttgtgaatttttctctggaagcttcaccacttctgtattgctatcgttatttacatatagatgagtagatgggcctctagctaatgggccagcacacaaacacacacacactattctatttacagcccaacagtatacacatccatctttagagtaaaatgtgtatcttcatgactaaaagaaattgtagcaaactcaaaagaagggtaccctcatgcaatgctttccccaatcaaggggatgccacattatctatccggaacattagctagacttcttctgtgattctgtcaagctgaactgcaaagctaaaaactagtgaccaagtaatctaagatccttaatacaagacaagcatgcacttatgtaactttgtaactaaaaaaggagccacatatatcaaatatatgcattcccaactcatgaaaagtaagaattccatcccatctaatagctccatttccctagtgtaccttttgctcttatcatatctgaactacaatagagtaaagcaaactgaaccaatttgattatttgatatgtcattcctgtaagtgcagggattccatagaaaatgaaaagggaacagcaaataaaattatttagtaaaccgcctcacattgtatataggagtgctagctgactcggtagccttcagtttgtcaagtattcgatagaaataggcaaaacacaaaaactgcatgggcttccagtctgcatggcccatggtagatatatacatgatctgcaaaaaaaaaaggataaaaaaatgtccattaataaagtaccttttctccatacacaaaatgacttgcccaagataggaagtttggcaagctgatgattaaaaaaatcctatgtgaaataatgctgaaattcaaattattttctattgtgtaatttcaagtttaacaccaatgcatataacaaagttgagtacagaggaacaatccactgggattcataaaacattgtgtttgattaaaaacagtaattattaatatttcaatgtggtacttgggatgatacagaaaataattttcttacaaatgttgctgatattgccatattaatgcgcaggtccttcccagtggatcttgagtatctgcaagatgatcatgatgatgatcatgaaatggcaatagcatagcactaaagctaacaaagaagtggataggtgttaatgtgtgatgatatttccagtggcccagagttttaatatttggaactaacatgtgaataatcaacagttatgctagagaaaagttaaaatttaaaaacaataagggcatgggcattggatcatcaagttttgctagagaactgcattaagtaacaaggatgcccaattcatggatgcaggattgcagtcaagaattaagtctgttaagtctcctaagattcatagtgtatagatgcattggaaaacaaaatgtacacagtatatattgaagaagcacatgaagagattggttacaaaatgtgaactgtaaggtacctaggcccccaaggaaccactggttgattatcagcatatttaatgtcctttgacacctaatgttcagaaagagaactgaataatcagtgaaagaaaacatcagaatagagaattatcatgagactcatttcattattagccatatgttggaaggatcctcttaaacatggcaaccgacagaggtctcatgaagttcactccagtaaggagactagaagagtcgatgcaagataagtcatctaagatctccgtcaaattcaccatgctaaagtaaccatcaagcttaatagcaggcaatgcgttgcttggttagatatctctgcatctcaaactacgtcgctcaacagtaaatatcagtatgtgtttattttagcatgaaggaatttaaccaaggagtaccaaacgaatggtaacagtctgttaccatatacagaacaaatcagttttgcaattacaaatcaattttgtgaatatgaatcctcatatctaactctaattggatacatatgccaaattgccgactgcatgggattgaacagtgctaccgtaaacggtggagcacatacaaaaaaagggcagtaacgcgcaagtgcaaactttgttgctgtagaccatgcatcatcaatgtgacaaggaaataatagtagagagtaacctggattgatccatatgccaccccattcttccggttctgaagctgctccatcatgaccatatcgtatgccctctctaactgaaattcgacaaaactccatcactcatcaatacattaacaacacaacagtaaccaaattctgaacccccatgacccaaaaccaccttgaacaggtgctcggcatctttgttgctctcggcatcctttcgcctccgcttataggccatcttcacctggtcgaacccatcaagtggactgatccccaaaatctaacaaacagggaccaaccatcacaacaagaccaggagccacatccaatcactgaatcacctgatcaccaacgaaggctgatcctaaacatgaacatagccactcccaataacccaatcattctacctcgtatggattctcactgtccccggcgccaaactgcgcgctccccgccgccgccgatgcagccgcaacaacaccacctccaccgcgcttcgccggcaccgcagataacctgtttttttttcctcatcgtgatttaccgtgaattaacaactgcttgtaaaaaaaaaaaaaagcaaacccccaccgacaactaataaagtgtgcgaaaccgacgaactctaccaacgttgggctacgatttcacgaggcacggaaccaattattccaacaacgcgggcgtaatttacctagcggggcgcgcgacgacaatgggggcaacccaatgaggcaggaagacctggcgaggggaggaggaggaaagactccggcggaggaagaggctcgcagccgccgta

SEQ ID NO: 28201 - DNA, 2257 bp, Oryza sativa
gctcccgctccccccccccttccgctccaatggcgaaggaaccgatgcgcgtgctcgtcaccggcgccgcaggtacggacggcgtcgcgctcgcctcacttccccctcgttctcttggtttgccgacgcgatctcgtgcggggggcggtggctcggatctggctgcagatccgcgccgatccagtggagggtttcgagtgtggtggttgtagatagctagatctcgttgtgtggcggttgatctggttggggggggggtgcggattatttagtgggagaaggtcactggcgtgatttgatttcggtactaagttttgtggttcgtggattggatgagctcatctgatggtgggttgtattagatctggttattatggtcgcttgatctggttttcgggggactgattttgcttagtttgtgatagttgactcgagtttgtgttaagtctgtgcatgaggttttagtgggggtttagtggagatccatgtgtatttcttttgatctgtaggggtttgagtggtttgaaatggatcatggtgtcgatttgatgagtgggagtgtgggtttccatagttagaggtgggaggttagtcttataggttaaaagggtttagaagggtttacctattaatctgttaatcaaatgatccgatgggagctagtcacagttgtgagcttggttctcaaagacatacactgataacttgagatgtttgtcttgaaacatgcatttaatttagtttagctctggagggtgtgtcccttcaatttggccccacaaaactgtttgggatcgggtttgtattccgtcaagttctggcatgtcttatcccagctcaggattcaactgcaaaaattatcatgcatccatatagtgatagtgactttgatccaaaattccgtcgtagattctccatctgggatttggcaggatatcttggcatttaaacatttaaatctaaataattaaattgcattgcacatgcttaataagtgggattagcaccaaattgtagggtactaataaggaaaaggctatgcatactaactttttcttactaaattcttattactaacactgatatgtcatgctatgagtgcgtctaaattttttataacttccatctactaaaatcaaatggttgagatgattgttagtaaaagtttagtaagaaaaatttagtatgtgtagcagtgctcgtgctaaaaattgatctacacaagttggggttcttaaaccaagatataaatggtttttgtttatccatctcattctaatctcttgtctagtgtgatccatagttagaattgctaaattgctataaatattttctttcaacagctgaaaactatcactgtcttgttaacttaaactagtttgccttcattgttatgaaagcttcatttttctgatgtatgcttatgccagatgggaacctagctggcaattaattgaattagttagttcaatctgatgtggtgtgcacttcacaaacacttttgtaatgtggtctgaggtcctcttgtacgtggaaaggggtgctttgttctccacttaggagctcgggcattggaaatgtaactgattgttggttagtacactctgaatcccactcttagccaggttggatcaggtgaagccctgaggaggggccactagctttcttttgggtgctttcacgaatgatgataataggtgatatggtaatcagcatgaaaacaaatgtatttttttatgctcatctggaaatgtagcagtatttgaaagctgatggtttgcacttcatatggaatgcaataccattgttgcttgtgtgtcttaagaaatttgcacccaggggctttcttttgtgagctaattcattcttttattccgcaggacaaattggatatgctcttgtccccatgattgctaggggtgtgatgttgggtgctgaccagcctgttattctacacatgcttgacattccaccagctactgaatctcttaatggccttaagatggagctggttgatgctgcatttcctcttttgaagggtaagctggttcattgaactcaatttgtttttaaactgtcagcatccttgctgatgtttaaacttttctgttttggtgttgtaggaattgtcgcaacaactgatgttgtggaggcctgcactggtgtgaatgttgcggttatggttggtgggttccccaggaaggagggaatggaaaggaaggatgttatgtcaaaaaatgtctccatctacaaatcc

SEQ ID NO: 28202 - DNA, 1932 bp, Oryza sativa
  unsure (1)..(1932): unsure at all n locations
cctgataattcttctgatttggatgagatattggctgacgaagaaacagacgaggaaatgttttttcgtggtcccacacggatgccaccgcgacctacccgagatgaggacaaacctgtgctgactccaaaaagagataggtaaatagggtaattttggtatgtttcattagtcgaaatatgaaggcttgatctatttgttcattgatttgcacaggcaatggcaagctaatgattttgggggcaacattcgggtccccactggcatcctgaccgtgcttattaagcattttttccctggcattgtcaagtttaaaggaagagatgagccagcatggagttggaaacattacaggattgcaccggacgatccagaaagcgctgtactgaatcgcttgccaagccgtctccatcgtgttgaggaagatttctgggtttgttttagagcattaccttctccaatatgaagtacactatgcattttattgtgtcttcagttttcatagtttacggccaatttgtactgtacaatagtaaagtatcttaataccacacttttcaatgtcaaacaggctaactttttgtagttgcagctttacttcaggtgggcagagggaacggaacaagctgctagaaaggttgtccgcaattgtatcaagcgccttttttcgcacctgatttatgaaactcgtatcctggctgtgctcaattaccaaaggaacatcttaaaggtagaaacttctcgggatattgcttgcaggacatatctaacagaagaagagtacctacaggtgctatggttgttcattgataatttgttgtcatctactgatcatattagtaattaataaatctgtgcttctcctataggtagaaccatggtggttcctaaaggcaaaaaatgagtggcgggagttgatacgattgaagtggtgtaatcctgaatggcaggctagctcacatgctcataggatacggagggagaaaatgacatggccatctcaccgccaaggcagtgctaacttgagtcgtttccaaaaaaatttgttatgtgcatctatgttgaaacatgtagcagatcatgcacagcagatcatggtataatatatatgggtataatatatatggtacccatgttctgttttaggagaagaagaaaaggcggatagtgtctcaaatggaggcctacacagaaggaaggggggaatttggagaggatggaccattcagatgtaacacgcatgtaactgggaagcttgtaagtgctgaatatttagtggtagtttatcatttgtgcatgagtactaatacactatttgatctgactgtagnaggcctataatgaagcttatgttcagctgcatggagcagaaagtgattggcgcaattctcccattgatccaatggctgtgcacatggctggtggtggaaagaaacatggtcgattcatgatcggtgatgggctcattgactcatcagcaatctttggtgacagttcacttgatgatccacgtcctcgcagaagactgtgaacagatcctgacaacacaaaccaaattgaagaccttgagcggcaactacaagaggagcgcgaggcaagggaacgagagcgtgaagaaagggagcgtgagaaggagagggagcggcaggagcgggagcaggagaaggagcgtgagtgtgaagagagggcacgggagaaggagcaggatagaaaggagagggagctggagcgcaaggaaagggagttggaaaagatagcgtttgaacagaaatcatcgttctttgaagttgctttaagagtaagtggttatgggatccatctagtagtgttttcattatttgagggcttgaattctgtgatggtcgcactaactagtgtacatgtgaaatggattgcacgctatacaacttaagctgaacattgacttacctt

SEQ ID NO: 28203 - DNA, 531 bp, Oryza sativa
gctcggtacccatgtgaaacttccacaagtagttgctgacgctgtcaatagatatctcaaacaagagatattataatgaaacacctttgcaaatttggttggaggccagcatatactgtgtgggtgtatcatggtgagacatatcctgcacgtcaaagcgatatatgccaaagcactgaagatgaagatagggtggcagagattgatcggatggatgagatgatagatgatgtccatgatgcttatgtctcagttgaggaggaagatccagagcctacagcgcaagctttttttcaaatgctgtctgcagcaactcaacctcttcacgaacacacacaagtatcacaacttgatgctatcacaccactactagctgtcaagtctcaatatgctatatcaaatgctggatttgatgcccctttaaatgtgatatgtgctcttcttccacaaaggcacaaactaccagcaaacttgtatgaggcaaaaaaagatcttagtgcattgaacatgccatatgaaaaagatagatgc

SEQ ID NO: 28204 - DNA, 1231 bp, Oryza sativa
caagtccttgtcattgcaaatatcttcagtatccctgctgatggcaacttgctcaggatcattgttgagttcttgaccaagatcgattacaaaactaccagacagaccatcttcttggaaatagtggacaacattgctattaggaacagaattgtaatcttgatcattgggtacttgtagtctaccaattggctgcaccttatacacaacccaccaattagtgaggtcttgcacagatttacatgggtacggcatgtaatacacctgtgtcgcttgatgagacaaaacaaatggttcgaattttggaaggattgacgcatgagcaacctcaaccagaccatatcttggtgtatacctcactttgcttgggtcaaaccaatggcaattgaagagcacaagtgtgagaggttttctgccatcaaagctgatttctactatttctttgatgtaaccataatactcagttgtgtcactattttctccctgtcctatagtcaccaaaccactattattgtagttgcatttggcctctcatgttcatatttgtgtgttcggaatcgatacccattcacatcatacatattatattgcaagactcgagtgtggcatcctttagctacttgtctcaaatcatcactcatagtttcgtctaacatactctagcagtgaaatgaaaggaaataatgtgtcaataaattgtggcataatgttctattatggcaatattgaaggttatgttatagaaaaacataagtattattaggttattgacacaaatgcaattaacaggtgttaaactgcaaactaatgaaaacaaaaagaaaatggaagaaggcactattgattattaaggtatcgaatttcaaaactgaagttatcaagttattaattggctaggttctttttgttagtagaaattggcaatgattttattctgtccagatttccgacctaacagatgatcaattgagaagtgtctccatattaatgacatgtacatacatgttcagtactattttcataatgcttgtaaaaaaattaactcggattgtactatgaaaaaggcagatgcatactagcaacttgcattaatccaaatgtgctttactattgtaggtccaaagaagtcacctaatttagagttttagcagtaatactttattggtttgatggggattacataggttgcaggaacattcatgaaagaactaatgttctacagtttgaaaag

SEQ ID NO: 28205 - DNA, 2168 bp, Oryza sativa
tgtttgccatctctataggatcaaactgttttgcgcaaagtttgcgataaaagaggctcacctctgctaacacttcccacacatgagttggcaagtattcacggaacatgactggaaagatacgttccatcattatgtggtaatcatgggctttataacccattgatccgcatggttttcaaattcactcctctccttaggttcgacccatagccatcagggaatttcaatgtttgaaaccattctaatacttccttcttctgagctctattcaagcaaaagtcagctcttggctttacccactgactagatgcatgtttttggaccaggttcaattcaggtctgttacaaagtgctgcttgatcaaggcgagccttgacattgtccttcgtttggtctggaatgtcaaagcaagtattgaaaattgcctcaacgacattcttttcattgtgcatgacatcgatgttatgaggaagtactagtttgtgaaagtacgggagtctccacaaactagatatatgtgtccaatggtgatccttgccatagcctacaaacttatctccattagcagcaaggacaaggttatctaaccgggcacggatctcttgacctgagagacgaagaggtggttcattgctaactgtagtgtttgatagaaaagaatttgaatcacttctaaagctatgatcaattgggaggaactggcgatgacaatcaaagaatgagtactttccaccaaacttcaacctttttccttggagtgcctccatacatgttgggcatggcatctttccatgcacacaccaaccggaaaatataccatatgctggaaggtcatggatagaataaagaaatgagactcgcatgatgaaattcgtcttggtggcacgatcatatgtcaacacaccttgctgccaagcatgtataagttcatcaactaagggttccatgaatacactaatgtgtttgccaggataatttggcctaggaattatcaaggtaaggaacatgttgtgctggcgcatgcaaacaccaggtggaaggtttaaaggaatgacaaacataggccagcaagtgtacgaagaagaacccataccaaatggacagaacccatctgttgctattgctattctaacattgcgggcttccattgaaagcctgtgaagtccctatcaaatttcttccaggcctcaccatcagctgggtgtacaatcttgtcagtatggtaccgatgaccattcttgtgccatgtcatttgcttggcctgcgattcagacatgtacagccgctgaattcttgggatgaatggaagataacgaagtaccttcttggcaacagttaattgtttcttgtgaccattactgtcttcaacctccacatacctactctctccacaattatcacagtgtgtcttctgcgtattctctttcctaaagagcatgcaatttttagggcatgcatctatcttctcatatggcatgttcaatgcactaagaactttctttgcctcatacaagtttgctggtagtttgtgcccttgtgggaggagagcacatatcacatttaaaagtgcatcaaatccagcaattgatatagcatattgagacttgacagctagtagtcgtgtgatagcatcaagttgtgatacctgtgtgtgttcgtggagaggttgagttgctgcagacagcatttgaaaaaaagcttgcgctgtaggctctggatcttcctcctcaactgagacataagcatcatggacatcatctatcatctcatccatccgatcaatctctgccaccctatcttcatcttcagtgctttggcatatatcgctttgacgtgcaggatatgtctcaccatgatacacccacacagtatatgctggcctgaaaccaaatttgcaaaggtgtttcattatcatatctcttgtttgaggacgtgtgttgttgcagtagttacatggacacaacacaccagcacgtcctgtctccctgctgaatgccttgtcaagaaattatgtagtcttcgatatccactcagcggtaacctcgccacgctttcgacggcccttgtacatccaactgcgatcagtttccattgtacctagttatgacaaagtgacagaataaatttatgttaggaaatgtccttctattcatgaaaggttcaag

SEQ ID NO: 28206 - DNA, 3757 bp, Oryza sativa
taaagctgcaactacaaaaatttagcttgtttgacattaaaaagtgtggtataaaaatcttttagtattgtacagtacaatttggccgtaaactatgaaaactgaagcccaataaaatgcatagtgacctccatattggagaaggtaatgctctaaacaaacccaagaaattttcctcaacacgatgaagacggcttggcaagcgattcagtacagcgctttctggatcgtcgggtgcaatcctgtaatgtttccaactccatgctggctcatctcttcctttaaacttgacaatgccagggaaaaaatgcttaataagcacggtcaggatgccagtggggacccgaatgttgcccccaaaatcattagcttgccattgcctgtgcaaatcaatgaacaaatagatcaagccttcatatttcgactaatgaaacataccaaaattaccctatttacctatctctttttggagtcagcacaggtttgtcctcatctcgggtaggtcgcggtggcatccgtgtgggaccacgaaaaaacatttcctcgtctgtttcttcgtcagccaatatctcatccaaatcagaagaattatcaggttattgggaacctgaggaccttgttctacatctcggcaaggtagcagcgctcacagcctgatctgaaggattggaatcctccctgcagcccaagctcaatcgccgcatattgctacaaaattaagatatgcagtattatattaaacaggtcaaaaactacatagtcgcaacatggtataataatgcctattataaaatgttgatacaaagatgtagtacaccatagcattgcagatcatcacacaacatggtgctgtcattccaacccgattcaaccattcaacaacgatctaaacaagtagggctgtggcaaacactcacactcaccattatgtcttctgaaaagagggcaagtttttcctaaccaatatgtatccatcaacaagtacacaaatatgaaaacacattattttgactgtgcaaggactctcacccacatcattttgtagtctaatattgtttttatttacaaagcacaacaacttattcatatggtacttgtggtattacaagaaattaaaatgagatacagttcctagaaatcatacaccgaactatttctagatcctgggagaaaatggatgggttttctagaaccaagacccaactttacatacgattcaagaaaaaactcaacatatacataccaccagctggatggaagatgaggtgtgctcaagctgtacaacgaaggggagcctagcagatggacgtggacatgcaaggagcgcgtacggccagaaatgcacagcgttgctcggtggccgtgcggcggactgacgctggggtgcacagctatcctaccatgtgcgaataagagaggggaaaaatcagaaaggggaaaagtggcgaggagaatgaagcggcagggggtggggaagtgaggggatcgattaaaagggctaggggtttggtggtctctattttgggctgacatgtgggccttcggctgtaactcgcgcgggattctcctgttactcgcgcggcaacgaaaatcaggcgcgccagccggccgcgccaacggaaatcttggcgcgccatccgcctgcgccaacggcgatcccgcgcgccagaccaattattccgcgcacgtaacggcagaaactgtgggtcccacgctttaccgtgtttctcaattcgtcacacggcatttttagccacttcccgagtttttccttgttcacacacggtatactttaaatgttatcgtgttccatataacactctcggtaaccaactgaggtacacggtagtctcccactctctggtagtgttagccgggggttattcattggcagctcagttttccgtcatttatgataatttgcacgctatggagtagagccaaaaaatgtgcaagcgcttaatattatatatatatatatatatatatatatatatatatatatatatatatatatatatatatatatatataacaagttcttatgtaaattttaaactgttgaatagttccatattgactagcttttggtctaagaaaaaacgggccctaatttatataggcttggctttgcccctgcgctacatgattttatcatattacaccaatattatgagtatataacttttttgggtgataaaattggaattaagacccttagcagttggataaatccacgcatgtcatacgctggccattacacaaaaaaatatattctaaatacacatgaaaattactgtttggatttatacctttgttctaaataaatacttacttgacataaacaagattcatgttgatctgagtaagaaatcaattaaaccgaaaaaagagcatgcgtatgccttgtatgtaatcgaataaataaataatgaaattgaatgaacaagcagacgatgattagctgcatgctaattaggcagttctttacactaccatacgactaataattaataattaaggtagcaaataaacacgaggagactacgacatgaacaaacttaatttatttcccaatcaataatcaatcagcctagccacccggcctatctatccattcttctccatcagctaacctcgccaatcatgtacagtacatacaattgatatactagtaatttacacccgttacatttgcgtcttctgaaaccccaatcagggggcatgcaagtacacaatgatgcagatatactcctacttattggcttggagtatacatcaatcaatcaattatatatatactccctccgtactcgtaaaagaaatcgtttagaacaatgtttaaatcaaaccttgaaaatataaatcttgaataactctaaagttattgagtttgaaaatgtaaaaattatatgaatagatttatcttaaaaaatacttttatttttttatgtaagaaaaaaaaagaaaaatactttcataaaagtatacatatatcacttttcaataaatatttttatagaaataataaatcagagttgtgttttggaaaccgtgtcactgtcgaaaacgacttcctttacgagtacagatggagtatataattatagttcattgattaattattgtcgattggtcacggcagtgagaggcagatagcagcttagcttagctgcattatcttgagacagagtaccgcgcaaaatgccaggagacacctttcagaaagggcaccactgcctgcagcaagtcagcaatgcacagctagctatagcggcagccatgaccgcgagcgagtgagagagagctcgccgtcgacggcctagctaggctctcgccgtccgtcgtctctcgcgtcgccatggccacaggggatcaataattttgtgggcacacggccggagaggcgacggcgatggcgacggtgaggtctgattttggcacggcgtttcgtcggtgggggcagagtgtggtggagtgtgctgttgtgtgtggtacagcaggcgagatgccaacggatgatcagcttattatagcctccagctagcgacccatgggttgtgtatgtacttgctccatctcataatataaatgcactataaaatttctcatccgattctatggtgctatattatgggacggaaggagtaggtgccaaacagctagctagatgtctaggtgcgatcaaataatccttcgttctaaaataagttcatttttcacctattttatgcagtggcgaatccagggtgtaaat

SEQ ID NO: 28207 - DNA, 4322 bp, Oryza sativa
cccaatactttctctatctgtaaatatattattatgtatactgaggcagcctgcatccttgccatccgtaaatttctttactaatgactaattagacttgctaatgatcaattaggtggggctggcgcaccagccagccccaacggtggatccgccactgattttatgcatatcaataaaaaatcaaatagattaaaatactcccactttatcaaatttcaatgcaattattctctactttatctactcctaatgcatttatcctctacttacaaactctggtgcaatgattcttgaaaaataaacttattttagaacaaacggaaggaacgaaaaaacttagtcttagacagagggagtatataatagtggcttattccattatatacaacatattttttataggcttactcatctatgtagttcttttaatcttttatatgatataggtccaacacctaggtaccaggcactggatcttattgaataccgtatggtaacaagtatgacacattataggaagcaggtctgaaacctatggttactagattgctaggtctggtacttatcggtatcaagtttagtatccagtatcatatctcatttgatactggtgtttgaatctcctcaagatgaagattaagtatttcacgtaaaatgaggtgataataacgtgtgattaattgagttttaattattacaaacttgaaaatggattaatctaatattttagaacaactttcatatataaagtttttacacgaaacacaccgtttagtaatttgaaaagcgtgccacgagtatccaaattttaatccactcctttaagaagaaacgaacgggacctcgatatattatgggtaccagatctaatacgtatgagtataacactatattacctgttcatacaaaacagaagcaaatttgatcaccaatatgcacgcatggagtaggcatcatcaaaaagttacacaaagtaccatgtttgattatattccatccacctatcgaaagctaaagacataaaagctaaaacatggagcaatctttaaggcagggcctagctgcagccctatggtgcagtccagcaaggcttctagcaaaccttgctagcatggtcgtggctacctcgtcgaagaagcgctgacgcacaaaggaaagtgtcgacgagtgatactcggagaccgaatgattagagtattagggtacgttggaatgagaatctacgtatacgacatcaagcagacaaaagataaggattatactgattcgggccccttaccaggtaatagccctactccagtttatatgagattgatgacggaaaaccacatattacaatggaagtaagcagaatcgacaataccaacaagatcgtaatcgatatattcgacgagatccctcggcgacttggctcgacgaactccagcttcataaactatggtgggtgtgttgatgatgaaattctatgcctttcacccctccctgggggtcccttttataccgtggaccatcttgatctccaagtaagactcggagacatcggatcttgtacgatataacagaaactctatcccctccgagcaggattttggaaatcacttgaatcgtagagatatttttcataatttgtgacagattcccacggcgtacataggaacaatctgtgtacgtgaaggtatcccatatccgtatattccataagtcgaagaataggaggtatgtcttatccgtaaccatgacagaaagggtgttgaccttggcatgatgtgagcacaagatgtgaacacgcgacacaagaatgcatggctgtatcgttccatgtcgttgaccggatgatattccctagctagcattctcgtaagtttatttgcttgaagggttcaaaacgatagtgtaggactgccacctgctctggctcaaataccttcggcccatcctctaggccttatactccatcgttcgttcactacgagttgtagatgttgtagcctattgaagaacacatcaaggtactatcatatccctcgataaaggtgacaaaattatattcagaaatgtggatgccgcaagacaaactagggttctaagttagtatactgctaggagataaagtagtagtcatgttttcttatctcattcacaagccaacaaggcaaatatatagtcttacattgattgatatctggtagggaaataaagcaaaagcaacttcaggttcagcgaggcaacaacattcagggaaaacgacaatgctagatagctacagttgtccccgcgatcgttctcggtcgttggatcaaccaaacctccatcctcagttgtgtgatgcacttaagtgaaatcggcgaaatgttttcctcactgtcggcttctattcaaaagaaaaactctgaagaactctgaactacttcaattaacaagcgaactgaatcttcaaacaacttttgattttcatttccatttctatcctgctaacttgacggtagtgcttcatctaattgcatcttctatattggaaccaaaatacaatcttgtggccatgtgttgatctataccaatccacagaatccacgtatgtctgccttttagaccatgcatccatgttgtatagcgcctatgaggcgtttactataaagactcatcttccggttaccactttgaactatgaccactgtttgtttctatttgtttgtcaagaactaatggcagtgtattgtgttgttataaagtagaactcaaggatttataccagattatgacctcttatccaagtagaattcggggatcccaaataggatatggactaacaaggccttatcattatcgaggcagactacacagtccattaggtggacaggattcgttccttgctatatttttacccatattttggaattaatatatttttgtataagaataagtatgaggtattcctagtgatagcaagtgcagatatacaggtacgtcatatctaactataacactgatagaatttattggtcataagtaaaattataccaaatcattggaattttacattactttgaatttttggcacataatatgtactacatgattttccccttttgagatagatattagctttgcgatgggttgcaaatggtggcaagagatatgcccactagctaccttatatcatccaatcgcactagctggtattgattggcgcgagagataagtttattaggggacatgaatgtaagttgtttactttattaagggatggtttgaagtttgtgcagatttatttttccgtttgcaaagtatgggtattatatatgtggttaatagtttttctataccatgttcttcagcgagttaatgtttgtggtaaattgaaggcttctatagatgatgccgtcattttaaaggcttctactgtgctacccattttgattaagcattttactacttctacttggtctgtacactattatataattaatgttctctaaaaaatagtccataataatacatgcaaaggatgggagctgagaactatgtttttttagatatattgaagtgtaatgagaatgaatctaaaaacaatatttttatagttacattaggaattagacaacatccccaaagtagtacgtgaaaaatataagatatagtaaaaggtttttctttaaagcttatctataaattcacattataccatacaatgttttgctataggatgaataattatgtgcaacatttgtggatgattttgcctattcaatttcacgatcaaattcaatatagttaattttgaaccacaacaataataataataataataatggtatatttagatatgtggttgtgcttctttaccgtgctatttttttaggaaaatactgtgccattttattcaacaatttccgttgctcatgttaccaatatataaaactgtaaaaaatgtgacataattatcgtttgtgatatgttaaaattttcgttacaataaatttatacttaatcattacttaacatcatttcaccctatgtgatgtgaaatcaattaatccctactttatttcacgttgcaactcacagacacccctactagtatagacgaaagggacctatcggcattggaaagaaatgcgcaaccaaaaatagcacgaggaaggtaccgtgtgggcaaggaagatatagcttgacgttggggaggcctcattgccttctacatccccctcccatctctccttgctctccatggagatccagcatgtagggggctagggctagatcctcacgctggatccgcccttgcgtgtgtggaagaatagtagctagtctcacttcca

SEQ ID NO: 28208 - DNA, 1115 bp, Oryza sativa
ccgctgtagctcaagtcggcaacaacagtatcatcatcagtagaaacactatttagtccccctttgattcaaaggaaattcataggaattttagagaatttcattcctataggaatttttcctatatagccctttgaattaaaggaatggatcttatgtaatcctatgaaattcctatggaatgtctaatgccatgtaagttttggaggaaatctagcatgaggtagaacctcatggaaacttccctttcagtctttatctctcctctaattcctgtatttttcctgtggtccaatcaaacggtctgtcagggttatggataccacatacctaatagtagttgactaaatctcggcaggacccaccacataccatgtcctatacggaaacaacctacggatataggaggtgttccggataaggaaagacaaccagagttctacatggaaacgacaaggactactcggattgtatccatattggttttcctagttctacttggacaaggggacacctatgggtataaatataagaccccctagaaggagacgaccacctcaatagacacctaccacaatcaacatacacggaacaatagaagccacaagccaatacaagccaacatacgccaagacaagacgccggaatatcgacttcagtaataagcacggctagtcccctacagtgtctccggatattgtcaggagagacgaaagcgttatctctgatctcgtcgggcacgaactcgaggaggaagactaccttgttgtcgactacaagtcagaccttcagaccgccatgtcgacaacagttagataggctaccccaaatattgtactggtgtgattatggtgaataagagcaataccggctttggccaacaggatgtagggttattacctgaaaattcaggggcccgaacctgtataaaaatcctcgtctccatctcttttacctcagtctcacgtataccctaataccaatgatccccataccatgcaaataccggaatcgcgacatcaaacgtcgacacggtcattcctatgtttttcttgtgttttacaatcctcagttttacacttacatttctatcaaaatcctacatttttcctatt

SEQ ID NO: 28209 - DNA, 75695 bp, Oryza sativa
  unsure (1)..(75695): unsure at all n locations
atggccctttgannattctctnnnnnnnnnnnnnnnnnnnnnnnnnntggccagtttcctatcacactccttatctgagtggccaattaaaccacatatgaagcagaagtgtggcactcgctcatatctcaaatcaaagtgccgaacgacctcattaccttgaacattgattttaatggctagctttgttttcaggggacgcttgacaggaagatccactcataagcgggaaaaaaaatcatgtttgttacgcccgtcatcctccacatccacttccttgacctggccaagtttgcttccatataaaattcctctttctttcgtcattagaaccagcggtaaatcatatatcctaactgttggcggctattaaatgcctattctatgtcgccagtacctgcataatacttggataatacaacatccaacatagtgataggatttaactctaacatattccacgagtgttagtgtatatttggatgcaagtaataaaccactgaagttgggagaaaatttagattaaagtgaagaataattctattcatatgagagttgggctcctaaactccatcaaaacagcaaaaaatgggcccaactactggagaaatggataaggaagagcgaggaggaggcccagactaaatctggggaccatctggcctagcccaggttggttcggtcgaaccctggtgaccgccgttggatccaggttttggtttagacacttcagacgctctcttgatggcggttgcggggtatttttgcaattcacatagttacaaccgtcataccggcttatttaaggagttcattctttcacttctcacacacactccaagcttgagttgaattataagaggctctattgtactttatgtatactagaattagggagagagtaaagtagaagaagtcgaaggaattctgaatttgtcagtaatcctcttctatttcttatactttattaattattctgctttaatagaaatatcattatgagtaattaagatttacttcgtgagaattattcttggttagttcctaattagcgcgtgggatcattgttcactatagtccattaatttatattgattgctttagtgtttagctagcgctaaagtagttattaattgcgtagacgcggtgtctgagtaattaacttccggtgattgcttcgtatcccacaataggcttgaggtgggtgtagaggtggtgacagccctcaattacaagtcctccctgtccgggtacgcagtagagtgacatctgggagtagcaggatggtcagtgcctgaagtatcgcgttaggattaaactgagttttccgtagacactgtttcttactagtaaatcctctctaccctttgcctacatttgcttcatgcccttggatgagcctgaagagctgaacacacatgttccctgatgaaattgataccttggaatactctcagatgaagtgctacattggtatcttccgtatgcttacggattttacctgtgatgttaagaaataccaatactaacctagatgggaactacctcaaggggaacctgtgacggactagtaattccatcaaactttgccaccataagagcatcttctctgtgcagccatgggcctccctgtacgatgaactggtagacaccctccactatgaaagtaacaatgaacaaattgtctctcagagacttaaacttatgtcagatttcagcctccacgcccgtggcatatcatcaaaaagagctgtctgattcggcgttttcagcgaataatatcattccaggattgaccattgtcctgcttgcttgacctcttcttcctctaaattcacctcaatcacgtcctcttcttcatagacttcgccttctgtaaatgctccaggtccctgcaaatagctatcttgctcttctctttgaaccgagctttgagaggatataaccagcttgcatttatccccctatctttgagaggatataaccaaagctaaagcagttggatcatccaccgccatcttatccccctacaacttgtggcacatcttggccatggcgtcgctcgacggcttcgggcaggcaaccttctcaacgatggtccctttatcgcccccaccgtcaaaagacgtcatggattggatcttgttgcctcgaggactaaaccctagaaaccaaagcagacctagcacctccatggatttcacgggttcaaccagtagcggcgtagtcccctcagctttatacgcttcaactaccgagtccgatttcttcatgatctcaaaccagaaataccatccacgatcatatttccaacgtttcccaatatgagatcccatatgtttgttataggacatttgcttatttgaccctatttcgaagcctaactaccaatttagccctatttttctagtttgcttatttgaccttgtttttcgaaaacaaacactccgtttgattctgtttctgccacaccgttaaatatccattaaaaaaaaagaaaagaaatataattacatttcgtaatgaccaaaataccctcgaaccctatccagacaaccctatccagtctctctctcttgtattcttccttctctctctcccggcgagtgacgcggtggcgctggctggtggagggagcaccgacggcggtagcggcgggccgtggagggaggggatccgcgccggcaccgactcgcggagggagggcggctgtgccggggcgtggatctacggtggtgacggctagtggagggaggaagcaccggcggcggtcgcggcgggccgtggagggaggggatccacgccggcggtggctcgcggggggagagcggatgtgccggggcgcagatctgcggcggcgacggctgggggagggagcgaccgccgggccatggaagacggggatccatgccggcggtggcttgcggggggagagcggctgcgccggtcgcaagtggaggtagtggcggcgcggccatcatcgttccagtgttcgatgtagtggccttccatggcgtcgaagctgttgacgatgaggccatggctgccggcagtggtctttcctagcttcgcatccatctccacgatctgcgtgagaaagacgtgcgggaactccagcacggggaacgccgccgcggcgccgcgcgcgccgtcagccaccaacacgacttgcgggaacatgtacacacttcgcaccaaagaacgccaccgtcgggaagatgtcaaattgtcttgttcacttcaatttgtgaaaaatctgtcaaattgtaattaaatttatcaaattgattcaaatttgtcaaattgaattcaaatccgtcaaacttgtattgaatgtgaaacatatgtcaaattaattacaaatttgtcaacagatctgaatatatacatgttctgacataataaaatagggccaaataagtaaggacaaaaaggactatttgctcctaacttaacaccgttaactcatcttaacggaatagggtcagatggtaggttcgttttcgaaaagcagggtcaaataagcaaactagaaaaagtagagttaaattagtagttaggcttcgaaacagggactgtgtttagttcacttcaaactttcaatttttccgtcacatcaaatgtttggacacatgcatggagcattaaatatggacgaaaaaaaccaattacacactttgcatgtaaattgcgagacgaatctttcgagcctaattacgccatgatttgataatgtggtgctacattaaacatttgctaatgacggattaattaggcttaatagatttgtctcgatgtttacaagcgaaatctgtaatttgtttgttatgattaatagattcgtctcgctgtttacaggcgaaatccgtaatttgttttatttttagtctacgtttaatatttcaaatgtttcaaatgtgtatccgtattaaatttttttttttgccaaaacaactaaacacggccagggtcaataagcaattgccctgcttgttatagataccatagtagattatctcatctggtatccttaccttatccgctaaagatttattggtatggcggctgtactgggaatcgaacccaagcagaagaccaaaacagaccttccaaactcgattttccaaccggatcacacccacgggtgaaatccctgaagcgtttttctgcaaatcggagtagaactccatctagatccatctctacacaagaaaaatggctgccgcctcctggtcgcccaggcgccgccaaaaccctagcattccgtaaaaaacggagcaaattataataacttttttttgggggaaattatattgtaacaaatatatgtataaagttatgttttaatttttagtatttatattaaagttataatttagttatagtataatctatctattattatatactaaaaatccattaaacttcctgcaaacgctctgaaaccgccacgtgacacccctacaaacgctcctataccgccacgtggctctctaataaattagaagaattataaaaaaagcaaaacatctaatcattggttttcatttaatctggtggacccattatttttaaccgttagatatagcataaaaatgtcaattagatttattatcttcagaaagccacacatggcacgtacgtgtacgtcaagtacgtacgtactccatccgtccaaaaaaaaaggcaaaccctggatttccgtgtccaacgtttgactgtccatcttatatgaaatttttttataattagtattttcattgttgttagatgataaaacatgattaatattttatgcatgacttgtcttgttaatttttttcatattttttttaaataagatgaacggtcaaaagttgtacacggaaactcagggtttgtctttttttttacggacgaagtacatattttgtacgtgagccccacaccttattttctatttttcttttgcacgaacacatgaaaaaaataaaattcatatttcagcccatatagttcggagtatgtacgttgcacatcagataaaaaccacattaaataattctaggcttccagcccatagttatacaaatataagttattttgagttgtattgtactctactcacgtcatcgaaatattcataaaatatctcaatatgtgaataatatacattatataattatctaattgtatatcacttaataatatgtattaataaattagaatttcattttcaaaaataaaaacaaatccagttatgagtaacattaaaaaaactccagttgtgagtatcattaaaaaaattactccctactataagaaaatactgttatatcagaataatattactaaattatcataattacaccctaccaatcaaatacctaataattaaaaaaattactaaaacatgataaaaaaaacacttgaaaaatattagtgcactaaccatctacactattcattaaaaaaaaggaaagttatttttttattaattatactattaataattttaatgttatgatttaataagtaataatattatttatttgctatttttttattataccgtttagccattcgaaaaagtgctcgctacaaataagggagtaactaatcccacaagcattttagaacacactcctaaatttattacacttagatacaaacacaatatgtactatacaatatacttggtcaattctagcctaaaatatcagttgtatatcctcactgatctccatatatgtaagttttatatacgagccattatccactaatcgccaagtcatattacttacgagaaatatcaatcgtatatactcattgatccctatttatgtaagttttatatacaagtcattatccactaatcgccaagtcatattacttacgaggtatctgtgcacacagtgcatataacgattagctgagatctaatgagcatgtgtgtcatcaaacactgaagataaggcaatactaagtgcgaaactgtcaacaaattatagataagtagaggatgcaaccaatccaccgcaaataatagttgactacaattagattgcgacaacgagtaatagcattcctacactcctatagatgcttataagatgtcatgtgatgctctaattagatagaatctaagaaaagttataaaaaagcaaaacatctatcatcgatttacactcaaaatcggtgatccattattttcaaccattaaattagatatatgacagtaatacatttgccctaaaaactgtccaatctgtccttacatacacacacaactcctacatatgtacgtacgtacgcaagagataaaaaagaaaaaaaatagtatatgatctatcccatctagaagttttcttcctctttccaactataaggtttttcccaaattgatcatatgcatagcgacaactcctagcgatatggaaaaaaaagacatgccatggcgccgcctcatgccacccattgctccaccctcttctcgttaatttatttgaagtatttttttttactaacgatgtaaaaagcaataacatgagctcatataaatgcgtgcatatgcagtgtatggatacacatacgtacgctctatccctatccctatgatagacaaatatttgttcgaacaagcataggtgaaatagatgtatactatataaaaaaaataaaaacttgtattaactcatatgttagcgaagatcacaggttgagcaaatattttttacgtggtcctcaccattgactgaagctattagatttgaagtaggatcgaatgatcaaccgagctaatttttaaaagagaaataaattatgtctactctatacaataaattgactcaaagacataaaaaaactattttcatcatctccatcttctttcactcacaccctaaacaacgccaagcatggatctcaattgacctacttaccaatgcaattctttataaaattatacacctcgcttatcttgaggagcgcgactatatcaatgcggaacccaagaataaaggcatcaaagaaaaaatcttaacggctaccatcggcttcacccgatgacttttaaagaggcattgatataagtttaatgattttatccagttaattggtagaagcggtatttttaaatatttatatatagatttgatacctgtaagttattgtatttggtatgaggtagagatgaacttttttggtattaatgatgtatttggtttatttttgatacatatataattctatctattaaaaagaccttcatatttaaagacaatgatagtaagtagtggtgataggtgagaacaaaaagatattcgtattatttagtatgtcaacatctatggtttgcccctccccctcaaaaagacccacttttggatttgaatatagatatatatgtccagattcaaacatagaagtgaatattttttttttttgatggaagggagcattccttatagtgaatatggtgagacaaagcttcatttagtattttttttataaacaataaataaactacccgcgcatgtgcgcgggctttcttactagttatattaatgattatattataattttagtacagttaaatttgaaagtttttcacattaaaaacttgcggcagttttctttagatatatagtctttttcaagtttatgtttatctccattttcaacaatttacggttgagaataacgtcaatatatttgacattctttttactcgacatgtcggtaaattccaaaagtatacattgattgcagtatactgcagtagattcttgatcttaggattacatgcttgccgtacatcttaattagcacatagctagaataatcagcgtgttaagttgctcagggcgtactcactggccggccactcctggaagccgaagccggtggcacgccggggatcaacggcgggaggaggggcactggcggtagaagagatggcgggggcggtggaggcggtggtgggttgagcaacggcagcggcagcaccggcggtattaacgacgatggcggcggttgtggggtgagcggcggcaggattgatggtggagatggggtggggaacaccggcgggacgagagacggcggcgccggcgtgattggattcggcggaattggcacgccgccgatgttcggcggctccggcacgagagggagcggcgggaagaagatccctttgtcgtcgcagagctccgggtggacggcgaacgctccggcgttgaagactcgggcgccgtcgccgccgttgtgcttcgtggcggcgaggcggaagcctctggcagtagcggcggacgtggcggcggcgtcgtcgcatgggcgcgccgcattgctggcgagcagcttcaccgagcacgacgtcacggaggccagccggctcttggcctccggcggcaggtggacgcggaactcgccgcgacggtcggtgagggcctgctgccggaagacatcccgaccgttgccgtcgtggcaccggacggcgaccggggcacctgcacgcatgcgcaactcacgggcaagagaatcatggactgcaagaagtggacatggctgaaagcctggaacgtttgagatggaggagaaggcccctgcgcgcgcgcacctgataccgcggccttggtggcgtctgagccggagtggacggagccgacgacgacgacgacggatgacggtggttgccggacattcttcccgccatggtgagcggcgagatggcagtggaagcaagagatgaccaccgccacgagtagcagctgccaagcgtgcattcgagcagtggccaccatctttaggctaagaatgcgaggtggattaatttgtgaacgtctcgcctgctactatttatgaacgtgaggagaagaagaatcgagaagcacactgttggatgcccacgtagccagccctgttaccaacttaccattactaacgcgcgagaactggagaattactcccttcaaaaaaaaaaaaccctggagaattatttttattatttaatcctttttattaaataatttaaaaaacaggccctccaaacttctcatgtcatgccaatacttatggcatcacagtgtagcttggccacgctattcagactggtgtagccaaaagttttagtttggaaaacaaatatttggagagtctatttttattttttaagtaaaaatggttaaataataaatagagtaaattgtattgatggtacacaaacttaaaaatggttaaataataaatagagtaaattgtattgatggtatacaaacttgttaggcgagtgcaatttagtatataaacttataaaatgctcatttcggtaaaagaacttgtctagtttgtgcgaacgaggaccaaaatagcttgcaatgttaattttataaagctggtgttgattaggatgtgacgcccatacgtgtaatgagtatgtataagacatacaatatttataatattggtctctactttatccttcatcatggaaacgatgaatgtcatatatctctaacccttatatcattgctcattttttcatatatttttctatgttcactatatatatcccgttctattttttattgtagaggtgtacggataatagcaaccttctcaaatatatatgtatacatagtatcctaatcagcccctattgaagaggtgtatggctaatagcaaccttctcaaatatatgtttacatagtatcctaatcagcccctaaatcaataggattatccatgttcgcctttctttgcacgcaccaaacaagctcatgcaccaaaaacgagtattttacaagttcgtgcattagattgtacccacttgacaagttcgtataccttagatgcaatttaatttactctaataaaaaaaatcagaactgggcaggtaaaatacgaacgaatgtttttttaagacgagacgagggaggtggtaatacattactacatctctccggctgctcgccggattgtattactgtagaacagtttccatgcacgcacaaacgacatgacatatacgtacacacaacaggcagcagactataaattaatatttttataacaaataaaataaatttattatgatcatgtgtgtgtgtcttttacacaattgatgaatagttagctatcacaccctaaagtttcacatttctttagcctcaattcaattaataaactgtctcccaagaattaatttgaattaacctagagctaaaccctaattaataaatacaattaataagtggaaatggtatggtgaggtttttcttgagttccccatgattaaatacatcaacatgatttttactagaatttccaaagcaaaagaaatcattctaataattcaaattcgattatcataattaaattaattgttattcttttttttcctctacttctctcctcaggtcgcttgtcggacccttcccttacctccggccggcggagccggagggtgcaaacgtcgctcgcatgtcctgcacatctcctgcgccccactccaccctttccgtgcagccgacgcgctccactccccgcaactacctcccactaccagaaacattattacctctgacggctaaaacccatcacgaataaatgaaaaaccgtcaggaaaatcggtcctgacgtgtcaacgtcaggaaaataccgtcagaactagcttggtggggaaaaaataatttgcctgacgtttgtccgtcaggaaaactattcctgacgtgaggaaaactattcctgacgtgcgctcacgtcaggaatagttttcctgatgtggattgcacagtcaggtggtttcatacacgtcatgaaaattaatgaccgtcggtagtgtcaactactcccgccgcatgtcgctcccctcaaaatcggtgggattagattttcaaatctggccgatgtctctctctccctctccactcccatgtccgctgcaaaatacgcccccctacttgccacatccgagctccctgccactatataaacgaccctcatgctcacctccttttccctcatccgtcgctcgctcccgtcccataactcgcgcccacgccgccttttcgccgcctctggtcgccactagccgctgcgctaagccacgccgtcacctccaccgggttcgcaaggtcgagggctacctcagccgccgttcgtccgtcattgtccgcagccataacacgccttccctcagttcgccggtgagccctccatatccaccgcctccggtcggcaatggttgccgccgtggcctctcaaacccctctgatcttcttccctaggtcgttctggagcctgtacaccccttgccgccatcgttgtcgtcctccccgtgctggtcgccgtcgtcgtcggtgaggccctcctcttttcctcctccctctccttgccgtgccgccgctcgccgtcatcgggccggcttgtcccgagctgcgctccagtacccgtggaccggtggtggaccaccacggtggtcccggtccacagtggacctggtgctatgtcaccgacggatggggaccgtgtgtcggcacccccttcccctcgctgacgtcagcgtcggcctttaatgcaaaataattgattaaggacttttgtttatagtaaaaacacaatgaatcttctagaattcatatctaatttatttgagctccgtttaagtccactcaagtcttagtgaattcataaaaatgattagaatccattagaaatggtttcatttcctgtttcagtggacttatatagcctgttttgcttgtgtgctttctttgtcacatagaatctggcagttccgacactcacgtctattacgaagtggttgcagaggttcgagcagcaccggagcaaggaaagtcatgcattacaattgatcatattgtacccaatttgtaaatgtctcgctttctattaaatgctacattattttacgatgtcatgtgagatggttcctattacttagccatatgttgtttacctcatacctttcataacttgggatccaatatgattagatattggtttagaaagtgcttagccatgcttagatcaacaagctcttgatggggaatctcactaatatcttagaccttgattatttatgataactttggatatgtaccaccatggtattaattaaactaaaatatgcttaatggtgggccgtgggtgcatgattttgatagacgtgctcatggcatttaaggattggttcgcgggttaccctagaagatttaccatatttaccagaagccagcatgaacaacggctgggcttgtagtgtaggttttccctagctgacgtaccaaggcaagggtgagcgtgatggaatttggatgggccctgtgatggcctttgtggcttttggattcacctaggcacaagaggggatacctgacttggttataaaggaggaggtgatcgaaacctgaaaagggtacaatttgttagggagggttatgcgaagggtcctgtcacagtctccttctggtatgttatggtggtatatcatgcacggaaacgtgtcgtgcggctgtcttgtgggtacagttgtacacctctgatcagagtaaaactattcgaatagccgtgcccgcggttatgggcaatcaaccagactcgccgtgatttgtctcactcttaataatttgacttaatggaactagtttagttcaggtggttggttgggcctattgcgatgtgttgtagcattgtacagtgataattaatattgcttaattagcttgaacaatttactactttcaacttctccttttaaatgctagctttatgcaaataacccttagcctcctttggaattaccttgcatcatacctcctcttggtatgacttgctgagtaaagtgggtagtactcagtcttgctctatcttcctcacttcagaggcagagtacttttcggatggaggttactcagaggattaggctcgtcactgccatcaaggatgcccgtggagtagagtcgccacgctgcgagcgtcaagttgtctagtttagctcgcttttaactccatcgcatatgtaggactttattacgtttataagacatggatttgtgtatcaacttgtcgttcgtgtactctggttggtcctggaaaggggttctaatacacattctgcttggaaattctgattcgtgaatttctggggtgacttaagtttaaacaaaagcttaatcaaattgaacgacaaaggtcagaggagctttcaacagatagagctactcatagactctctcgcttttcaaatactttacgtacctactctagattttgaaatttggtagctgtaaaaatctaaaaataaataagtagccaaaagaaacacccagtttctatttatatccactagctgaatactcattaattgcttctcagaatctctagttctctcagtaggaaaagaaaactcttgctccacaatcacctcctattgtatggctctaccgcactagtggttacaattttttttcatctcttgaatgtaagttttcaaattcatccaccactttgcttcagactttttaagtactcccttcgtcgtttcattttataagtcgtttaatttttttctaatcaaacttcttcaagttgatcaagtttatagaaaaatatagtaatatttttaacacaaaacaaatatattatcaaaatatattcaatgttagatttaatgaaactaatttgttattttatactccctccatccataaagttacacctatttcacatttgagtttttccaaataagttgttcctatttgtagtctttatgcattcaagacttaaatgaagagataaattaaatgttttattagaatccatggagtcatctaaatattcattggttgcatgcttgcattcactccttaattttgtaacatccaaggtgacttaagttctccttggtcttggtgtcaaaagtaatatgtgtaacttttgtagatgaagggagtatgttgctaaattttgctataaacttggtcaaactaagatagttgccttaaaaaaaaggtcaaacgagttatactataaaacagagggagtaacaagtgaaaattcagagatatatatatatatatatatatatatatatatatatatatatatatatatatatatatatatatgtctagaaaacaaatgatattttctttatgtgaaagtgaacaatcgagtgaatcaagtgaatcaggaaagtcaaaatgttttgtcccatacattgaatagcggcttgtcggcatgaaagaactagtggatataaccgaacattcctctctacaattatagcacaagcatcgctagatggaaattcgcctaaaaaaaaacatcagtacatagaatggctttagatctctgatgaattttgacacagtcaccttatatgtctgtactcgtataatttgtatacatcgatgacgcttcatatgtccaaagcagacaaactcactccatccatacatgcgtataatagaaattaattcgatcagcccctatacttgagagatgtatacgaccactacttttatcagaggcctgcaacagcccaaaaatcagtcatctatgcactatcctaagcacaaactaatgaatacaatcgtatggccagaaaggcagaaacaaccagccgttaagagaacaaccaattgacacacatgagtcgacgtctacacggagggatggcagtgttttgggaggttatgcgccttcgttgtcagggaagagaacaaatatacatacaagtttatttggcacactcgtgactcaccccattcacagcttcacgtgcagcggttaggaacgagtgagatgctacgtggcgatgaaactgttcagcgagataatgtttccgatgattatgtagcgattggctccgaatttgtatgcggtgcttgcctaaatgcctgtccatttgacatgtgcctttgttaaccttattgaaattgaaaattagtttgtgctttatcgtagtgagcattgcttatctagtaagtattttaagaactccagttcaagttgtatgcttcatatgatcctcgtatttatggctaattatttttcaatgataaactcataatgactttatcaatatcaaaatataccggtacagtctttcggagatagagatgctcctggatgtacggttgcactactatagaaataatttttctggacgagcatctcaatagattgcagacagacaataggtgtcggcgtttgtaaaaattgacccctactttcgcatacggctatttaagagacccacaggtaaaaatcaattttcgtatgcgtgccacttaacatgtccgcatgcgaaaatacccccattttcatatgcggccttcactactaggaaatcgggcttatgcaacggctagaattcgttgcaatatgcccaaaatcattgcaataggagaaaatgcaacggatttttgtcattaggactcgtggcgcaaaactccgtagcaatagggtttttaccacttgatcactttgccgttgcaaataacaacttattttgcaactgagtgaaccatggcaattaacaaataatgcaacggtgggttggtggtaatagaacgtattgcaacatctgatgtcgttgtcgtaggaactagtcgcatcgcagcaaagcgtggtaataagtgcttaatggcgttgcaaaatgtgtattaccacggacctcaaatgtggtaataggtcgacctcttgccatgctcacaattttagttgctatagatagatcccactattgccacgctatgtctcgttgctatagctagaccctttattgccgctcaaaatatttggttgctataagtgggcacctctattgccactagaattatttggttgtgcacctctattgccattagaattgtttgtttgctataggtgggcatcgctattggcacaattattgtttgatggctataggtgggcacttctattgccaaccaaacgtcttcgacgatataggtgaacccctatattgccacgatgatggcgtagttgctaaaggcgggcatctgtattgcatcgataaacaagtgggctaagcccatataggcccaacaatcaaacacaataacaacccatatagcacaaaggttacagcctaattagcatccaacacaacccgacaaacatccaatacaacacaaaatttacaacccagttaacagccaaatccagctacattccaaatacaatcgcagcaaccaaaatttcaccagatgccgcgtgaccatgatcttcgaagtgagcttagcagcactgcatatgcacaagttaaaacatcagtaactgccaagctgagctcctgcaatcaaaaagtacccggagaacaaaatcacagtagtacaccatggtaataccttaagttttctatcaggcaacaatcttgttttgatttgtaaatcgaaacatcacccccaaaaaagtaacctgagaaggacaaaagtgattactcggtgatgccagagcaacgaagatcacaaagcagttattgccatggaataaaactatagcatccaccatggaagatgattaatagcatcaacaaggaatacaggacaagtaatccaataatgtagattaagtcaagcctactctagagcataccattcccatttgaatagtctaaagtattgggctaccttggctaaaaatgacatgaaaatgtatgccaactcccaaaataaacttaaggctttgagtgcacaagaagcagttattataggtctaatttttttgggactgcaattctagaaaaaaaaaccagtaaaccataggggcataacataccttgtttcttcttgtctcatctgcaccattgacaagcaatatcattgttatatctctatttctactctgtatagctaaatgcaacggtgtccacccatcctgcatgaaacaaaaaaatataaaagaaaaaatcgatttcactgtgaagggttgaactgataagaaaaagaaaaatgcacaatagtacattacattatcaacaacattgaagggccaacatgccataaaaatatctaaaattggagtagaaattgttatgtacttatgttgctagagagaaaccagatcaatgtgagaggcactaacatcacaatgtttactatattcctcattgcagcgttgtaatgtgcggttaggtagccgacaatgttaattaggaactatttataataaacattaatagcaagtcgatcataaagttgaatgattctttatcttggttatctatactaatataaaaaggagcagttgtccccctccaatcctacagaccaaatcacccgaatcgatctctgccgtccatctgcgcgcttgatttcaccaccgcacgatccatccatccacgccacgctgaatacttcgctcctcctccacccgccaagacatcactccacacgcgaagacttcgcttctcctcctcgctagctcctcctcctccccggatgttctgccgccgcgccgccgcatcctcgctggatatcctccccgcgtggactgccgctgccggagcctctgattcttcttcttccccgccaccggagccagtgcttcttccccgcgtggactgccactgcatccccgccgccggagccggtgcttcttccccgccaccggagccgccgcggccggttccaacctcggcaccatccgccagcaccgacgacgaggtccaccgccgcgaccggagccgacctcggccccatcccccgcgcgatgactccgggatgctcctccttcccttgatccgcaactcctcactccagcgtgctccgtgcctccccgccgctgagacactccaccgcggcctgcccctaacgaagctaactctgccgcgcgctcctcgctccgctcctccccaccgccaccacacaccaccgcgccctgccctcgccggcgccgtggatctgtatgtcatgaagcctgtctccgctgctgcacacagtcgactcccccgtgaatatgcctttcggctggtatcaccatcccgtcacggccctgtggtcctaccttccaacggcactctgccgcgcctccagtggtgccgccgttgtaagggtcatagtctgcccacaccacgcactcggttctcacggacgtgtgccattctctcttttgcaggtgagagtgcagagtgcagagtgcttcagctgaaagtgagtcttccgattcccctcttcagcccaatagtcctctatgtggattatctgaatctgaatgtacatcattttctttcactatggcttgatttacactatttgatctagctatcagttcaagtggatacaatcctattgttatcctttcaccacaatcagtagttttctgagaagttaatttctttgcatacactgatgaactctgtagtagattctctgcaggctctttcttgctcaattaattattgctcactctatagcagatcaactctggatttagacttatttggccaagcactatggctaaaatggcatgccaagcttggaacagaaaggtcaagcaatttttccaaccacggtgcagcacgtggcaatggcactaccactaatttctatcatatgtaggaagatccaagttgatgctagcacaggctttggtgaatcactgatgggtgagagacctgcagagttccttgtccaacagagcaatggctgagttctttcagttgtgggatgaaattcagatggtgcagcttcaaccaggaatagccacgactccattcggtggtagctaacaggtgatggccagttttctttctcatgggcttacaacctcttcttcatggcaaagaccaaatgtttatatggtgaactgcataatttcgattctttctgttcatgatgatctgttggttaatctggaaagacggaacgcttgggtatttgagcagaggtctagacctatagagcaattatttggagacatcaaggagatcacgatttggaagtcggctagcattttttatcctgcagtgattatttattagtgttggttgtttattgtggtatgaggttttgcctcatacctttgttcgatagcatagtactttgtactttgtttctccctaaatcttaatgaatttggtgggcctaatcctttggccaacctggcaaatcatttcagtagtaaaaaaatgtgttttcctggtcagatttatatatatatatatatatatatatatatatatatatatatatatgtatatatatatatgatgtctactaggctgaaactcttggcttggagaaactttgttgcataatgtagcaggagctgcagcggattgaaaattgatggtatcaaaggttcttaataatacaagcaataagttgtcaaagaatcattgtttgattttgtagtaccaaaattccaatcacacttagtggctaatcttttttattttgactaaactaatgccacatgttagcagcagtagcagaatttttttattttggtttcaggttttagaactaatgttatttgttgctccaaataatccaccgatattgtcaggtgggagctatttgacttgtgtggctagaagtattcaagtcaattatctgcttgcctcggcctacttcaatagacaacagaggatgctctacatcataatcgtatgcaaagacaggtaatacacaccatatttcccttcatttgcaaagtcctaataaactgaataagaacagataccacattcatatttttctgatagatctcaaatccatatattgctaatggtctacttctcaaattggttttacacctcaatgcttgttctgtattccgtttgccacatattttatcaatcaattgcagttctttgaaattggatcatgacttccaacttgcagcagctaattgcattgtatcacacgttcattacaagatacttaaagcaaaaacggcaatatattggttggctgcttgcacttgcaatgagtaagagcatagaggttctggacttacaatctgaggttaggatcatgttccatatatttttacattgaacactattgcatgaattgcactatttgtagatgttctatagttaatcaactatgttaccttaaatatacatggtgtgttctagattctgaaatgtttagcaaacttaggcaacatgtagattaactatcacaatttatgtcactttttcatatccagcgaacttatctaacttttcttttcaggttacaaaaaatgcaggaaaaatgtttagactgtcgaagcaaatccatcaggaggacaccatggcatctgatgttgtctactatgcatcaaagagattactggttgtttttattccttctttttggttgagataatttacgttaatataatgttttcatagaagtgagccaatcttgatttgtttggttaacacgggttatgtgttgaacgtgtgatccaatagtatggctttgtcatgttctcttatcagctaattgtaagtccttagcagctggaatgctagatcatgactaacaagtgaaaacgatcagtgatagttttatgcgtgatagttttatgctggtgcagacatgcaatgccaaataaaacatggataattccttcttgtttgtgcataattaattgtttgtgcaggcttcttagcactcagtaatttatcttttcgaagtttctatagttgttgctcatatacaagggataattttgttgctcagtctcacaaggacagctcactacctatccatctaaaatctgattacacatttgcccattaaattctactatgcacaacaagaagccacgaattctactatgcataacaagaagccacgattgtgctcttaattcaaatctgaatttgttaggacatattattgacgtataaccacataaataaatccgaagtatatataatatttttgtttccccatttcaaggtctatatgattttacttatttggttttggtccgcatactggtagtatgcctgagagtggttatgttgatgactgttaagagaatgacaagtcaatatcttgctttgatacctttttttttttgcatttttgatttagctaaaaataactatgtactcgggtgatatattttatcaaaaacgtgcattgcacgtgcacgattactagtaatctgaaattccgaactgtgatcttctcccaaacaatatgcttacatgttcattttcatttggcgctatgctgctgcagcagttcagcaaaaatagaaagccttggcaaatagcaatttcagaatcactgcattatagccaatagcagtcatctgatcatgcacatgacacatgactggataagcacatatgatttattttgtgatcatggattatttcattaaagtaatcataaaacaactgtttctaacacatgactggaaattgagtacaacttaagcttaatttttgcacccattaagcactacatccagctcaggaccagtcaggacacaatgtacccaataaaactcaaataatgacatgacacaaccaaatgacaggaaaaaatggaagaatatttgactcataaaactaatcaggttccatgtcacttttttatccgtttacaggatactcatttcaatttatctgtttcagatcagtcacagatcaagcataaaaaagtatttactttgctggattcaagggccattggagcatttcctaaaacaagatatgtgcaagtgcaactcgatctatcaattaacctgacaaaaagaactgaaaaggttacttgggatatttaaagaacaacataagcaagaaattcaaagcctaattatatcattatatataaggcagatattgctttaaaacataacaaatatcagaacattgcagcttgcaactctatgtagccaaatcactgtaatgtgaaagcgtattaactaaactagatgataccccgtgcgttgcagcggacatggcatgacaaacttctcaatttgcaatatgtgtaatagttgtcggtgaaaggtacctggctactggagctagagaaccatatctgaattctgaaatacttagcacggttggcgaatattcctaataaaagaacaaatggcctgcaaaaatgtgcaatgaaaatgttatgatgaaaatatcaccgaaaagatatcctctatactattattatttatcggctgacaaaatcaagttgcacacatctacataatggagtagttgtcagcataccttagctagcaaatcaagtttccagagtgaagatgtccaaagtctcaaatatatccagttttataagttcttgcttcatctgcaacaaaaaggataggtgaaacctcatcatgatcacaagctaaaactcatctgagattgtcgctgcaagataaattatcaagatccataggaacaaaaatcaaacaattctccccaaataccaaatgcctaatttggggaaatagattccaaaagctcagatttagagggaaaccttgcacttgagtacttgtgcccagtaacaataatagatctaaactattagagagatcgacagtacaaagataaaatttaagtgtactaataatcacttaccttgcagcagttgatacaaaactgggatcatcaggactcgggatgccttgtgcaagttacaatttttgaagcaaaaatcagaggcgctgagcactaccattactggaagtgctgcttcacaacgacaggaagagcactgtgaacctgaagataaaaacagccggaagaatcagagatgatggaaaattcattagttttttatagcactgaagcaaaatacaatgtggtgcccaaacattctgtcaaatggcaaccatccatgtgcaggttgtacgaaattaaggatcgatcaaagctataaacagtggatcgtgtaaatagaaaagtttgctacagatgatgggaagaatcagatgggcaaccaagtagtacatactcttcacggatactttgtgatcatgcacgagacagaagttgagctttggtcacactgaggtcagggctgcttccggccgggataccgataggacgccggcagctagatcgacaaaaacggtagtggtagaatagatcaattgcaattgatttctattttgttcggttcctgttgcaaagttaccgatcacccccataagaaaatgtgaagcccagacctggcttagctgatctagaatcagaattctttggtgccttgctaaacaaagaaagaatcactccctgctaaacaagtaaaaataaagaaagaatcaccttgttcctcatcgtatattcaatttgacataatcctacgaacaaaagccatgccttcagttaatcattgaactcatcaattcaaccaaatgtaatcgttcagagaaagaggataaaagatctagaaagactaccttggcaatcagatatctagttgtcagttccagcagccgccggcgtcccgcaaggccacaactcaattcatgctggacgcagcgccgacgggagtcattttgagggccttaggagcagaggctaaaaggaatcggaggccgtcgaaccgcgtcgcgaacttcttcccctccacatgctgctcccccgccgccgcgcgtgccgcgtcccttgacaacgacgaaccctgacgagccaaaggagaaaagggtatcagaggagatcgaggaagaggttatgatggacgaggaaggcgtcgcacctgccgacggcggcggtctcctgctgctgcggctgattggcgactcctcttcctgcggctgctgcgggtgggcagtgggagggtggggcgcgcggggaggggcgtcgggagggtgggtgccgtgccgcccgtggcggtttggagcgagagggaaggggcggggattttgtgacggtaagaggcgtgggagcattaatccatccatgggttaatctaactcgcgacgtgatcattggataagaggatttgacggttagaaataggtgggtatactaaaaaggaaaccgctattttttatattagtatagttagatagatgattctggattgtctatttatacaactttgttattaataattgtttcatttgaaattatttactatctgaaacattatttgaattaaaaggaggaaagcaaatagacttctcggcgatggaggagaaaaagggttgggcctgcagcccgaagagggaggaggagggagagagaggttgcgggctgagggagagagagagtaatgcttgggctgaaaaaggcccaacgacagagagatgaattttaatttgttttttatttattttaataggttaaataaattttgtggtattaaaatttgttattgagctccgaaaatttaagaaaaatttcagagaataatttagaccacgtagaatattaaaaaatatctccggccatgatttttaaaggaaaattttagtttcatcattaattcacttgattaaattgctttaacttttaatatatttttctagaaatgcattatataaatctatgatgtttgctttgttccccttatgacaaattaatatttgtcacgttgtcccattgaaatactttatgacgatttctagttggtattaataacgaacacctttttttcgtcactaagccaccccatcttatactaattgtcataaaatggaatgtgctaatgatgaatagcaccgtcgtcacgaggaattcgtcacagaagatcacatttcttgtagtgtttaaatttaattttagactgatctttatgtttcaaatgcaaaaatcataaacaacaaaattgtagaacttatcgagatatacaactattgtattggtcttttttcaaataagttcatttgaaccgttcaaatatttaattttcaaaatttgataaattcgaataaaatttggggttaataaatgatttcaaatggaaaaatcaccaaaaccaaagttgtagaactcatcgagaagcaaaatttttattttagtcatttctccatccgactctatttgaataattttaaattcgaaattcaaagtttgagaacttcaaattgaattttttattagtgaacgacttcaactgaaaaagtcatcaacaacaaagttatataatccatcaagaactataatttttattttggtcatttcttcatccgataaagtgatagtaacattgttcacaaattttacatatctcccatatggttttataaattataagagaggctgtgtaaattctgtgaacaatgttactatcactttatcggataaagaaataaccaaaataaaagttatagatattgatgagttatacaactttgttgttgatgaccttttcagttgaaataagttagtatttgaaaatgttgtttgaagttgtcataattttaaattcaaattcaaattattgaaacaaattcatatagcaaaatgactaaaacaaaagttgtagatcttgataacttatacaactttgttgttgagatttttttcatttgaaatcatttactaccctaagttttaatattttgaaattaattaggaggagggaggcaaaatggacttcttggtgagggaagagcaaaaggtttgggccggcggcccaaagagggaggaggggaaggggaagccggcccaaatagggagagagaggtgcggattgagggagggagagagtaatacttgagccgaaaaaggcccaaggacagatagagggaatttaatttgttttctatttattttaataggttaaataaactttgtggtattaaaattagttattgagcttcgaaaattcacggaaaattttagagaataatttagaccacgtagaatattggagggaaggggacaccgcagccgcaaaggtgatagcacacgcgtgccctgatgcggctatattggaggcccacataaacatgtctattgcaacaccagtaatcgttgcgatatatacaagttattgcaacgaggatcatgttccttgcaataagcatctagtaattgccaccactttaatcattattgcatccacaacaaaccgtggcaatatgaacatgttgttgcatccagtggcatccgtcgttgcaatatgcaactccctcttgcaaccccacccaagagtaatgcaacacaagaaaacggttgcgatattggcaaactaaagcaacgcaaacttatgaggttgcagtatcacatttcttttgcaacgccaaacatcactaacgcaactctgaaatattgtggcaataggcccaacgaattgcaacacaaataggaaaatggttgcatcaaccccattcttttgcaaccgaaatccatgcatatcgccacacacacacgccgttgcattactataacaaattaccaccatttcacggtttggatgcgatacaaaaccctattgcatccacatgagtgccattgcaaggggggactcgtggctattgcccgaattcctagtagtgttttttaagtgacccacatggaaatatcacccttcctatttcaacaccttttttatgctccattcctctctctcccactcctactaccatggcccactcctcctctctcccccactcctcctcagtccggcctcctccctcccgacaatgggcaccggcggcggcagatgcaacggcgggtgtggttgacggcagcgtcggtgggtgtggacgatagtggtcgtgggcgatggtgacggcgacggcgacagccccctctcccctacccgcgcggatctggcgatgggtttgagtgtgaggctagcggcggttctcccccgccctccttgcacggatccgacggtgggctcgagccggatgcagtggacgcggtgggcggcacggtggtggcaggcatgccggcggcaggtgcatacgacgacggtggcgctgatcctccatcggcgacaatgggaggtgtggatccactggcagcggagacgggagaggcagatccgctagccgcggctggctagggttaggttttgatttttggaattttttttgtgattttccaattttgcgtgccaacggcttatgcgtggcatgcggaaattcggttgtcgcatgcgggtgcaccgcctgcatgaaaaaatcgctatattcgtagacctttccgggaagacggttagtctaaccgcatgcaaaaattgattttgaccgtttggaaaaatcccttttgtagcagtgttgtgtgtttatagaattaagtatgaatgtattgtgtttataatgtggtttaaaaaatacacacttatatgcacatcttcaatataagtacacacttatttttacatcgtaattatgacacagacaaccgacaatgtgtatcttaacacactcttaggtaggggtgaaaatggtaaccgtaattaccggccgaccggcgttcgtttttgactttctactggccgagccatatggaaatggtaatcgaccgaaacaaaaatggaaatggtaaaacatatggaaatgaaaacgaaaatggttttgctgttataccaatcgtttccgtatttaccgtattcttatggaaattaccgtttcttataatatggtaattactgtattataaatatgtcgatatttatagggcatgtctatacttgacccacaacttacagattgactgactcttcaatcaaatctctaacttttgtgcatggctaaaatgaagttaatttataatttatatagtataagcttgaatttatgaatacatataacatacttatgtaaagttaaatatatgtttttatagtttaatgttcccgtatttattatcggcttccgatctgtaccgacaagtttccgtccgtattgttccgtttccggttttccgatatttccgatattgttttcgtttccgactttaccgtttccgatttcgtttccaagaaaaatatggttacggaaatggttgaggctgttttccgatcgtttccgaccgttttcatccctactcttaggtctcaacaaaataagcaaagtgacatggcataggattagtctcgtaacacactcttaggttttaagatttcaagctataaagtgacatggcataggattagcctcattcattgatcatatcgttcaagatttcaaacattgcgagaaagttcatctcacatgtcgagactcatgtcaaatccgatttcatactccaattcactgcatttgtatcattcaagacttcaaacacccaaatccaagcaatttatctcacatcgattgtcaaggctcatggcagttctccagtttcatctcatattgtcaggctcatggcagttctccggtttcatcctcaatcggtttggttctatatcacaatcagtcatctcttctcctaaatctcatagagctgttgttgacagctgttaagtaccaaatttacgtcatcaatacctgcataaatctaaaagtataagacatccaacatagtggtagggtttatttctaacaatttccacgagtgttagtgtatatttgatgcaggtaaaaacctaccaaagttgagacaaaagatacataaagaaggaggtgaattaaacttccaaatttaagctatggatttttgagcccacaaacctaatgaaacaagagcaaatggaccttcccactatacatatgggctgagggattctccactagtgtccacaagaaaattcggggcaaagggggccagaaagggtttggccgaacccaaaactagcctgttcggccccaaatttcacaggccggtagataacgacttgtattacagttgggaccatttataccaatggaaaccatcatagagaggacatgtggaggctcaagagtgaagatgccctttggattccatggagcatcctcatcctcccaagcaagctccacctataaataccccttctcatccttcaatctatcacatacaactttgagctgaattataagaggatctattgtatcttttatacattaaaaataggtagagggtgaagggaagctctggaggagtgcccagaagtttggcgctctctccgacttctacctcgacgattgtagctttctaggaggaattctggaggggtaccagagctgtcgatacactctactccgggttcggagaacttccattaagtaaacatttgggatcctttcttatcttatttaattatttagtctaattaagatagatttccatctttacgggttcattgtttagtattcgtactaggactccggatagagaaggaagttcctgcgcatatattagagtagtaattaataacttagatgtggtgtctaggttagaaattacatttgtttgttgtgtatcccacagatttgtcagaggtagacagcaggtggtgacagccctgaatcccatcccagtaatcttccacgttcagatacatcatagagctatggccggaaccacgctggcagaccagcaggagtcggtgcctgaagcaacagataggaaattacctttaacttagcttagataattaaaacaatagaaagtcctttgtagcctagccagcctacctatagttgttgtccttggatcgtctttgccttaggtagattacacacgttccctgagttcgatatccttttggggtcacccgaaagtgaagtgctgcagcggtattccgtgtgcttgcggatttatctgtggttgtaagaaataccaacagctgctctagttatgggttttatctaatatttccatcatgagacaggtattttgtttttcatctccgtagctttattttggtatctaatggtgcattaaaatattttcattatatcgctctctgtttttaagcttgcttatcagcttagttattctcttaaaataatgtttgtacaggtgctaactaaatattttatcttaacatttattgatggacaatcgctaacaagtactaccttagtatagtccgacagaacggcagaaccgcacaagataggaagcatgcttcactgcttcaccgttttcactctgctttgaagattgtttttttctagaaaatttgagtgactaatctcttcctttgcagcacacacatatattgaacctaaatgtataaccgtattatttgatacgcatgtattgagatttctcaattaatatatacattacaacttaaattccaaatagtgttcaccttgttttttaacatgttcttagaatgcacatccttacaaggatagtaactatttaacacgcaaatgttccgcagcaacgcacaggtgtcatctagttctactaatttcatgctaaaatgctactctatctgtctatgaagcctataaatattttatactgtcttcaattaaatacattaaccattaatttatttcatattatattatcaacaaatataaaataagcatcatatgaaaatattttgaaaggcgaatctattgatacttagtatagatatttagtatagatatagttagcataattattagttaaaagttatagactttgattttaaaaaacaaggacgctctgtaatttgggatgaatggaataccaggtacgggcgaacagtacacggccttggcccaaattggtgttgttctttgggggaataagtgcattttaggttacttaacttgacagcgagttcaattttcatccttgaaccaaaataccagctacaatgggtccatcaagtgtcaaaaccaatacaatataggtcccatggtagtatagcgagtggttttgtccgacgttgcaattcgacccaagtcaacaatgctgagagtcagcgtagacctcacatgttagggcttcttcacctctctctctctcttcacctatctcagtattcctccccttgttcccatctcatcagggagcaaacaatgaggagaaggcccacggcggatggtgaggaggaggacggcagggagaagggcaattgccggtggggcgaagagtgattacaatgacacgtcgtatctctcttgagcttctcttctctcttcctcactatctttcttcagtcaccatgcaacgatgatggtgtggagcgggatggccaagcttgtcgtccatgccccatgcatgaccctcacggcaaagcagaagcagagaagacggcgctggtccaatctccatgcggcttttcccctccatgtggtcatcgccatgatgcccccaacagccaccaccgccttccttgccactgcgcccacgcctcctcaccgacggccttctcaccgcctgttggcagccttctcatctcttgttgtgtttgaggtgtcgagatagatgagtccagctaatgtgggagcaattattgggttttgtggcaagtgaggtgttggtatgcggctaatgttgaagaatatatcggcactgcagttgttgttgctgttgctcccaatatatcggcagcacgaggaggaagagaagctgcgaatcttggttggtcaatggaggtagtgaggagactgccatgccggagtcttggagagacacggaggcgaatgccacgccgtcagccttagtagccgcgtcagactcgagcctaggaaatgggaagggtggtggcagtggcgccacggcgaggaaagagcttgcagtgttggcttgcgtgtcgttccacatgttatttgcatccgcaggcaagacagtcgcgacggtaatggtgttggggacgttgggcgttgtggcgaatgacgtcatgctgccattcatgatggattgactaaatgctcttcggcaacctcattgatgcctccggtggtgcgcttggcatccacgacgtagtcaactgggtctccatggtctccctcattttcatccataaatacagagaaaccaggctccaccattgcccttctcccagccgttgtcctcctcaccacctgccactagacttctcactgctcgccacctagcgagataggaactgggggacgacaagagagataggtgaagaggccttgacatgtggggaccatgttagacttgggtcgaattgccacgtaggataaaaccatccgctatgctgccgtgggacttatattgcaccggttttaacatttgagggatccgttgtatctggtattttggttcaagtacagaaatcaaactcactgtcaagttaagggacctaaaatgaacttattccttctcaggccacagtgagacgaacaggctgtagtatcactgtatcaccccattgttaggttggaaaaagtcgacttagactcccttaattgttcaccgaatctaattcgtaacccttaactagaaaaccgggtaagacgacttcccgaattattgaaaccagtgcaatttgactcctctagcggttttggagggcggttttgctaacgtggcgctgacgtagcattagaattaaaaaaatatctgtggggccaatctatcattcacacacaaaatatattgtgggacccacttacatatggagcccacatgtcatcctttcccttccttcctcctcctccctctctctctcccttctctctctcttctctccccttcggacgcacgcaagaagcgggtgccagatcggcgacggcggcggccaggggctggaggggcgacgccggcgtgcgggcgagggctggagcggcgacggtggagtgcaggcgacggccgagccaccgcctgccccgtctccaagccggcccaccgttgctccccctccttaaagtcccagagctgcagcctctgctctcccccattggtcgtcgccgccggagcagtagcagcagcgccgccgccgcctgcaaggatgaacgggaggccggcgacctcagccggagcggcggcgaacctctgcagcaggcaggggtgctgcgacggcggcggcggccacagcgaagctgcgacaacattggactgaagtgtgcgctgatcgaaggcggccaccgtggcgtgctgctggtcctgcgagaacgcgaggtggggtggcatcgccatcatcttgaggtggggcaagcaagcgtcgcctgcttgctgctcctgctgatgttgcatttgcaatggcttgctgttgctgatgttgcaatggcttgttgccgttggtgttcgagcagtggaggagctcggcgaacgcgccgccgccgccgttgtaggcgttgccattgttgtcgcagggggcgttggcgagggagagcacggtccgccgttgccgatccggctcccgctcctcgcgtgcgtctgaaggggaagagagaggacatgtaggccccacatatcggtgggtcccataatatattttgtgtgtgaatgacagatgggtcccatagatattttttttaattctaatgccacgtaagcgccacgaggataaagactggattagcaccgccacatcagcgccacgtcagcaaaaccgccatcctaaaccgctggaggagtcaaagtggactggtttcaataattcggagagtcgtcctacctggttttctagttaagagtcatgaattagattcggtgaacaattaagggagtctaagtgggctttttccttgttaggtttgggccatgtgtggggcaaggccctggagattgagcctaagtagtgccagcctaactgccgctgccacgagtccttttttgaaaacaaaggatttaacagattacgtataacatcctaaaaattcatatactgtaacaatcaataacatttttcaacctttaaaactttttatcagtattatttgcaaaaaccctaagtgaccttttcatgtaaaattcaaaaacaataaaagtttcaaactataccgttgtcaaaatcgaagaggtctattgtcatcgatatagaaatctaacaattatatttgcgtagtatctctcgtgagagagatgcatgtcaatcaaactagcgattttctataaaggttcggctccttcacgaaataataaccctacatttgcttggtactcagtgtggctataaatgggcatctggtgtctagtccaaattactatattctcgtcaggagttccaaccagaaggtggttggaagatgggccatcgagaactggtttgatctggttttacttagctcgatatttgatctgttgttgtcttattcttggcctcctcttatggtcacatgttaagtttctaaactactccctccgtcccctaatataagggattttgacattttgctttcaatgtgtgatcattcatcttattaaaaattatttattttatttgtgacttactttattatccaaagtactttaagcacaactttttattttttatatttgcataaattttttaaataagacgagaggtcaaacagtgtaaacaaaatgtcaaaaattttagaaggcatactctctatgctacgacttatggaatataccgataaggtataccttcacgtgtacggttggtttccgtatacgctgttaggagtttgcctcaaattacggaaaatatatctatgagttaaggaattgccgaagtcctactcggaaggggtaaaatctctagtgtatcgtatcggtttacataatctccaagtcttacatggggtcaaggtggggaaaggctaagggcatcgcacctcatagccaacacacccaccaaagtttactaagccggagtctatagagtcaattcgccgggagatctcgtcgaatccctcgaccatgatctcgtcggtattatttgttcagttactccctttgtaatctgttttcatcatcatcaatcccatataaactggaataggactattacctgataaggggcctgaaccaatataatccctgtcttttgtctgttttgatgtcgtactacgtagatccctgttccaacgtaccccaataccctattctttcggtctgcgagtatcactcgtcgacaagtactaagctacgtgttctgtgtaaaagttttgcatacaaaaatttcttaaaaaaattaaatccattttcaagtttaaaataatttatacttaattaatcatggctaatgactcatttcgttttatgtgtcgctgagtagctcagcccgaatgctcattagaatgcatccttaaggccctctaatatcttaggtggacaagtacatacaggtattgcagaaactcttcggtatagtcctgatcgagtccgaccatacacatctccatcagatgtcgtttgaattgtagaactaagattttgtaaaaacagatatggtattttataatgaatatttagaaccttgaatgatctcaaataataaaataatcaacaagaaagttgtagatcttatcgagctttgcaattttgctataaaatgtcttcatatgactgtatgaaaaaattatgcatatatccgaataaaattttatccatctctgcagatatccgaataaaattttcggatagtttccgaccgtttcccattccgacggatagtatttttactgtattcgatttcatttttgaatccgagaatttctgaatagttacgaccgaatctatccgaatccgaaaaatggtccggattgacggaaactatccatacaagtttcaaccctagctataggctatgggaatggtattggagggtatttttggtactaaaagtaccagatgacgtgccgtgaaatttctcgtgagaggatggttcactcgcctattccaaaccgagcaaatacgacaatatccaaacaaaacaaacacgttgtacagaaaaagtgacggagtgagcaatcagagaattcagaaacgaagtcgccaaaaaccggtgaccggctccgtagaacaaatccaacatcggccatgccgccccgccaagaacgcgtacgcccgaaccaccccaagaggccaagacatctgaaccactacgtggtcagctttgacggaccaaccgaacccactcgctcgccctctccttcgcgccgcggcagctgcttctgctgctttaatttcgctcctcttattcccttcctttctgcattgttactccaaacccaacaacgagaattacaaagcaagaagctatctgcacgcgtggcatgcagctgctcctcctgctgctcgccgccgtcttggtggcggcagagccggctgcagcgatatcgacgatgcccatggagctctacttctcgccgggggagctcgcgcgtattgccgggtacggcgaggagccggtttcgaccgtggtcgtgtccggccaggtcgcctgcgagctctgcctctgtcccggctccgacctcctcaccttcgagctcccaggttagcaataagttctgaacagtttggtatattctacttgttgattcattaatttgatagttccagcggtgctttctttcctgattgcatgtttgatcatggacctgccttgtgtgttcgaagttgacatttaattagctgtcagtgttcttgtcaaatcaccgtgtttaagttcttttcgcaacgcctgtgtgcacagcacaaacgtttctaattgattgattagctagattcctctagctttgatagtagggaccgtagaaaattatctttatggttaatcttccgatatagtagtgttaattcttattcagtaaagaatttttatattttcaaagaggaatgtagttggatttataagaacaaaaacatatatatgacgtgaggtccctcgttgtctgatgaaccgtcataaaatgctacgaaaaacattttgcattagaaacaacatcactttgaactattcacactagatgatccttttctccgctgcgattatccgggcggtaaatgcatggtgacaagccatgacaaactttgaggacgtgtttagataatatgatatgtgtcaatgactaaattgattttgagcaaaagttcgaggaccatattgattatttaccccatgtaaatcacagaataaatgttcgtaaatcaagaaaagacactcaatatagcatgtgtggtattagacatcatgctaaatttcgagatagaactcatgtttatttttgagatatgaactgataaacaggaaagcaaaaggataaaacaataaaaaatagatggccgattgttaatttcatctctcattcaatttgctctcaacatattgtgctgctgtttagtataagtattttcttaaatatatttttttagtaaacttaattatactttaaaagtttgaaattttttgctacagtacactctagatttgtggtgtttcctccaccacactttatctgtggttatttcataaaagacactccgaccattttgtgatggagagagaaaattttgtaatagatgaatttactcttggaccaccatgcaaaatttaaatttgaaaaaaaatggttgaacttatacatattttgcaaaatgcaaaagccatcccaaattgtggtaataaaagatttcgggtgcactgcacataatgagaattaccaaaagaaaaaatcaaacaaaagaaattaaacctggaacaaatataagtgaaatttaaacatatttttataaaatgttttttacattcataattaaggacaagttccgaatgttgcaaaatattgttaaattcagttaaactttttgcaaatttaaattttacaagatttccctaagggtaaaggtgtaaatttactaagtttttccttggaattatttatttttcttcttctttttgaagaaaactaaaaaagtatactgtatgtgtaaccgtaaagacaacggactccgagtctttggagatccttccgaggtcgctggctcacatggctcacgcgtagtagtacgtactagcaggtcaccaaaagcagcagaatcacaggtcctgtactgtgctgttagcctaccatccggtgtcccgtcgctaaatagcccagtagtccccaaaataagtgcagccgtggatatccgtgctcaacgtttgaccatccgtcttatttaaaaattttgtaaaaaaattaaaaatatttaatcacacataaagtactattcatattttatcatctaatagcaataaaaatactaatcataaaaaaatttcaaataagacgaacggttaaacgttgaatgagaataatgcaaaatagcacttattttgggacggaggattaccaagcaagaagctttttttctacatgcgtactttggtatacttgctgtgttctggtgggcatagtacgagcgatggaacggaacggtacaaacactgcgatgcgtgtgctgttgacaaacgatacgtgccacgcttaaaagattttcttgttttttcaagtgaggaaacgcatatataggtagcgtttgggaaatgaaatgggaaaaagttaacggggtttgtgatgggagaaaaaattatttccctcatttcgcatgtgataggattgggttatgattgtttgcttggttttgtcaaagaaatataccctctttccacctggaatgaaccgagtatttaacctttttaagttatatttaacctttattttgagggcaggtttgtaccttcacacccattcagtacccacccccaataacccacctccttcagactatgttcggttcttttctttttttaaaaaaaagaaattgattagaagggatttattttatatctattatggcgtaaatttatttccgctcaatcccctttttcctccaaaccaaacgaggctcctttaggataattatggtgggaaatgagctgaatatttcaaaacctttttcttttccccatcatccaacaatccaaacaagggatataaaatgcaatatccaacctcttattttcactcctaccactttttccccttatccaatcaaatggcaccttagagaattttatcatggttaccttttctttttcccacaaaacaaatattcacttagttatatattcttagatactctggtggctcgcgcatgtgacattttcattgtgttaatgtatttataaaaaatataagtgaaacccactctcaattcgacacatatatatgatactttatatcttataaaaatttggacatgtttgggttaatgcccaaacaaacacaccaaaattttgtcagtgctgaaacatgtgcttgctgtttggtttcctattaacaatttttttttggtaatgccaactcacccaatacaaatgttttgacaattcatattggttagaaatcttcatatcttttggggaaacatagcaacttcatggttttagcttctggacacgataaaagttgatctttagggaaaacaatttcaaagtgtggttattttgctaccggacattgcataggttaaaatattcgtttaccagagaaaaatatggtaatgagtggtgtaaaaaaaaatttcaaccattttcacccgtatcagcaccaatgtcgtagaagcagtaaaagcagagcctccttgaaaacatgcatacgatgggttccttaattagggctttactcggagtacgccttagcagcctgaagccaataaatatatgtccttccaatcataactattaacgtttagaattaaaacttctactgtcaattttctattaaaacaagtttgcaaaatctaatatctaataattttatgatatcatgacagtattattttacaaatatactcttacgatatttttaattttaaactaagcattcacaaagttaataatggtcaaagtttcgaattttggccatttttttgtcataaattattaaatatgtatgagcggattgcggatccagtaattaattgtaacttcagttttcttaacatgtgcccgaagtggtattaagccaaaatgccattagaaatgcttcatagtagtgatagcaaattagggcatgtttagttggcaaaaaattttgcccctacatatcatatcaaatatacggacacacatttaaagtattaaacgtagtcttcgccaggaaactgcgggatgaatttattaagcctaattaatacgtcattagcaatgtttactgtagcaccacattgtcaattcatggcacaaagtaggcttaaaagattcgtctcgtaatttcctagcgaactgtgtaattggtttttttctacatttaatactctatgcatgtgcccaaacattcgatgtgatagcgtgaaaaattttatttgaaaactaaacatgcccttagaaacgaatatagtaaaataaatattttaactagtcttatccaagtcaatcgagacagagttagtttgcgtaattcattgtaaggtcaagtctatcctagaataagataaaatcaaaagaaagaaaaggcaaataaatcttgatattgattactttcagtatggcatcacaattagacagtgccataatcgtcacgcctacaatgaaagaaatggtcaggtgtttgtttggtcaacaagcacaaaccacatacagtaggctagatttgctttcctatctactactggctagtgctagtatcgcctatcatgttaaaaagctgatttagatgctcggaaacaaacgaaccagacattcagacatggactacccactacccagccgtatgggccacgacgatattgtgatcacttatcaccctgacaagtagttctgcgagcgagatgaattcacccgttacatcaaataatggcgcttgcaaattgccattcattttccgtctgtgtcaacggatgtaatgtaatttgtattttgcaaattcccattcatcgtcacaatcattttccgtctgcgtcaaatgtatgtactccctccatattttaatgtatgacgccgttgactttttaacaaacgtttgatctttcgtcttattcaaaaaatttatgtaattataattttttttattgtgacttgatttatcatcaaatgttctttaagtatgacataagtatttttatatttgtataaaaattttaaataagacgagtggtcaaacgttggttaaaaatcaacggcgtcatacattaaaatacggagggagtagtatatttgtagtttgcatagtagcgtgagcgcatgaatttgatggtctccagaaattcctttgtgatgtttacctatcgtcgcacgatatatagaaggttcagaaaggatttggtgtacaagggaaaagaaaaaaggtacgccctttatagcttggtttgagtgtgtgatgaattcgtcactttgattataatgagttcgtttgatttgaggaatggaatggacgtcacacctctgttataaaatcagccccaatatatacagaacgaagaagaacatccaaattaaacgtgatgaccatgcagatatacggtatttcttaatgagattcaactaaaactttatatcaccgggacactgattatagacactcctagctgatccaacgtattacagtacatccgggtatacatgactctcagactgactaagccactggctaggcgtacccatgccattgatactatcaccatgtggttagaatcagtgatgcatctctacttaagagagagtctaggacatagtccgaatttaactctatcatacacctattacaactctaaattctaaactgtaatcgactacatacatatattcgacatatactctgacgaaaacaacttccatgctcacttattggataaataatggagtcatttctcaaattatgtagaatttttatttgtgaggatgataccatgatggatcaattattctagatggtttgattcctcagaccaaactgcccattagacaacgtcatgacaccattgaaattgaatattttcgtatgactgaaatctagcaaacaaataccaaatgaataattgaactctagtgatcaattgacaaacttactgacacgactttctgtgcttaatcaagtattgacaaattgaccttgcaaactaaattttcttcaggagccaaggtagaagtagcctgtgaaaccgaaggccccaacacacaggcgaactctgtatttacagcaaccgatgagttcggcaacttcaccttccacctcccttctcggctccacgccacaccaagcctcgagaacgcctgcgtcgtcaaggtgctccagctccctccagactctgcatgtggccttcgtcaccgtcccgccgcctcctaccgcatccggccatcgtcctcgttgtcgtcgtcggctgatggcttccgcgcctacacggccggggtgatacggctgcagcacggcggcacgccgtccggggagtgcgtgcaggtagaggacagagtggataagtagcctaagaatggctggtggaaatcgtgcattgggcgaaacccagagatttcatcgaccgatcgatcagttgcttagttagataggagtagctgtcttctggtttctccaatttgagaaattgtatatggagaggagagcggaggtgttgattaggtcttattaccaagcatgtaaatggaaaaaatgctgcaaattaagtacatttcaggagtcagtttgagttatttctcataatgatgacgaatgatttgactaggaacattttggaaaatagaaaaaagatatagtacgttcagggcttcaggcaccattcgtcacaatctgtttgactatattccacatgtaaccaagtttccaacatcaggaaaggacctgccaagttcaaaaaaaaaaaaggaaaggacctgcctgcaagcctggttttaaacccaaaaccggtgtaaaataccggcccgcagtttttttcagctgggctacaaatgagtccttcgatgacatgtaatagaaataagtctattttgcctccctcatccttgcgctcggtcgaatgacatccctcaaccacaaaacaaagtagagcatcttccccatctctaaagaccggtacaaatcgaaccctcgggtgattttggaagcggttttatactatgtggtgcttactgtgcattcaagatagaataaaataaaaaaagtgaaagtgggccccacatatcggtctcactttctctctgcttctacccttttctatctctctagtctccctttcttctccggggtccaggaacagactgatggccggcgatgcctgcgaagaggaggagaaagagaggtcagcggcggtggatccgccttcccgtgcccccccacctcggcctacggcttaagcagctcgccgacactgcaggggcattggcctcagccggggacatatcatagatgaaccggagcagcatggcggccatggtgcggcacactttgtgcatccagagcgtaccagagcatcccggctccgactgttctaatcaacaccaccgacgctccggaacaacgtcggtcatgaaagagtgagaagtgttcgatgcagaaaatgtaaacaaaatgtacttttcccttactgcacagtctgcagtggcttctgttggatggcctggtccatgcgccggatcgctctcgtccccttggtctccggtggaaccaccgccaacgtcggccatgtgagaagacgctgtgcggctggacggcctctgcgtggctagatggagaagacgatgtgcggccacggggaacgcattgagggtgacgatgggggatgaagtggataaccccgtgatatgctgtgggcccacatcgcgtgggtgtgtgtatctttgtattctaatgtgtacggtagataatgcataaatgtcactcgagcgcgggaatacatactgagaggaatttctatgcacgaatcactaggcacatcgtgtggtgcctgtctggggtacacatcccccctgcagataaaaaacttccgccggtcacgacacctaatagctggagaagaggcatggccggcgcaagactgccttgaggagaagcataacagagcctaatcccagagcaaaaccggataggaggcggaggccgatctccaccgccacggataggatgcgaagtgcgaggtgtggggggacgggcaactggatccaccgctgccgagctctctctctcctcctcttcgcaggcatcgctagccgtagtctgttcttggaccccccgagaagaaagggagattgaaaagggtagaggtggagaaagtgagactgacatgtggggcccactgttattttttttggctatctagaatgccacctaagcaccacttaggacaaaaccaccagaggagccaattttgccggtttttggagatgggagaggtgttatatccggttttacggttgagggatgcgattcagggcaagagggaggctagacatcccatataatatgttttttttagttcacattttgtatagaaagaggcccatatctaaaaattggtccataacattcgcaagtaatacacccgcagtcaaatcaccttagaaaaatggcgccgttaattctcaatttcataatatttgggcagatgacctcgttactctttttttaaaacgagaaaccaagaacatttggtctttatattaagagaaggtttcttacaaactcttgcgctttcattcttttgatcggacgcccgattgaaagagtagaaaatcagacgccccgattgaaagagtagaaaatcagacgccctctctacctttccatactatgctaggaagcaaacttacacttaggggctgtttgagatgggagggacttattttagtccctctcaccaccttactctccctggtaccatacggcagtgtgctacatgtagtctgcatgcacatgcacatgcatatcctactagagcttctcatcacttctcataaatatatttttaaatttttaaactaccttttctcttaaattactcattttatttgtgatccgattgcaccactatatttattataattaaatcttcacaataagttgtcacatgactatatttcgagacttcaaaataaagcaatgtgcaacatttaaaagtacattggaaaattagcaaaaatattttttcatcgaaatataatcgtgtgagatcttaatataaaattaattataacaaatgcaatggtataactataatcatatcataaatcggataaatattttatgagaaaaaatattttaaagtttgttaaaagaggtgattttatatggagagaagaaaaataatgtaatgcataacggcagcaagatgcaacactaaggccatataaagagtattagggtgcatgacatatatagggcaacaacgctcggaggggcgctcgatatcttttcgttgcatcggtcacccgtcttgaatcaatttccatgcctattgcctctgatgaccattagatttttcctttccaaaataaatatacttcccagtgctacattaatattaaacacaattcccaatattaaaaatattcatttacaaaaaacaaaagggatagaattatttgaccacgaatttaggaaaagaagcatatatatatatatatatatatatatatatatacatcaaatttgattaaattaatatgactttagaaattaaaatgtttataattaattaatcccttcgatccaatagttctacgggcaatcccaacctaaaaactactacatttgtttttcatatatgatgtcgttgacttttaaaataagtttgaccatttgtcttattttaaaaaatatataattattatttattttattgtatttgatttataatcaaatgttctttaagcatgacttaattttttcaatatttgcacaaaaaatttgataagacaaatggtcaaagtttgttgaaaaatcaaagatgtcatatattaaaaaacagatgtagtatcaaatagttttcatacttgctatgttatgtatgcaatatatatagaaattatataactagtgagtggtttcttcaaaataaattctcgtccaatcacctctcttctttctacttttaatttttatccaccaatctctttttttcttagttcctatgtatagctagcttcttacatggaaatgatttttcatcttttctcatctctccttattaactctcttgtcatctctgtctttttttaatgtgacaatactattaaatgatatgtaaactataggattgggactgctcttagccaattctcgtcaaaactagtttaaaaaagattaaatttcataaaaccccatcaactactactatagtccaaaacgcacaaaaccacatagttctacacatactcccaagtattatggtgctaaagtttcacaaaaccacactattatccaattttatatactcctatatgaaaattttaatttttttacttacatgcatgtaacatttatacgatagataaaaacttataaatttaaaaagtgattgtataacttaataaagctgtagtagatcaaagttaaaatgattaatattgtggttctgtaaaacttttttagccctaatacttgggattaagtaccacactagaaaattagcgtgccgattggcacgctggtaaatttatagccctgtgtgtattatcatgtgtactacataagttatgatttctaccaagcaattgctttcagtttattaaaaatatcaacatggtcatggtacttgtcttaactgtatttgtctatagatttttcaacaccgtatgaaaattgttggtgttacttgcttatgtacatgtaaattcgcttattttatcttaattttcaattaaacctatagtagattacatctatttgaagatttttttaataatgagaatcttgctacaactttttggtgcttttaatttcgctatttactgttttattttctagacatccaggatgttactgtcattgtgttacatgcctcgattttgatataacatgaagtaattgcatttccgaaaaaacttaccgtgtgctagaaattctaatatcgctccattccttttatatttattccgttttgtattgctccatccggtcagaaatatttgaccaaacatctgtaacttgtccactgataacttctcatagcttatatagcttagtttatcaaacatgggaaaataacatataaaaaaatattataaaattactgtcataatcttatgaactcaaactgatgattaaagttcataaaattgactgaaaaatcttagtttaaatgtaaaatatttttctatcgttggagtacttatttttcttttctattttttctttagtattgtgtttgctaggcatgcacacgcctaacacatgaaaagagactttcttgatgagagtttgatatgtgagaaaacatctagtgtgttttttattctttttcatgctataagggtatatgggcgtcaggccctgatgtgcactagggttcccgatcttccgaaagattctaataaacaacgatttgggcagagtcgcgacacaaatcgatccggcttcttgaacgcgcatgctcttgagccccgcaatcgcagcaccacgtctcctctagttatctcccgtgccgaaacgcggatgacctcgccgagaaggctaatccctgtttgccaatcgaagaacacaaacaagaacgagatagaaaacaaccaaaattgcagatgaatgattaagctcactagttagggtcttacaaaccgatctagcggcgaaactgttctcgacagattaatctaagcaaaacccaactctaaatgatgacggctacggattaagtacgattaggacgtcctagggttgccctagggcgcacacccccttggctaagcccacgacacaattacaaggcccaaaacccgagtcagattcggactggatgagatacgtggcttgttttgcagattcccggcagctcggtaggaattttgatgtgggaccaaaaccatatgaaaatagactccataagctttccaacaagtactcatgggccccgaaattccttctagatcagcggctaagtccgtttgaagatgatgctgtcaggaggcccgaatccgaatccaaaacgtgtacaacttgatctcttgtcttctgtggaccaaaagtgacgtggtgaggtagaagtagacttggagaaggtcttggtttggtcctcaatcaacttctttaatcatctatgcattagttacgttcggtctcttttccttcgcccaagcaagtacctctgcaaacgaaaacacacaaaacttattgtgtagcaacgtttgttcaaatatataacaagtaaatctaatgtagaacatatgcacctttatttgattaatacataagatagtcatggttatatccgagctagttatgtcctcctcatcctccccttcttggttggaaatcgtcctcggtttcaccttgtcatggagcgtattgtacttatctttgtctatcacaacatcctgtgcggaacatttcttgatggccatatgattggatcctaaaatctttgtagtcgaaaagccacaacactccccttcttgcaaaccaacctgtaacttttaaacaactagaggaactagatagagaattacttatatgcatgcggtcctcttgacaatacatttcatcatgaaaaggaggtatagtcaaattcaaacaaatatatactcgatgcacattatattctcctttactatcataattgccaataatatgaaagatcacatctgaagggcatggcaattcaaatctagcaaataatttcttctctaaacagttgagtgaacaaagatcatcaaattgaatataaccccaagtatttaaagaagatagctatgtaacctcttcattctcgctagcaatgtgaataacatgtttaaactcaacacatggtgtctctactatagaactaacatgttcattcactagttgtgacatagatataagtgaagcatcgcacaactcttctttatcacaagaaacatcaaacaaattattttgtgacaaaggtatttcagcaattgcttccactataggttgctctagtgtagcataagtagtgaacatagttggcacatcataactatgcataccttgagcagttgtagcaccattatctttacctttttggtcatcttcagaaattgtaggcgcttggtcaattaaacattcctcaagcatgcatggagctatggatagatctttttgctcttcgtctttcttctcttccacctcattaccttggttgttctcagatgcctgcaagatattagtatccaaagcaataggcacaacaatatgttcgttttgtaattcagacttggttgaatacatcacaatagcatctttcctggtatctctgaaaatctcatcgattccattcttcatcttttgaagattatcttcaaaaatttcagtaaaactcatgggtaccaatttcattttctgaccattatatctaaatgtgtatgtgttagcaacgaaattatgcgaaccattattatcatatacccatggttgaccaaacaacaaagaacatgcttgcatagggacaagatcaaaattagtagtatcatgataatttctaatcgaaaagtttattctcataattctatttaccttgaacttaccacaagagttgaaccatttgatgtaatatggatgaggatgcggttgtgtaggcaactcaagtttctcaaccaaatctgaactcaccaagttattgcaactctcactatcgattatggtacgacatgctctatccttaaccacaaactttgtttcaaataattcgtggtactaccattgctccgctttctccatttgagaacttagcacttgttgcaccaaagtactgtcatcacgtgcaccttgttagtatcgctgattttgagcgccactcatacctgtcattgcaaacacaaaaacaacaacaaacaatgaaggttatccctaataatctgctacgcggtgtagtggtgccccgcaacaactcagccaaatggagcaccttaccaagctcttacaagtgtcttaccagcaatgctaagaacggtacaaccagtggctggtttgtgacaccttgaaggacgtgatgtggcaattgcaaggatcaaagcggtgctgaccagaagtatatatgtggagcttgggaggcacaatatatagtagcaaaggaatgcaattatgctaataagaaaatgcaaagttgaataatagttcaaagtactagtcaatgtgctggcctagcctagactcaactctagctcaagcaagcacccgacaccactaaagactagatatgaatcaatgcacaactttgcactctgataacatactcaaaggatgaatgattttttttctttcttggtgcggctttttttaagcacctttctgcccttttttttcttttttttaggtgcggactttttttttgcacctttctgccttttctttctttatttattcttttttttactttttttttcaacaaaaactgaccactgaccttgaacatggattcaaatgtaaatatgaatattacagggactcaaacgcaaagtgcaaaactaaatttggatcatctcaaaaatggattgctcatatcatgtaggttccgtttttataaaaatatctcaaatccgctgcttaacaattgtataaagaggataatacggacagtcacagatacatctgatctgatccggagtttctcttcaaccgtacagtattccccctcgcgcgcacagtacacatgcacagtacggcaactccaaaaccgtttgataaaaatttctccaaatcacaaaaatggaaacccgatgagagacgattcaatttttcaaggtcccggcaacaaccaacaagatgcaaaactggacccaaaattgacgtacaactcacacgtgataaaccctagacacaaagtgatgaacagatgcaatactcaaaactaaaaattaaatctaaaactaaactagcactcgacacgacgatgcaatctagaattcaacaaagcaaaatctaatagaacaatgcaacggctcaaattgtctaggtaaagagtaaatattttttgtgtggcaattttctggttatgggaagataaattacctaatgggcaaccgcgctctgataccacttgatgcactagggttcccgatcttccgaaaggttctgataaacaacgatttgggcggagtcgcgacacaaatcgatctggcttcttgaacgcgctcgctcttaagccctgcaatcgcagcaccacgtctcctctggttatctcccgtgccgaaacgcggatgacctcgccgagaaggctaatccctatttgccaatcgaagaacacaaacaagaacgagatagaaaacaaccaaaattgcagatgaatgattaaacttacgagttggggtcttacaaaccgatctagcggcgtaactgttctcgacagattaatctaagcaaaacccaactctaaacgatgacggctacggattaagtacgattaggacatcctagggttgccctagggcgcacacccccttagctaagcccacgacacaattacaaggcccaaaatccgagtcagattcggactggatgagatacgtggcttgttttgcagattcccggcagctcggtaggaattttgacgtgggaccaaaaccatatgaaaatagactccataagctttccgacaagtactcatgggccccgaaattccttctagatcagcggctaggtccgtttgaagttgatgctgttaggaggcccgaatccgaatccaaaacgtgtacaacttgatctcttgtcttctatggaccaaaagtgacgtggtgaggtagaagtagacttggagaaggtcttggtttggtccccaatcaacttctttaatcatctatgcattagttacgttcggtctcttttctttcgcccaagcaagtacctctgcaaacgaaaacacacaaaactcattatgtagcaacgtttgtccaaatatataacaagtaaatctaatgtagaacatatgcacatttatttgattaatacataaggtagtcatggttatatccgagccctcatcaggcccatgcatgtatgcaaggcccagctgaatgccaggccctcgtatgagcgcaacatagcgttcttttttttcttttctcgatctctcccgttgcaagtatgttcgcctgttattttgcgtggaaaccgattccgtgaatagggacgtgccacatggcttatctctctagtgattaatttgcatagaattctttttataagataacaaaatcctatagttttatgcaatttagaacgcagtacctataattaagtgaaatttactcttaataataaaaaaaaagcccccaacgaagtctctgctttgccgatgcgaccggtctcacctcccctacccacggcaggcgccaactgagcccggcgcttcccgtccgtctcccttcctccaccagtccaccctctctcctttccgttccgttccgtcccccaacgaataaaagcgcaccgcgtacatgccttccaccgtgtcctccaaagcaccagcgccggcaggagggccccccgccggattcgattcccggcacgtccttctcctccctttctcgcgggcgccgcacgccccttccccctcctcctcctcctcttggtctgatgaatggggagagcctcctcgaccgcagctcctccgccgacgccgccatgaacgacgccgtgcccggccaccgccaccaccacccggttagcgtcttcctccgggacgccaggttgttaaccgagtcatcggtctatcgatttttttccctttccatctatttatctctgagtttttattttcttgggggtcctgttgcaggttggcgttcaggtgggacgagctcgggagggagatcatggggattgcggtgcccggcgcgctcgccctcatggctgacccggtcgcctcgctcgtcgacaccgccttcattggccacataggtttgcttctcttctctccttattttccttattttttttaattttttccccttactgctgacttcgttgtgaagtttccaccaccagttctgacctgctccaggtgggattggaacgtactctgttctacccttcggccttggtcgcacgatgtaattttaatactactagatttcttttcagcttggagcaaacctaacccagttcattccgttagtggtaggaattaaggtgtggtgtttggtcctgactattacgaaatttatctggctgtgctggtaatagatctcgcttccataatgtcgaacctaaaaaaatgaagcagtagtttgtaaagtagtagagtcttttgccgacatcgtggctgatggttgccattgtttagaatattgatactaaccctaatatttcattgctaagtattaaaacaaaattttaatgctttcaattcaagggttagtgtgtagttatgtagtacggtgcccttaaatgtcttaacatcaaagttgattgtcagataggttttttattgatgaattctgtaagaaagcaatcaaaaagcataaagttggataatgaccattgtttaaggtcaacgcaaactggccatattttatattcagcaagtatgtatggtaatactaatgaatcaatgtcatgtaaaatagatgtagaattaattactgaagtttagaccattactaattcgtagagaattccaattggctttgatttatatttagtttagctactttatgtcttgaaattgagtttagatcttctacggctaatttgctttcttgatgtgcttacatttgacttcaccagttagctaagaaagtgcttctacgttatcaagtagtaatttgccaagaagaaaaacagcaccccctgcagcagccacccatggcttttgtgttagtcaacccatacattttttagtttgtaatgtcaaactgcctactagatgttggcactagactacatgttcaccgttatcccaaataagattattaatgaacttaatattgctctttcatttatttttatttatacatttcagcctgctttgaattttgtatgaactttacttcttactgtattgtaatagaaaaaaagggacacattctgattttcaagtctttgacttattttgtctcaagttaatttgattccttttgttcaaaacaggcccagttgaacttgcagctgttggtgtatctattgccgtgtttaatcaagtatcaaggattgcaatatttccccttgtcagtgtcacgacatcatttgttgcggaggaagatgctacatccagtgacagagaaaaatatgaaataaatggcgagaatgaattcaatgtttcagacagtgaaatggaagagctggtttctcatgaaggtaaaacagttctaatcttcttttaagaaacattagaaattaaacaatgcttatttctttgacactcaatcttgccaccagaggctagtgctgctcccagtaagtcgtctttcgaaactgactcaagtgatgtcaaaattgaacataagcggaaaaacattccatcggtgtctacagcattactacttggtggggtgctcggccttttacaagcactgcttcttgttatttgcgcaaaacctctcttaggctacatgggtgtgaaacaggtatatgttccttcataccatttcctttgtggtaaaatcaattattttgtctaatcgtaaagatgtaaacatcaaggattgagtcatcattttttcctgtttttgaaaaatctatcaatggatgttctttatcaaaatttaataactgagaactcatctattattaagtttagctctggatagttggatgtgcacatatatattgtaagtacgaagtatcactaatggaacttaatttttcatgtatattatgatctgaatgaaattgtagcaacaaactagtgtattggtgagtttcatcattaaggacttctatgattttggttttttaattctagaatacactgtttatttattatttttcacatcggagtcctttttctactgaaattttctgatagggctctgcaatgttgatgccagcactaaagtacttggtagtcagatctcttggtgctcctgctgtgcttttatctctggcaatgcaaggggtatttcgtggacttaaagatacaaagacacctctttatgcaactggtacagtatttccttgactgcagaatggtgtatgctgtatataatcaaaccaagtgtctaaaataatgattatttaaactgtcccttcaaagtcattctacttgtggtggaatactttaatactttcttttaagttcgcaaagttaaggcaagatgacatgatatgaactggtgggatcaaacacttatgacctaccgtacattattcatgtaataaaatgcatgactgtagaacatgtgtctcttgtagatggtatatttaaatgcatgagatgttacgattagtgaataatttgcctcaggataatacatatacctaatggtgttaactctttttataccagtggctggagatgcaaccaacatagttttggatccaatatttatgtttgtcttccagtatggtgtcagtggtgcagcaattgctcatgttatatcacagtatgtagcacaattctctcttataatatcattgttttttacccgtgaagttggatgacaaactatgtccaaaagtatataatacctttcttctacctcttgtgatagtgtatggtggaaaattctgcagatatttcattgcatccattctcttatggaggttaaggctacatgttgacctacttccacccagctttaaacatatgcagttcagtcgattccttaaaaacggtaattcttttctaatatttttgggttccaactaagacatggccctttttttttgccacaaaccattttacaatacctggtcttcataggatgataattattaatatccattttctcgtatgcattcttagatttgatttttttcattgaaagtgcatacttaattcaaaacagcaaattaactatttatttccttttttacatttgggttatgcctgcttgactttcacattgttttagcacataatttcattctaaacgcaagttgcccttgcttgtttcaattattttacttgaaacatttctggttatataaaactcgttctcacttttcacacttcaggtttcctattacttgccagagttattgctgcaacatgctgcgtgacactatctgcatcaatggctgcacggctaggttcagttccaatggctgcatttcagatttgcttgcagatctggctggcttcgtctcttcttgctgatggattggcttttgcaggacaggtaagggaacagttgtctccactcactccaatgctgacaatactgaaggtttctattgaaccttcattttaatgaaaaattctacctcagtaactgcaccaaagggtatataattgagttttctaaattatctaacgttggaaacagataatgagatgtatcagcatgaactgaaatgaatttgcattttgttcttatgcatctggatcatattttgacaggctatacttgcaagtgcatttgctcgtcaagaccattctaaggccgcagccacagcttctcgtatattgcagctgggattggttttaggacttctcctaagcatttttcttggcattggcctccgtttaggatcaaggttatttactgatgaccaggatgttctacatcatatttacctaggcataccggtaaactttctttatactgatgccaaaataattacaattttaagtcatattgtagttaggattcctcagttgtgtgcgggagcctgatgttcctttatgatatctttcctactgtgcattgggatgcctgcctactgtcagagttacctggaatttttttaactaaagagttatttttcctgttcagtttgtctctctgactcaaccaatcaatgcgttagcttttgtttttgatggtatcaattatggagcatcagattttggatatgctgcttattcaatggcaagtcaactagtcaacacctatgtccttctatctgtattttcaatcctttttttttcacatatttttgttgaattcattgtcctcagattcttgtggcaattgtcagcatcatcttcatagtcacactagcaagttacaatggttttgtcggaatttggatagctttgacagtctacatgagcctccgaatgcttgcaggattcttaaggtacaatcagtcaaagcattatcttttctaacctgagtatttgattacaaacctttattacaatgacaaacaatagttataagtcttcagtaatgattgctacaaccagaatcaccaccaaacagttcacaggacaccactacaccagctttctcccagtctgcacaggcacacaccctaaaagctaacattccatagggaacatcacaatctggcaattcatggtcaggaataaattcacattgacaggatcaacaccaccctgtgataaggaacatcaataagacgtgcagccactagtctcgtgccctcgccatgcccttcccccatggctaaaacagaaaccactttgctctagcatctatcaactcgaatgagaatagatgctatcatgatgaggaccaatacgagtaacagcaagcatcataccccagctttagagctcaacaccaaggaagaaaagttgctgattataagaagtgatttgtgtcaacgtgcacttggcaaataaaagaggtagctagaatgtagtaatgtatccccgtgaggccgtgacagacgaagcaagaaaaataccaaaactttgtgctatatgcctacaaatgtagtttcatctcaaatacgaaaataaaaacttaaattcgttttatacctactgcagtgtcattcgttttctatattgattttacaagtttgcaataaatcgctatactaaattttcaggatagggactgcacgaggaccatggactttctatgcagctcaacgcatgcattctcatgaggtggttggactttgttgaacaatactataggaagacaccatggatactttgtaaggttttgcaggtttggtgggaatggaggttgtttgaacaaaagaaaatattcaactgtcatgtacatagataatcacacatgttactactattctaatagattctcccctgtcgtgtatgttgtatttgcccatgtatagttcagtatgttcggctggctattttgtaacaagtttggatataaagtcacgtagcataagatgtttgcacaccgtgagatatacggagcattggcatttgatttttaaaacattaatggaaattttaccagatgccaacgacaagtgatcggttctgtgaattattattgacggacaagtttttgaaactccgcatgttgctgcgagagtttagtaaaatagctagacgacatagcttacataagttgatatgatttatgataatttaaaaagtatatagaatgatgatttaaatgtaaaattaaggtgatatggctttataagagaagaaaagaaggaagataatttagttcatagattaatcatctaagaacttaaaaataattgagtggtatagccatcacataaccacgatccgaagccacaccgagcaatcacagaactacgatccgaaataactagctttatacctgtcaaggttggatgcggccaagtggtgagggtgagaataatccgaagcctcctggactctgacctgtcaaaccgaacaatcacagaaccacaatctgggactaatccacacaagagacccgagagccaaaagcacgaattagggggcaccagaggagccttctcacaaatccaaaagaactcacaagaacaaaggggtaagacacttatgtagtcttcagcaatctctcatatatgaggatttcaattgaacaaaagttatctaatggatggagtagagaggtatttatactaggaacatccctcctagctgaggttgtgaatataagaagccacgttctgatggtcaaggctaacataaatgagaatgcaaagcgttttctcgggttcgcgcacatccctttagctcctgcacaggcttcagtaaaaatgccataactttttcttggaaaatgatattgaggtggggtttgatgcattggaaattagatttgtccctctttccaaccatgtatgcatgcaacccgtcttttgactggctgggtcgcacaagccttggaagttgagcctttgcagcgtaaaccatcttcttgttggcgtagacagctactggttgggcatgaactgattcctcctcgacgtaacccttgtcgtcctcaacataacctatccttcttggcgtagtgatgatatcctcgggcgtaaaccttagcaatacaaaggtagagcatttaggtagtataaaattctcactaaaatttgggttaagttgagcaaagagcgagttcacctcttgttgtattttcctagcatggctgcgcataattggaccatgatatgcttgatcgttcttggtgaaatgtaatccatcaacttgatttacgtcatcttcattttcttcatgtgatgtatgacgtaaaccatcacccttgtttacgtcaagtgtagctgggatatgctcatcaaggagcatccttagttagcaggcaagttaagggtctagcaactaaagtgaaatgtttaatcaagcgccgatagaaccttgcacgagctaggaagctatttactcctttaacattggtaggatgtggaagctgttgaatgacttctatttttgttctatccacctctaccccctttcgaggactggtgttctaggactataccttcatggaccatgaagttgcatttttcctaattaagtaccaaatcattttcttaacaccgttgcaagaccatatctaaatttatgagacaataacaaattttttttcatagactgagaaatcgttcatgaaaactttcatgatttccttgatcctgttggggaagatagatatcatagacctttggaatgacgcaagtgtattgcacaacccgaacgacattctacaatttttttatagaaatgttgctttaaaatcatactacccattttttaagttttttttagctaatacttaattaatcgtgcactatcgttccgttttccgtgtgggaggtgagggttcctaaatacagtctaaattgggatggaaggagtaacattttagggcagaggaagtacagagtttcatcaaagcagccctgcgaagtggcagcatcggagttttcctaatgcgcgatcgatcgtgcgccctcagtacagagtttcatcaaagcggccttgcgaagtagcagcgatggagttttcctaatgcgcgatcgatctcccgcgccgagggcgcgcgatcgggaaagccacatccgtcccctaacacactcctctcctcttccttctcccttattctcttcctactacaccatacatttaaaaaaataaaaaaacacaagttagagaaaagttaaaaaatagaaaaaaaatctaatactcttatttatatgcatagactatatacttacgtacagactttataccgtaaacatcgcacgtataaactttatgtacagaaatactatatattaaaaatatttgaattcaaattcaaatttgaatcgggtatataaacttctgacttataaactttgggtttataaactttagctgtaaaaactttagatgtataaactttagatatataaattttaggtgtacaaactttagatatataaagttactaaaataataaagtaaagcggtgttaaaaaaaggaaactgcgtggggagggaactgatcgcctagcgcgatcgatcgcccaataggtttttcggctgcgactcactcagtcgctccctcgacaagttcacaaatcgtctccccttctccgaccatccaatccatcggttcggctcaagtgctcaaccctccgcagatcgccaccggctctttcgcctgatctcatccctgacgctcctcctcctcaacccaacacatgtgccttccctccctctccctggctccaccacctcgatcttccgacgtctccaccccctgctcgttcaatccaacaccgacgccccctcccccttcggcccttcccgccaccatccactaccttggccttcgcccacggtcccctccatctgatgctgccacttccgcctcccccaagtccctttctttggctcctctttcccaattgcgctcgttcacaaacttgagcgacgacagagcactgggcatgggcgagcttcgattggaagggcacttgcagaggaatgataagcaagtgcgctcgattgacaagagacgtgtctggtttctaatgattccattgaggtatagtatctctactttttttttcctttttcattctgttttagataacaaatccatcggattttgatgattggtggaacgatcgtattgtgttgttttctctgagtaaatttatcaaaaccactcgttccgtggtacaagtaggagaaaaccactgatactttgacagttggcacttaattagtgctcattgccacaatctcctttgtgtgaaatttactccagttacttcattctccttatccttactgccatatttatattttaggtcttaattaaagtacaagcacatgacaatccactataacttatactatccactcaattacaaaagggcaaaaggctgctatgagtagttttgccaacgggtatgtttgatgatcaaaaggtaaaattaatgttcatagctacatgcttctttttttaagacatttttatcatctactccctccgtcccataatgtagcaacctaggatgggtcatcccatccaaggactaggatgggtctcatctcatcctaggttgctacattatgggacggagggagtagatgcctgataaagtgtcactatgaaaagacccttaggtcgtttgctgggaacaatgttgagcatttaagttgtacagccagctacaactttatgatgttaaagttgtattgtgtttggcaacccaaggtgtgtgctaatatgagatagaataatttatcttactagatccaaatctattatctatgtaacaagttcttaaaataactgttgttcaattgttcatccctggaaaccttacctccatcctccatcctcataatccgtgatggtctatttcgtattcaagtaaaggacaaaaatacttaaactaagctcctttatatatgttatggctgcatggaggtgcaacgttgcattaagaaaattggtgataggaactgataacatgtatcttccattttaaattctgagcactgatcagtcctgctaatatttatggcagtattttagaatgcattatcttcatagtcaccaaaaatatagttctttagctgggtaccaaagtggttcttggcatgttgatgtgctgcaagcctgcaaataaatatcgtagagtattccatcaggctatcctttatctattgtctgctatctggtaaaagatatccttgatgtctccatggtttgtgattggaacaagtacatttttggcccttgaactcttcttgaagtccattttgcaccatgaactaaaacactatttctttttttccgcaatcaactttcaaaaccggacaaggagtctatttttggtggttttatttgcgatgacagtggttttgctagtgtagactcctattacacattttcctgatgacgtagttaggttacatcaatatgttaggagctacgattcgtggctccaaaacacacacacacacaagggatagagatggagaagcaacactggaacagagaacaaccagagaggaacagaggagcagatagagatagattggattaattcttgcttgccattaaccttaaacactccggctcttaatagccttacaatccaactaatggcgctaaaaggaagggataaaacaacttaacaaacttcaactaatgttgctaagataaagggataagcagcagcactaaacagccgtgccgcccggccctatagctcgtccggcaccaagcccagcttgctgcttgcgccggcggaagggaattccccacataacatctctccccccctcgatcagtagctcgtccgcgagctggaacgagggatatcggttgcgaaagtcgtccaagtcctcccaagatgtggccgatgccggcagtccttcccattgaaccagaagctggcgcacccctcgagccaaacgggcgcgcaacacttggcgaggaacaggttgggccgctccatgctgaatgggtggcaaagccagtggtgccgatggcgacacacccacgaacggcttgagcagtccgacatggaacacatcatgaagccgtgtccccggcggcaatgcgaggcgatacgccacctcgttgatgacggcgacgacgcggtatggcccgtagaagcgaggacgaagcttgcccttgacagcctccgggagggacgcaggaacgcggtggcgaacgcggagccacacccacgcccccacctcgaacgacacctcccggtgcttctgatcatagtagcgcttggcatactgttgtgcttgttccaggcggagacgaacatcagcgaggaatgcgtcgcgctcctcaatggactgtgccaccgctgccacccgtagctcgcttgcgtcgtatgcccggattgagggaggatcgcggccatagaccaacttgaacggcgtgtcacgaagggcggcgtggaaggaggtgttgtagatgtactctgcccacggcagccagcgcagccactggcgggagcgatctccggtcatgcagcggagacacatggcaatggccttgttcacggccttcgactggccgtccgactgtggatggaacgccgtactgcggtggagcttggtgcaggtggcggtgaagagggctgtccagaacgccgacgtgaagacggggtcccggtctgaaacgatggactccggcaccccgtgtaagcgcacgatgtcgacgaagaacgcacgcgccaccgtctccgccgtgtacgaatgtgcgagggcgatgaggtgggcgtacttggagaatcgatcgacgacggtgaggatgaccgacttgccgccaacgcgtggaaggccctcgacgaagtccatcgcgacatcggaccaaatggcagatggtaccgggagtggaagcaggaggcccgcgggatggaggtggtccgtcttgttgcgctggcaggtgaggcagccttggatgtgatcgtggacgacacgccggtcgtcgggcgtgtggaagtcgcggcggagtcgatgaagtgttttttggatgccctcgtgtccgtcatcatgcgccgcggcgacgacgactgacacccatggtgagcccggcggaatgtagatgcggcgcttgtaggtgacgaggccgtcgatcaccgcccatggtgttgtgcgcgtgccggagttgatctcgtcgcggagggcttgtagtgccggatcggtgtcccccgccgtgcggatgtctttgaggagatcgaacgtcggcgtggagagtacgaaggcctggctgtctggtgcggcgcggcaagacagagcatccgccgccgcgttctgtttgcctggcttatattcaaccacaaaatcaaaccccaacaatttgcttacccaatgatgttgcgggatcgtggataagcgttggtcaagaaggaatttgaggctgtagtgatccgtcttgacgatgaattgccgcccccacaggtacggccgccagtgtcgcactgcttgcaccaagctgatgagctcacgctcgtacgcggcgagcgcgtgatggcgtgtggcgatgggccgactgaagtaggcgatggggtcttcgccttggtgaagaactgctccgaagccggtaccggatgcgtcgcattcgaccacgaatgggcggttgaagtcgggaaggctgaggaccggcgtggttgtgagggcgagcttgaggcgctggaacgcatcatcggtcgccggcgcccatgcgaaactgtccttgcggaggagctgcgtgagtggagccgccacggaaccgaagtcttgaatgaacttgcggtagtagctggccagaccgaggaagccacggagttccttgggcgaacgggggcgcggccactcagctaccgcttgaatcttggcggcgtccatggcgaagccgtgctgcgaaatgatgtggccgaggtacgctacgcttgggtcgccgaacgaacacttggtgtgcttgacgaagagctgggctgcccagagcgcggtgaagacggtgcgcaggtgctgcaggtgcgacgtccacgttgggctgtagacgaggatgtcgtcgaagaagaccaagacgaagcggcggagaaacggccggagcacgtcgttcatgagtgattggaacgtggccagtgcgtttgtgaggccgaacggtatgacgagaaactcgtagagcccatcgtgtgtacggaacgccgtcttgtcgatgtcgtcagggtgcatccggacttgatggtagccggaccgcagatcgagcttggagaagatggcggcgccgtgcagttcatcgaggagctcgtcgacgacggggatggggtatttgtctttgactgtgcgctcgttgagagcccggtaattgacgcaaaagcgccatgacccatctgccttcttcaccagcagcaccggcgatgagaacgccgacgtgctccggtgaatcaatccattttcctccatcaccctgcactggcgttccagttcgtctttgtggcggacggggtagcggtacgggcgtaccgccaccggggctgtcccgggcagcaactggatgcgatgtgagcggtctcgggccggcggcaatcctgtaggctcggtgaagacgtccgcgaattcctccaggagggagtccagtagtgccgctggagcgcacgccagagcacggggtcgctggtgtcccggcaacccgtggagcgtgacgcggtgccagaaggacattgtcagcaccgtgaaatcctagaggatcggccccaatgtcgcgagccactgtgttcccagcacgaggtcatagccacccagagtcaggacgtaaacgtccgtggcgaattcctcgccggcgatctgtaaaggcatgtcggggaagacgccggggcacgccaccttgtcgccgttcgccaccgtgacgttgaggcccatgcggggctgaggagcccgaccgacacgtgccgctgtatcctgagacaggaacgtgtgcatcaagccggagtcgatgagggtgtagaggtcggtgtcgccgaggtgggccgtgatgtgcatggcgtcggacgcgcgaactccggtggccgcatgcagagaaatccggagtgtggcggccgcgtctgcttggtcggtggcggagtcgttgtcggtgtcgtcctcccccaactccaggaagaacaatcggcggcacaatcggttgtggccgcgcgaatagggctcgtcacagttgaagcagagaccttgtcgtcggcgctcatccatctcctccggtgacaggcggcggacggtgcggttgatcgcggtggcgtgcctgccggttaggcggcggtggccggctctggagccggcgcctgggggttggccgccggaggaagtggtagtatgccgcggccggcgtgtcgtggcgggcggggtggccgggctgcgagttcgcggcgttcgaacgaacgagcaagactcatggcctcttctagcgtcgtcggatgctgcatctgcacatctaaactcatcggttcctgcaagccaaccgtaaacagttgtacctgttgatcctcggagaggtagccggtgcgcgtgagcaggtcaaggaaacgctcggcgtagtcatccaccgtggtcgttcgccggcaggctgccagctcgcccagaggcgtcgagtgcagaggtggaccgtagcgcatgttgagcaactccgagaagcgatgccacgaaggcggttcatggtcacgttcaaggcgagtgtaccactgttgcgcgccgtcgagcagatggtaggaggcgagccagactttgttgtcctccggcgtgcgttggccccggaagaattgttcacagcggttgaggaaggggagcggatcgccgcggccgtcgaacttgggaaagtccaacttgtggtagcgtggaggannnnnnnnnnnnnnnnnnnnncggtggccgcccggacgtccatgcccatgaaagccatcgccgccgcgaccgtagcggtcgccgcggccgacgttgtgatgggcaaagcggcccccattgcgatcgccgacgtcgctcaggtcgtcgaagcgagaagagggagcgcgggcgccattctccaagcggttgatggccaaggtctgggtacgttgctgctggtcgatgtcggtgatcaggccgctgagctcctccagccggcgcatcatgtcgtcgaagcgttggcgccaaacgtcgtcgttagcgccggccatggcagaaatggaagcggaggatcggtggagactgataccaagatgttaggagctacgattcgtggctccaaaacacacacacacacaagggatagagatggagaagcaacactggaacagagaacaaccagagaggaacagaggatcagatagagatagattggattaattcttgcttgccattaaccttaaacactccggctcttaatagccttacaatccaactaatgacgctaaaaggaagggataaaacaacttaacaaacttcaactaatgttgctaagataaagggataagcagcagcactaaacagccatgccgcccggccctgtagctcgtccggcaccaagcccagcttgctgcttgcgccggcggaagggaattccccacataacaaataaatgaggccatgcatgtgatttctgtgtttcagttgactgcaagaaccctccaagcaaatgatgcagattatatttcaggatggagttctctaaatatactttaagatcagtgctatacgtactaaaagtttcttataaaactcttacaaacaaatatcttaaccattaatttatttactcagttggtagttatgaaaaatcaagatacaagtacatcatgccatataagttctaaagagtcagtaagattctttttggtatgtgtcattttccatctttaaatagtgtatcatccatcatgttagaccagattctattttagtgatactaggaacatgacgtacaattaactttgccaactatgtgaaaaaaaatgaagcatcattccagttgttacctaatgtaattctgatttctgtattagcagctgtctaattatgtttttttcttcacttaatttataaactttaattagaattacatcctaatgatagcatctccttttgtgtacagttgcacttcaagggtttagcagaattactcaaaacatttcctgtaactaatgaatttgacaaaaaaaattgtaagagatgttgatggtcttgtgatttaaatccttaagtatgtctttaataacctggaataatctacaccaatttttgtagtgttatttattccattagtaaaagttggtgtgcattcatgaattaaatatcaaacgatgtttgacaattattcttaccatttgacagatgccactgggcagataattaaattattgtttaaattttcatgaacttgatatatttacgcaggttgatgttccatcgaaaacatagggtcctcaaacgttactactaacacgaaggtgtaaaaatgccagtgccctcttatatgtcaaattgaacataaatcactgcgagcaacaattattctccctgcatccaggtaatctacatgtttttttttacgtgaaagcggcaagagtattgccgaatatattagaaggagaagtgcgggttgcatagttgttacaagtggactattacagtatgaatgtaagcaactcacagaggtaaaagctgaaaatatcagcatatcgcagcttataacaaccgaatcgttcaaggaggttggaaagtgatctggttttcttggatatcatcgttgatttgctgagcagctctttggacgttcggttcttcccctctgaagatcttcgcgtttctctgcagccagacacaggtaatctatatgtcaatctgcaattacatacaaatataacacaacactgaaagcaaaactcaaacagtatcaatcaatgaccatctaggttgacggagtcaaaggcatctgtttcggttgttgctgataggtttcatgtcatttttttcagataatgaataggtttcataccagtattagtatagcttttcgaatctaagtaccaatttgtggtttccaacaatcaggttcaaatctagatacaaatttgtaccgtacagcatttaggttaattggttaatcatgtttagaggggcaacgtgaaaaacacaagcatacttggtttgtggaaaaggttgattctgcactagtatttacatcactttccagtccaacttttacacttttgagtgggctagatgggagaggaaacttaatcacggagtgttaatgtgtgtgttagttggcagtaaaaagatactgttatcagcctgggcttaaattgacctgttttgatatttcagaatatttgataaatgcgaacttaatttttgaagtccttagtataatttaaaattctgactaaccaaacttaaaaccttataatcatacaatatattagaaaccaaatttatttaggtacacttaaattccgcaaatcatatactggaccttggatgtgttctgttatgttgcttgcatccatgccatgcaaacattagtgttgccatgttagctcttgacattgctcactcatgaccaacatactaagcatgcaaatagttttgttgtgaaactacctctaaacgatgcaatgctagaaccaaggtatgtattacgaaaaaaaaaaagaaccaaggtatgtatttacctcttcagagataagtgcctaagtggagcgtgtcagaaaaattcttttcagtaagcgcttgcatgtctgcctgccacaaaatggggcatgaatctcccaagatatctttcaccactttcctacttgcatttgcatggcatgtcatacactccggaataatctgttgaatagactttttgtgatggctttgatttcttttgaaacaacttgatgtctttattttccaatctaccagcgcctacaagcttctggtcctaacattacgtttacgattagtgctttgtgcacttgcttttcttttcattttgaatgggaacagtaggaaaggatcctactatagtttcctgcacaatctcactcgggtaatcgggttgaccaattgtcaaggtcttgggtgtagaacgcaccatttgcttgcatgcacgatggaatgggtagataaaacattaaggcctatatatgcagccccgagaagtaacactgtcttgttgccaatgcatcatacacactgagatatggcgcttggatttccagaatgcatatccgctgttgtgttgatctctttgtccactatgattgctgcttcttcgggtctgagtatgagcaacagcagcaacactgacctcactgcactgatggctttcaaagcgcagctctccgaccctctcggcatccttggaagaaactggactgttggcaccccgttttgccattgggttggggtctcctgccgccgccaccggcagcgtgttactgctgtggagctgccagatgttcccctgcaaggagagctcagccctcacatcggtaacctctctttcctatctgtactcaacctcagcaacaccggcctcatgggttcagtcccggatgatataggaaggctgcatcgcctcaagatccttgatcttggtcacaatgacatgttaggaggtgtcccagccaccatagggaacctgacgaggcttgatgttcttgatctcgagtttaacagcctatctggtccaatcccagtagagttgcgtctctcgcacaaccttcgcagcataaatatccagatgaattacctcaccggcttgataccaaatggcctattcaacaatacaccttcattaaaacatctaatcatcggcaacaacagcctgtctggaccgataccaagttgcattggctccttgccattgctcgagcgccttgtccttcagtgcaataatctcaccgggccagtgccaccttcaatctttaacatgtctagactacatgttattgctcttgcctcaaatggcttaactggccctatcccaggcaacaaaagtttcatcctcccgattctgcaatttttctccctcgactacaattatttcactggtcagattccactagggcttgcagcgtgtcggcaccttaaagttttttccctgcttgataatttgattgagggtcctttgccctcatggctgggcaagttaaccaaactcaatgtcatctccttgggtgagaatctccttgttgttggtccaattcgagatgcactaagcaacctcaccatgctgaatttcctagacctcgcaatgtgcaacctaacaggagccatcccagcggatcttggacagataggccatctttcagtcttgcgtctttcaacaaatcaactaacaggacctattcctgcttctcttggtaacctgtctgcattatctgtcctgctattggatgacaaccacttggatggtttactaccaacaacaattggcaacatgaactcattaacagaacttattatttctgaaaacggcctacagggggatctcaatttcctttctgctgtttcaaactgtagaaagctttctgttctatgtatcaactccaatcgtttcacgggaattctcccagactacctggggaacctatcaagtacgctggaatcattccttgcatccagaatcaagttaagtggtaaacttcggcaaccatttctaatttaactggcctcaagctgctagatctttcggaaaaccaactgtttagtgcactaccagaatcaatcatggagatggagaatctccatatgcttgatctcagtggaaataacttggcgggctccatcccatcaaacacggcaatgctaaagaatgtcgtaatgttgttccttcaaaataacgaattctctggctccataatagaagacattggcaacctcaccaaattagagcacttaagattatctaataatcaattatcatcaacggtaccaccgagtttatttcaccttgatagcctcattgagttagatctgtctcgaaacttgttcagtggtgcattgccagttgatataggtcatctgaagcaaatttacaagatggacctctctagcaaccactttcttgggagcctgccagattcaattgggcaaattcagatgataacctacttgaacctatccattaattcattcaatgattcgattccaaattcttttggtaacctgactagcttgcaaactttggatctatcgcataacaatatttctggtaccatcccgaagtacctgtcaagttttaccatgctcgctagcttgaacctatctttcaataatttacatggtcaaataccaggaggaggtgtcttctcaaacatcactttgcaatctttagtggggaactcagggttatgtggtgttgtccgtctaggatttgcaccgtgcaaaacaacctatcccaaaagaaatggtcacatgctaaaatttttactccctactataatcatagtagttggggctgtagcttgttgcctatatgtaatgattagaaagaaagttaagcatcaaaagatttccactggtatggttgacacggtcagccatcaattactctcctaccatgaactagttcgagctactgataatttcagtaatgataacatgctggggtctggaagctttggaaaagtttttaagggccagctgagcagtggtttggtggttgctataaaagttatacatcagcatctggaacatgccgtgagaagtttcaatactgagtgtcgtgtgcttcgaatggctcgacatcgcaacttaataaagatagtgaacacttgttccaatctggactttagagcactagttcttccctacatgcccaatggaagcttagaggcactcctgcactctgaaggaagaatgcaattaggttttctccaaaggttggatattatgctagacgtatcaatggcaattgaatacctgcaccatgagcactgtgaggtgatcctacattgtgacttgaagcctagcaatgtactatttgacgatgacatgacggctcatgtatcagactttggcattgcaaggttgctgttaggtgatgacagctccatgatctcggcaagcatgccaggtacagttgggtacattgcaccaggtactataccatactcgtagcttttttactctttcaagtttatcttttttactgccattgagtggtttattactaactttttttattgagtagagtatggagctcttggaaaagcatcacggaagagcgatgttttcagctatggaatcatgctgcttgaagtgttcactggaaagagaccaacagatgcaatgtttgtgggagaactgaacaacaggctgtgggttagccaggcatttcctgcagagctcgtccatgttgtggacagccagcttttgcacgatggctcatcttctactactaacctgcatctgcatggcttccttgtgcacgttttcgagctgggtttgcactgctcagctgactacccagagcaaaggatggcgatgcgtgatgtggttgtgacactgaagacgatcaggaaggactatgtcaactggatggtattaatggggagcactgcccagcagtgatctattgcccttgtctcctcacagtagaatgggttttcgcttccgcattaagaataacacaacaatagcgtcagctgcatctgcatgcctgttgattaccctttgcttctatatttgtactgttggatatatatatatatatatatatatatatatatatatatatatatatatatatatataatgattatatacacccgggtgtatataatctattgtgcttcttcagttcttcctaagcttcaacaaacattatttagttggagtgcatgagtaattttcatttgagaggtgtgagtgtgactgagtgttctttttacatcagtgtaacccaagtgattgatctgctgcttaaatttgcttatttccaaccaatacactaacctagaaaaggaatgaattttcgctggtgccctccaattccagcactgttttccatatatacatcgaatacagttttaacagtggcgctccaagtaggttttctgatcggtgttggttatgctaattttggtctgttcacgttaatttcaaattcacctgtccatgagatgttcggtagtactggacccgttagcatttaacaaggacgtttgaccatcgatcctacttaaaaattttatataaatgttatttgttttgttacatgtttggttactaaagaaattttaaatattatgctttagcatatttagattaattttttaataatttacactatgtttggtactactatttttaattatatattaatgctattaacttttagggtatctatctatctatatctatattaattgggcactttctagaagctctcacattaatcagactaatctagccgttgattaactagatcataaaatcatgttcatagattaattactactaaaaaaagcccatgagcttggcactataggtgtcggaataactaaaaccgacacctgtagtgccttttcctcctccacgagttgaaaacacataaagctggtacttttaagtaactatagatgtcggttctaaagaaaaactgacaactatagtataggtgccggtttttaaaaaaacccgacacctttaatatgttataggtgactgttaattaaaaacccagtgccagatcctgctggaggggaggcggtgggcgacgggtggcagcggtgccctccgctccgccggatctggcgggaggggaggcggcgggcgacaggttgcggcggcgccctcccttctgccagatccagcgggaggggtggcgggaggttttttaaaaaaacccgacacctttaatatgttataggtgacggttaattaaaaaccggcacacataataaattataggtgtcgggttttttaaaaaaccgacacctatccaaaccgcgtcgagctatcgagccgatccaggccgacacatcggccttatcctatatgagcgtaccttatcctacctctctccatctctcgtctctatctatctcgcctctattggctatatctctctctcggctctctcacttctctctcgcgcgcatgggggagggcagatagcggcccggcggaggcggcagcgacggcagtcgcgccctccccttcgccgcactactagaaaaggcatttttcccaacggaagggtctcattttcgcaggcggacatagcccttagagccaaatgaccgcctacaaaaatataaatcggaatgaatatgccggtccgcctacgaaaatatattttcgcaggcggcccggtagatagccaaaaaaaataacagtgggcggcagatgtcaggcttacttggtccacctctacccttgttaatctacctttcttctcggggggttcaggaacagactacggctagcgatgcctgcctataagccgaaatagagagcctcggaggggtggatccacgtgcccgtccacctccaaccttgagtttggcatccctttccgggggggggg

SEQ ID NO: 28210 - DNA, 19849 bp, Oryza sativa
  unsure (1)..(19849): unsure at all n locations
agaggaaatcgactnnnnnnnnnnnnnnnnnnnnnnnnatgaacgacgccgtgcccggccaccgccaccaccacccgcttagcgtcttcctccgggacgccaggttgttaaccgagtcatcggtctatcgatttttttccctttccatctatttatctctgagtttttattctcttgggggtcctgttgcaggttggcgttcaggtgggacgagctcgggagggagatcatggggattgcggtgcccggcgcgctcgcccttatggctgacccggtcgcctcgctcgtcgacaccgccttcattggccacataggtttgcttctcttctctcctttttctaagtctcaaaacgcacccctccctctcatctctcctcccctcccctctcctccccacggccggcctctcccacggcggctacagcgcgtccggcggcgtgggccggcggcggagacgacggcgcgggcggcggcggcggctctcctcccccctccctcccagatctgggagaagggaggggggaggccggcggcggcagcggcgacgacgaagcgcgggggccgctgcggcggctcccctccccctccctcctagatctggccggaggagggaggggggaggccggcggcggcggctacggcgcggggcggcggcggcggcgatgacgcacgcgcgggggccgcggcggcggctctcctcccccctccctcccagatctggccggaggagggaggggggaggccggccgcggcggctaccgtgcggggcggcggcgtccaccacagcgtgaggctggcgtgacgacgacgacgcgtgcgcggggccgcggcgacggctcccctcccccctccctcccagatctggccagagggaggggggaggccggcggcggcgactatggcgcgaggcggcggcggcggcgacgacgacgacgacggcgcggggcggcggcgacaacgatgcccggcgcggctcccctcccctcccctcttgcctggcgtggcgacgccggaggaggatggcggcggcgaccgccgcccgtgattttttttttgtttttttgaatgtattttcgcaagcggattgttgccccaactgcgaaaatggatgattttcgcagtcgttgacctccgcctgcaaaaatcactttttgccgcctggaaagatattttttctagtagtgcgcgccctcccctccgccagatccagctgaaggggaggcggtgggcgacgagtggcaacggtgccctctctttcgccggatccggcagaaggggtgccggaaggtggtggcgcaagagggaaggctgcgggcggcgacagcgccctccctttcctacctctcatcccagtatattgtagaattcgttggtgatgtttttgtgaatttgttcattctgtgatgtcaatttattttggtaatgatttgtggatgatttttgggtttgggatactaatttgatttggagatgggcgcatgcgcggtgacggcgcttagtgagttcggctcgaattcgagctggctctctgtttttttttggcttgagcaatgctaaaggtgtgagttctatttttcttataggtgtcggttgttagcattggtgccgaccaattggtgctggatttatgtggcacctatggtcctttatgaaccggcacctttgaccttttttaagtagtgataaatattataaccgtggatttttgaagcccaacaacgtatttgggtctccattcaatgtccgttacatatgcttccataatttgtgtgtatcgtcgtatcgatctctgctgccgtgttagactccgctggtgacaagatcaggacacgcatgctacagaccctgcactcgaggatctccgtcgaccaaacgcagtgcggtcgccttggcagccttcgtttctcctagaagagttgaataaaattttgtatactcgtgatatgtttttcaaactgctaacgatatgtttcgtgtgaaaattttctatataaaagttgctttaagatatcatattaatccatttttcaagtatgtaataattaaaactcaattaattacacgttattactacctcgttttaggtaaaacacttaatcttcttcatcttcatcttcaggagattcaaacaccacctttgttaagcaagatttgattcaagttaatatctgcagctactatatcttcgttttaatttctcaagcaagcaagatatattcgattcaacttttttgggttttgtttagttcttttttacatgtttctcatctgaaattacgtataaattaatctcaggtatcatgatcttcatagccataattttgagggagtttataaggtatattcatttgcttttaagttaatttctcccacgtccttcgtaagcaaccaataggcttcactgtggatctttcatatttttctttttgtctttgcagatctttacaatatcaatattaacttaattctgaaattcaaaagtattaattagcatgtgtacatcttttaaccaaaaccacaatattaacagactaatgagtatattaaacttaagatgaaaattttattatttaacatattatattagacagtataatatagggttggcgattagatctatactaattggatattttgtattttctagaagctctaacgttaagtagaaacatctgaccgtttatcacataaattatttaatcattgcagttgataattgctgatctaaggccatttaaagcccttctactctaaaggtcttcaaaagctattcaaggcccagtagtccagtacgttaatagctcatctcatgctctacacattgaacctaatggacaggacagggaatatgcagaaagaccattcctaacctaacgactaaaatgatatccatagcattaaataagctgccacctagaatgaaatatgatgtgacaagtgaataaataagaaaaaaagaaaaaaccaggtcttgcatacaccatatttaagacatcatgtgagataagtagcattaaatttaagtatagaatagtggtttttgcattgaaagattagtgtctagtattagtttcttgataatgtggagtttatgaaactatatctagtgtcttgggttgggactggcctaaacccttaagcacttgcccctagatgccatgtagactcatttgctgatgtggaagagagagggaaggagagagtgaacgagccacctctcgtgcaaggggtgacctttatacacacttcaataaaaatgtgagagcattaaatttattgaggtttgtgtgctagaggtaacttattgtatagattacctcttaatttatagaaaggtgatagagatgaaattagaggtgacaaccactcaaattgctctaacagattaggatcacaccctgatcgaatgatcagcagcgatttgggcgccatgccgccatccaaccagcattgtgagcaaatcgaggaacgtatggcatgtgagacttcggcagcgacgaaagtgtggagattatgggtatcccatatctacacggcgatggtattcgaactgggtacaggatacctaatgtagatagaatatcttatctgtatcttgggtttgtttcttaacttgtgtatcaaggaaacaccctgagacttagtcggttacgactgtattttacctgtatcttcatattccgttagggatatagattgtcttttgtaatccggactccttcccatatataagggggggtccgggcgcctctaggggcatatgctgatttttcccgaatcatacaatcaataatacactcggcggattcatccccggacaggagtagggtattacttcttttataagaaggcctgaacctgtataaatcctttgtctccaaacccatacacttttctagcttgatagccacccccttttattattgccgaaatctagtttcgacagttggcgcgccaggtagggggagcgtcaagcttttcgccgaccagtgcaatgggtcctttctccggcatcgacgacctcgtcttcccacccgggcagacgtttcggttcggcagcctcgacttcatcaccgacaacttcggcaagatttctctctttgactcggaatcggaccagtcgggagagaaccggatctcagtcccgtttggattcccaaacgcggctgaaacctacttcaagaccatctcaatcgagtcggcttcaaaccactcggctgagatcgcattttctccaatgacaccagatcaaggtgatggggcttacccaccggtcctgatgaagctccccgacgatttagcggccgtctccaccacgacagcgtcctcatcccgtaggcctaggcggaagtcggcttcaacaccgatttcgcctagcttcagggaagtcggcgtcatcctccaaccactcggcacggtctcgacggatcagctagatgaccactacagctctcccaccgtcgactcgcgccccaccgacatcgtggagtacgacgaatttagttctcgctacaacgacttccacgacttcgacgacttcgacggaagcctagatgacgactacacccctctctactttggcgttttcatggccaataacgagacggaggagcaacgccaagcccgggagaccgaagagcgtcgccgactggaggaggagcaccaagcacaagaacaagaacggctacggcgtgagcagcaggaccgtgagcggatcgcgaaggaggctgaggatcgacgtcagcgagctttggaagcggggcgccgagcgcgtgatctcatcggccagcaagatgtcgaagggacaccggttttccgcacccctcaacagaatgcggttgccgcgatcaccctcctcgacaccctcctcaaccaaaacgagctcaatcgatccgaccacgtcgtcaacatcttgaaccagacgaagaccatgatcgcggcttcggtcccagttaactccgaaagcgtccacacgccgactggcagccgagtcccccacttccgatctcatgactaccgtcatccaagcctcagcatcaccggcgcaggatccaaccgcaggagcaggggccacgacgagcggtctgttcactcacctcccgaccttcatagggagcgccgagtggaacggcctcgctcaccacctcgtcgccgccccatcgatcttcgcgacacaatcatacagcgccgagcagctcgaggctaccatcactcgccagaccgccacgacgacgaccttgacggagtagcagccttcaccgacgacctgcgtcgagtggattggccagccggcttcaaaccgactggaatagagaagtatgacggcaccactaaccctgaatcgtggcttaccgtctacggtctcgcaatccgcgcagcaggaggtgacaacaaggccatggcgaactatttaccagtggctttagcggattccgcccgatcttggctccatggactgccccgtggtacgatcggatcttgggccgaattacgcgaccacttcatcgccaacttccaaggcaccttcgagcgtcctggcacacaatatgatctttacaacgttatccagaaatccggagaatcccttcgagagtatatccgacgattttctgaacaacgtaacaagatctccgacatcaccgacgacgtcatcatcgccgcattcaccaaagggattcgccacgaagaattggtcggcaaatttgggcgcaaacctcccagaacagtcaagctcatgtttgaaaaagccaacgagtacgccaaagccgaagacgccgtcaccgcatcgaagcagtcgggtcccagttggaagcctaaaaatacgccggctacgggaggaggtggaagtaacaaccataaggaccgcaagcgtaagcctgaggaacttgttgcaaccgctgctcactcttctcgacagcgttcgcgcgtcaacaccttcgacaagatcatgaactcccaatgcccgcatcatccaaactccaaccacgtggccaaagagtgcttcatctacaagcagttcgcggagcagtacaccaagtctactcggaagaactccgacgaggaacaaagcacgtcaaggaaaaaggacgacggcgacaccccggctggatttcaagaccaccgcaaggagctcaaccatattttcggcggccccatggcttatgagtctaaaaggaagcaaaagctgaccgaacgggagatcaatgctgttcagcccgacacgccccaatatcttcgatggtcagagatcgcaatcaggtttgaccgctcggatcatcctgaccgagtggtccacccggggcggtaccccctggtactagacccagtggtccgtaacgtcaagcttcgcagaaccctcattgatggcggcagtgcactcaatatcctcttcgccaagactttggacgatatgcagattcctcgctccgagttaaaatcaagcaatgcgccttttcatggagtaattccaggattatccgcaactccactcggtcagatcactcttccggtcacctttggcactcgggaaaacttccgcacagagaatatcagctttgaagttgccgatttcgagacagcataccatgccatactcggacgcccggcgttagccaagttcatggccgtcccgcactacacgtacatgatgatgaagatgcctggtccccgaggagtcctaaccctacggagcgacatcaagcaagctgtcacatgcgacaaagagagttgcgacatggcccaaacccgcgagatagcgtctgcccgagaggaaatccgactggctgcaaccacggtgagcgaaggagaagtgcccgctgccaagatttcaaaaagtggggaaaccgaagccgagactaaaaagattcccttagatccttctgatcctaccaaaactgctgtaataggcgccgagttagattgtaaataggaaagcgcgctcatcacctttcttcaaaataataaagatatttttgcgtggaaaccttcggatatgcccggtattcccagagaggtgattgagcactccttacatgtcaaagaagacgccaagcctattaaacaacgactccgccgatttgcacaagacaggaaggacgcgatcaaggaggaattgaccaagctgttagcagcaggcttcatcaaagaagtccttcatcccgactggctggcaaacccggttctagttcggaagaaaacagggcaatggcgtatgtgtgttgactacactgacctcaacaagtcctgccctaaagatccttttgggttgcctcgcattgaccaggtagttgactcaaccgccggctgcgagcttctcagttttctggattgctactcggggtatcatcagatccgactgaaggaatccgactgcttgaagacttcattcattacgccttttggggcatactgctacgtcaccatgccgtttggattaaaaaacgcaggagcaacttatcagcgcatgatccagagatgcttttcaacacagatcggccgcaacgttgaagcctatgtggatgacgtagtcgtcaagaccaagcaaaaggatgatctgatcttggatctagaagaaaccttcgcgagcatccgcgccttcaggatgaaattaaaccctgaaaagtgcaccttcggagtaccgtcagggaagctgcttggttttatggtgtctcataggggcatccaagccaacccggagaaagttactgctatcctcaacatgaaaccgccaagcacccagaaagatgttcagaagctgactggatgcatggcggcgctcagccgattcgtttcaagacttggcgagcgggggatgcccttcttcaagctactgaagaaaacagataatttccaatggggacccgaagcacagaaggccttcgaagatctcaaacaactcctcaccaagccgccggtcttagcttcaccacacccgcaggagccgttgttgctgtatgtatcagccacctcccaggtcgtgagcacagtcttggttgttgaacgtgaggaagaaggccatgtccagaaagttcagcgaccaatttacttcgtcagcgaggtcctggccgactccaaaacgaggtaccctcaggttcagaagctgttatatggtattttaattactaccaggaagctgtctcattactttcaaggtcactcggtaacggtggtcacatcattcccactcggcgatgtactccacaaccgcgaagcaaatgggcggattgctaagtgggctttggagttgatgtctttggacatatcattcaagccccgcacttcaatcaagtctcaagcgttagctgattttgtcgccgagtggaccgagtgccaagaggatacccctgtggagaaaatagagcactggaccatgcattttgacgggtcaaaaagactttcgggcactggagctggagtggttttaatttccccgactggagaaagactaagttatgtgctttggatacatttttcggcatctcacaacgtcgccgagtatgaggcgctccttcatgggctacggattgcaatttccctagggataaagcgtctaattgttcgtggtgattcacagctggttgtcaaccaagttatgaaagagtggtcctgcattgacgacaatatgatggcatatcgacaagaggtgcgcaaattggaagacaagttcgatggactcgagctcagtcacgttcttcgacacaacaatgaagctgccgacagacttgccaattttggatccaagcgcgagacggcgccctcagatgttttcgtcgaacacctttatacaccgaccgtacctcataaagataccactcaagatgcagacacccgtgacatagctatggttgaagccgactggcgagagccctttatacgatttttaacttctcaagagctccctcaagacaaagatgaagccgagcggatttcaaggcggagcaaactttatgttttgcacgaatctgagttatacaagaaaagcccttcaggaattctgcaacgctgcgtatctttagaggaagggagacaattgctgaaggacatacattctgggatatgcggaaaccatgctgctgcgcgcaccattgtcggcaaagcttaccggcagggttttttctggcctactgcagtgtccgacgccgacaaaattgtgcgcacatgtgaaggttgccaattttttgccagacaaattcatctgccagctcaagagctgcagactatcccactgtcttggccgtttgcggtttgggggctcgacatggttggcccgtttaaaaaggcagtcggcggttacacgcacctcttcgtggccattgacaaattttccaagtggatcgaagctaagcctgttgtcacgattacagcagataatgctcgcgatttcttcatcaacattgtgcacagattcggagtacccaatcggatcatcaccgataatggcacacaattcaccggcggagtttttaaagacttttgtgaggactttggaatcaagatttgctatgcctccgtggcacaccccatgagcaatggacaggtggagcgagccaatggcatgatacttcaagggattaaagcacgtgtttttgaccggctaaaatcctatgccggcaaatgggtgcaacagttgccatcagtactttggtctttgcgaactacacccagtcgggccacaggccagtcaccttttttccttgtctacggggcagaagcaatgttgccgagtgaagtcgagttcgaatctttgcgcttccgtaatttccgtgaagaacgctatggagaagaccgagtggacgacttgcaccgactggaagaggtccgcgaagcagctttgattcagtcagctcggtacttacaagggttgcgacgttatcataatcgcaatgttcgatctcgtgcctttctagtcggcgacctggttttacggagaattcaaaccacacgagatcggcacaagttatctcctctatgggaagggccatttattatctctgaagttacccggccaggttcatatcgactcaagcgcgaagacggcactctcgttgacaactcttggcacattgaacatcttcgtcgtttctacgcttaactttatcattgtatttccctattttgactgtcaacatcaagttttcttcttgccgttgtcagtcgggggctatcatcataataatggagtgtgattttttatcaattcagtttgcttacttggtttatcattgccttgtttggtttttctacttagtttgcgaggactgaaagtttttaatggcttctttgggttttaggctcaacaaagcttagcaaaaacttttaagaaatcacaaactttgcaagaatcatcaagcacagcataaatacaccagtattgtacaaattgagcctccatgtattacattcaaactcagtcggaatcagttctttcatcatcagattcatcattactcggctggaggtcgttgttgcgaaattgctccacaacatcactcgcaattttgtcagccgcagtttgcgcactactgataagatcaagggcagcttcttcgcttgtcccgtctgcaaatccatcaatggtgtcgatttcaattctcgggtacaaggattttgtcatcgccaaggccatgccagctcccatacttccagctttcttgatattcttgaaatatacttccggagcaacactcagcttgtcaaatatttcggttgcgtcgagtgcactcggaccaccattattgaggaacatggcttggataagtggtgcagcggcattggcgacgttatctcttgctccttcaagcctcttgatcttaccaaccaggacgtcaaactgagcttgagatttgatcttgcgatctacaaaacacatttataataagaatctgctgcattaaagagaggacagttcaaattgtcagctggcagtaccttcaacctccttcaaggctgagtccctttctgcagcaagttctaccttgtcttttttcaaggcttcaatctgtttttccatctgagccattctagtggcttgcgctgtttgaaatccaagtgtttgaggatacaattatgatagcataaatcaatggaacagatctggatgattaccttttgatgaaccacttagttcgaagtttgcatcctggagctgggcgattcggtcccttagctctttctctgtctttttggcgcactccttggcctcatgcagctggtccctgactgcttctagagttcccaaatgaggaaccagcttttccaaagttgtagtcttggcctcattgcgaagatggattctctgcatgatggatcatggttcagttctgctaaaaagaaaacaaagttaccgaaggccgtcactcggaagacttacatttacaatacgagtggcttctccgagcgctttcttcagctggcacacttcttcatcttctttttgacggtttatgactatgccggcggcttgtgaattctcgtcccaccatttgatcaagataggaggacgagagctgtcggtcgcctttatacgagggatttcttctccgtcatcacctgatagtcctgatgtgtttccaagacattagacggataaactgaggttatttaaatcgccattgtttgagaagacaactaacctgaagatgtacctagctgggcgtgaggtgatctttgttctttacccgaagacccagctatcgagtcgttaccagcctctggtccttgcgaagtcgtcgtctgcgcttctacttcggggatctcttgattagggcctgcgtccgactggtttccagtcgggggctcttgagttgttgccgtttcagttgttgccgactggtttccagtcggcggcaggtcactcggattcgccctatctcccgaagcatgggcgccagtcggctggctttcagccgtcggctggttttcagtggtcggctcggggtccttggatatgttctgctctgtcatagccggatcagggtcttttccagatggatctatatcagatggtttcctgcagagtgttctttcagtattcagcatcattttcatgagcaaaacatgccgaagcggaatcataccgagaggtctaatacctggaagatgttctgatctttggcattgcacggccagccagttttttcctgggcatggtacgctttgggggtttactaggcgagcccttatccccagatttatcatcgtcgccttcatcatcatcaagtaccagttttctcttgcgaggacctgtttgaccagccaatttagaggtctgaggttgcgggtctggtctgatcgttggccctccacctccctgagcggtgtgttggcgaggagaccggcgctgagagactggtggatctgacttcatcaatgcatattcctgcacaagatgctaccacggttaattaattcaacatgaagacaagatattatttcggtcataagttgaaggattcagatacatacctgcggaggcggattgaatgcgttgtatggcacgactggcagctggtgtgagtagctaacgacgatagcattcgagaatatcttgtacatcctctccttcatgattttaaagtctagagagtctgggtcttcacggtttggatcatgcttgccgtcgaattcgaatgctgtgcgggatctttccttgagtggcgccagtcggcatttgatgaagtgccgagtgatttgctctccctgtaagccttgttctttaagatttaacatgcgatccagcaactccaaggcttgtgctgcttcatctccgattggaagagagttccaaatatcttggtacactggaggaagacaagtgtacccgggaagagcaggctcgggattctgaacatagaaccagtttgcatgccatcctttgttcgaggtcttgaagggcatcgagaaatatttttggctcagagttcccctcagttggaatcctgcccccccgactacgcacggtttgttcttgtttggttggggcttgaggaagaagatccggcggaatagggcaaagtgaggtttgatccccaaaaaggcttcgcaaacatggacgaaattggcgatatgcactatggaattcgggtttaggtgatgcaagctgattccatagaaattcaagatcccccggaaaaattttgaggtcggaagagcaaagccgccgtagaagaaatgcgagaagactacgatctcatgtgtatcaggggtcgggaaagcctcaccgcacgctggccgccacccgatgatctccttggctgggagaacgccgtgcgccaccatctccttcaggttctcctccgtcacgtcggacggcgcccattggctttcgaagctttctctctcttccgccatcgatttttctcaaatgtgctgatttgattcgagggatggcttgggagaggtgaggaattgaggcggtggatcacgggaaggattttgatgcacttttcggaggtggatttggccggagttgtgaaccctagttcaccggcgcagcttttcactgtagcaaggagtggggaaaatggcgagagttccggcggggaagacgaagcgtcgcttggatataggatttttcagttaagggtatcggaggtgctaatgggcctaggcctgaacagtacttcagcccaatacttttaacagcgtggcccattgtgttccttagggacttaggcatattttgctttggcaatattatgcgcacgacagtgttgcccaatgctgatcaaatcctttttatgcggtaatataattctttggaattattgcaatgcaaattaaaaaggtgcccgacagaaaggcgttatgctgtttttgcaagcttttttaggctacaaaagctgtttgggttaactaggaatggcttgtttttattatagtcatttccttggtatgttatatacctattttcattatggtacatagtcatggcctaggctattcgacttatttattaccataatcttcataatacttgatgggtaatctttagagtttttattcggatgcctgtcaagtgtgttcattcgtgaaccttttagagtgtaaaccactcggatttcttttattatggctaaaaagcagtcggctagcatgcctatttaggcgccgcgtacgcttttgtcatataatgcacaattgtgttactatattgtctttcaactatatgtttagtttgttaactaatcacatagttgggggctacacctaattaggtgcatctattcgatgcaccatattctttatcttttcgccctttacagtccactcggcaggttttggcttgaagagtttgaagtactcggattatcatctttgagagggctacgatggtcgactgcaaaggactcgggggctactgtggagattatgggtatcccatatctacacggcgatggtattcgaactgggtacaggatacctaatgtagatagaatatcttatctgtatcttgggtttgtttcttaacttgtgtatcaaggaaacaccctgagacttagtcggttacgactgtattttacctgtatcttcatattccgttagggatatagattgtcttttgtaatccggactccttcccatatataagggggggtccgggcgcctctaggggcatatgctgatttttcccgaatcatacaatcaataatacactcggcggattcatccccggacaggagtagggtattacttcttttataagaaggcctgaacctgtataaatcctttgtctccaaacccatacacttttctagcttgatagccacccccttttattattgccgaaatctagtttcgacagaaagctcctccaatcggcgacaatttggacttccatcaagcggggccccagttgccctttcatcccaatcgacatcgattttacggatctctccagctcaggtattatttttgtcattcaagattattaactgcaatatattggttgtttatttccatgtttccatacaacacatgttagaaacagaagatcgccctaacattgttgaatgacatatataaataatttacgaatgatatatataaagaacaaaatgatgtttgatgaataattgcaagttatcccttctacatatttagttttttataggatttcttaaaaataatggatcagcaaaaactggagaacaaaacaataatccaaaatatgaagctgtacaaaacttcacgatgcgtagtccatgtggggaaaattgatgaataaatgttgtgttatgcattttgccaaaaaaaaaaaagaaaattccgagatgattgaatccgaatcctggagtagctactcctacagtagctaaccgacacctgtccacctccaattgggtttcgggtcttgcttcaggaaaagtatccactaacccaccgatgcagaaaataaataataaaattgtatttcgaaaaatcggtcaaccaaccgcaccatcattatggcctgaatgttctgcatgcaaggccttttgaatgttctgcatgcaagcctggatattctgcacgcatgcaaggccgtttaaccaggggagtcgttagtgttgatcttgccgccgggagctctatttaagacgccgacgagggtagaagatgcggtaggagtgagcagatgcatcaatggttcagcggcagaaatctaatggagcagaatccggtggtggcagaaggcaaaaactagccgtcgagttctgtcgcacagcagaagccagcggtggccggtggcaggaggccgaacaacggtgacgagttctgtcgcggagcagaagctggtagtggcaggaggcgggacgttgacggcgagttctgtcgtgcagcagaagccgatggtggcagggggcagaatctcattaggtagttctatcacgtagcagaagctggtgtggtcgcagatggcggaacctcatcggcaagttctgccatgcaacagaagccggtggtgcaggagggcatatataagtttaccgaaggaatgcaaggttttgcagaacacaatactcatctacttattggattgatttggctatggcagggtacgtgtggaagagtccaatttgtatatgttctgtctagttcttttctcctgtttgtgtgattagttgtgacggtgttttgcgttcatatgtcaggaatggttttgcacattccatggctgctggtgatcagagtgaagcgatgatcgctctgttcggaaatataacatccattctgatggaagtcatcctcttcccataattaacaaatgctatgaagagatgcgcatggtgttcacttcatgatagtcgcacaacattcaccatgtattttagaagctatgatgtagtaacccgggcacaacaggaatgcttcggaacatgtgtccttggagaacatgtagcccgtaggctaatgaatggaaagtattgaaatactcgctccatctacttttgatagtcatattttatcttagcacacggaccaaggataagtaattctacttatcatccatttaaacatgctactagtcattcctcgtaaacaatcaattcattaatatttacatttctcaatacccatgtaaccaatcatgtgtggaagaatggagagtcatgcgttaaatccgagaaagtcattaagaggataggttgttggattgaaatatgcctatcaaaaataaatttttcaggtttagaaatatgactatcaaaagtagatggagggagtaatggcttgctttcttcatgactatagattagtagtaggaagtgtcccaatatatgtatgaagttcctttttcttcttatcgagatgcaagtaatatttgagttgagttatatgtaacatctgcatgttggtcagtgcaataaaaatgagtacttttagctgattgtgttaagcaaactccctattgtcatcttaattgaaagtgcagaagaactcgatatagttcttgcagaatatagtctagtaaaatggaatggagacatcggaactgatgcatgtgagtgtatgtggctgccatattgatcagatgaataccagaggtgaccttctgggttcttgtagatccaatagatggaaaatatcaaatgaatacggaagccatgcgccttgctgctggaattctccatgccagttctttcaccatatgatctgcaacacagtcaccggcgagggtacaaatcttagttcaggagggttctgaactctcctcatgcagagaacgatttcggaatgatgatgttctgctcgtcgtcaacaatgggtcaattatcctgccttctcgctctggataaacaatatgaattgcgaataaaccatccgaatatctctcttgttagctcattgccgttcgaatttcatatctgcactagactcggaaagatttgtttgattttcaaatatgctgcagaggaggaacgatttttattgattaccaagaaaaatatatctggttaaatgaatcgggtgggattatacgagtacattaaacccgttaacagttgttaacataccccatgccagcgattatattgacggtggataggaagagagtagctactcccggtagtagcgtataatatatatatatatagacacacactagcaaatatgcccgtgcgttgcaccgggtaaatatcaaacaaatattgatgggtaagattgtttgtgtacttataacacatgtgcacaaaaatattgaatttgtacatatcttgcaaatatctccaaattttatacatacgagttgtgcaaatcgtgtgaattccgtattgtcgtattgatctagagcattactgatgagccatctatggtgataaatttggagggtgtagcccaatgaatttgcatttgctatatatgttagtgttgatatgtcactactacaaccatcggcgaccttccccgggattcaagcctgttgaccccgccaatgtggcggcgatgcagggtgccgagatgagcgccacggggctattcttcctgtccagggtcagcccccgctgtgtggttgctgcggtgctcaggctgttgaggcgaatatgaggcaccatccaataatgacgggagaagattaataaggccacaacactcaaggacgtggtgggcggtgtcgtggaggtgctcccggtaaacaagctggccaccagggaggacgcctataaggtgcggtcgccgctgcgcagaacgacaggaggcatgccagtggcggcagggagctaacacgatccattcaatcccgatccgagtcaatcaagaatccaatcccgcaccgtgcagatgtgtttttcttttccgcggggaaagcgatcaccgatggtagggacaaagtgcgtgcgagaacgcattctacaaagtctaggtcagtccggagcaggccaggagtccaagtttattcacaaagacccattctacaaagacccattctacaaccaggagtccacgtccttccacaccttttcctactctccttttttttttttctttcattgaaacctttcgctatatatttctagtcatttccagtatccatgcacataaaactgtatagatttctcacgtaaggtaaaaggcaaaatctttatatttactaaaaaatagaaaaacagaacacattttttttaattctaatttacagcagcgttgtatttagtcatgtcctattagagaaaaaaaatgaatttaacggaaagaaggtaggaaaaaaaaagagaacagggaccaaacaacagaagatttcgtttgattgcctattcctttgcattgagaacggcagataatgctcatttttgaaaacttttatatgggtcccatgggcatacattgaactgagagtatactactcctactttgcttttctgctgcacgcgtcgaccctttctgctacatgcgtcgaagccgagacaacggcgcgcacacgcgccttaattccgcacctcgaccttatcctttcccactttcctcccggtttctctcctcccctcgctcgccttctcggtttccttctatccttctcctcgcgctactctcaaccaacgacactctccctctccggcactccacctccctctcccccatcatgtctcttctcaacaacgagagtgagcgccgcccttcccatttcttctcccacccaccacgcatcagccgagagagagcaccgcgagtggataaacgcatccttatccactcgcctcctcctctcacccgtccctctctctccctctcgatcactccctctcatccccgcccccacccttctcgtctctcccttgtcggtagcagaggaggcggcagcgatggcgttaactgctcccgtgggctggatccgacggtggctgtggcatcggcggctcccgctggcgaatccggcggaggcggcggcggtgttgtttctggcaggcggattcggtggaggcttttccggcgggtggatccagcggttctctaccccctcgtcctcaccctccgcgcccaagcttgtcctgcggcggtggcatcagcgctcccacgggcagatctggcagaagtggtggcggcggcgtttctgatgggtagatcaagcggtcctccacacactccccctctgccccaagcttctcccgcggatccgccggcggcggcggcggcttctcccttggatccggtggcggcgacgacgttggtggcacccaccggcgatccggccaagggaatctgcctgacgccgccgacgtcccctcggcccgatccgccgttgttgttggttgtgtatttgttgtttgtatatgtgatgatgatgtcgttgttacgattgattttggggtttttatgtgatgatggtgttgaagctcccccacccccccccttttcctctcaaccactcttg

SEQ ID NO: 28211 - DNA, 10220 bp, Oryza sativa
  unsure (1)..(10220): unsure at all n locations
ctcgcacatctaaccttttgggttttttgcgaaccaaagggtaataagttgagcatttgcacccccaatacgattcccggagagagtgaacagttaaaaaatatatccacagtgagtcttacctcgggatggaaagcccgataagctttaagttcgcacagaggggaagagcgcatagccaccccatagcgcccggtgaacgcctttaaatatcctataaacaatgtggtgttccatggccacctccanatcaatatttatatttatgatcctatttatacatatatcagtatgcatatatatatatatatatatatattggcgacgtttgatgtcacgactacggtttttgcatagtatggggatcgttggtacttggatatatgcgagattgaggtaaaacagatggggacgaggatttttatacaggttcgggcccttaaattgtcaagtaataaccctactcctattggccgaagccggtcgttgctcttattcaccataatcacaccagtataatatttggggaagcctatctaactgttgtcaacttggtggtctgaagtgctgactcgtagtcgacaacagggtagccttactcctcgaatccgcatccggcaagatcaaagacagtgctatgtctctcctatcagtatccgtaaacaccataggggactagccatgcttatctctgaagtcgatatccggcgtcttgtcttggcgtatgttagcttgtatgttgatcttgtgtcttgatctattgttccgtgtcccctctcctcctagggggtcttgtatttatatccataggtgttcccttgtccaagtagtacttggaaaaccaatatggatacaatccgagtagtccttatcgtttccatgtagaactctattcatctttccttatgcggaactcctcctatatccgaaggttgtttccgtataaaacatgatatgtggtgggtcctgctgagatttaatcaactactattaggtatatggtatctataaccctgacacacacacacatatatagtagctatattatacacccctcccttagaataactattctacacccccctccccccatcagcccaactaccaagcccattcctccctccccccatcacgcgcgggtccacctccctcctgatccacgccctgccccgcctccccagcgcccgctcccctccttctcctaccagcgcgagcgatcgcgcgcccgtgcgcccggcccagcttcttcctccacagcagatctctctctttttttcttcgctttttctcctcctccccatcccgatttctctctctcctttttttccttcgccttttctcctcctcctccccatcccgatctctctctctctctttctttttttcttttcttcgttttttctctccaatctcttattttcatttctattttcgtttttagaacccatgatcttatggttcataacaaactcccctaaccaatccgccttatgacacgatttgatttgagatcattattttctttctatatatatctgttcaaaatttatgaacacaaacccgttatgttactataggaagtcatatcttgttactatgattcggtagtaacattatcgcagaactgcattgacacaatatgttactgcaaaatttataggccgttactgcgcaatgtataggtcgttactgcacttttagcagtaacatcatgatgaaattatagtaacagagaacatatggtagtaacggtactactgcagtaccactggttgtgcatagctaaaatttaaaatatccatcttgtgcaaaatacaagtgctaaaaaagtgcatgtgcatggtcacaagttaacacaagtgctaaaagtacttttctttgtccatacaaagatacgtagtagcaagcttagtacaagtaaacttttagaattctaatctttaaacaataatatctctcacatcgcatattattttttagaaccgttttcaccataacattgtaaaacgacgttacaacgagacaatagtcatgttactacacgatgatcgacacaaaaatgcttttataacgttattttgcagaaattagtcatgttactgcacattgatcgttgcgttactacgccgttccagcgacacgagaactaaaaaaagtaaatcccaatctttagagagcaatatctctcacgttatatagtatttttctaatctatccgcaccatgatgttcgtaaaaaaatgcttaacaaaactagatccatcatgactatttttcgatgttgttactacgagaaagttgtcctgttactgcacgatgaccgttatgttactacggaattcttgcgagacgtgaacttcaaagtggtgggcgggggagatagtcaatgttcggttcagtcatagatctcaccggcggtatgggtctatgaccttctgttgattaaggtggtagggggtacttgggccctagtaagggtgggggaggtggcattggcccatggaagggggggtgtagaatagttattctaggggaggggtgtagaatagattcactatatatatatatataatattcaagtaatgctattttatagtttacaaaagtaatctatttatctattttgcctttttttttcttattgactcggcacttcaagagtgcttccacgctatagaaaatacggactgtgaattacatgtatcgtgttaaataaaacctgcaattggaatatcacatgctttattttaatttttaaaatagtaataattataaaatacagaattatgtctattttagattctcactttaatattgtattaatttatttcccaaattaaaatttataattagcaagttgtacttgaatttggaaaatgaccaacatattcaacataggattaaaaatactcatatttattatacacacacatacgatccaacagatgacgaggctctctaaccgctgaggaaaggtactgccagcttgtcaccgccttcctcgtggatcgccaaattcgaagtttccaacgtctactccggtggcgacaaggacgggatatgggtccagatctcctagagttggctacaactctatcaggtggagttgccatgatatgtgtcattccgtataccccaacggctaggattaagccacgttaatgttaatatatacttaaaacaagtaattaaccgtgcaacagataaacttacatcaacaacatatcacaagatatttttactgtagaattatagaattaatacaagaatttcatacttcatctattttatttaaaaattatacatattataagaatttcatacttcatctattttattaaaaaattatacatattaatattgatatggttcgctgttgcatatatatgaaaacactatgttgatatatactgctgcttagagttgatcgactgtatgtgtttattaagaacaaaaagtttttcacttaattttttgttgagaacataatcaaaatagaggaagcgttgaaaaaactaattttcctctcaagctataaccattaatgttgaggagttaatttattaggtaaatttgatgaggcatgatctcagccgtaggaaacaatggatggtatagatttggccaactctacttgtagagttatacccaactccaggggatccagaccccaaaatataagacacaaccacccttaacccaaagaccaagaaataattattattatatcttgtagtttggatcatcctaaaaaatataatgccactggtggagaaacgatttgtactcccggttggaaacccccctatagtcccggttttccaaccgggagtaacaatccgggactaaagatcgctatctttagtcccggttcaaatacccgggactaaagatcgatctttagtcccggttgatgttaccaaccgggactaaagatgtggtcctggttggatggtttttttctttttttttcttttctctctttcttttcactgttcttttgcccaaacaatctcacatcaaacattcacagcaaatcattcacaacattatctcagatcaaacattcacaacaacaatatagttcatccaaatcattcacagcaatagttcatctcaaatcattcacacaatagttcatcccaaaacattcacaacaacaacaacatagatcaaatcacacattcaacatagatcgtatcaatcaacacagagcgaatcgcacattaaggaaaaaaagaaaaaaaagaaaaagaaattccacggtagcgccgcctccaccacctgccgccgcaccggtctccgcgccgggcgcagccctccggacgaggccaccgcccggctgcctcccccttcagatccggcggcagccggccgcttcccctccggatccgccgccgcccggctgccgcggcgtgaggccgccttcaccccaccgcgcaaggggcccgccgccgccgcggcgcgaggccgacttcgcctccgcccggccgctgacggaagagaggggaggaatagaacggggagaggaggaggaggaagagatgggaggaggaagagaggggaggaataaaacggagaagagacgggaggagtaagagataaggttagggaagagataagaatagaatttattaactcctcgatctcgtgcacgcctcatcctctccgccacatgcgtgcatgccgatcttttgttccggtttaggctaccaaccgggactagaaatagatctttagtcccggttggtgtcaccaaccgggactaaaaatagatctttagtcccggttgacaacaccaaccgggactaaagataaaaaagtagctctaaccttttgaaccgggactaaagataatctttagtcccggtttttattgcaaccgggactagtatagattttagctgaccgaccaaagatggtttctccaccagtgtgcatacatctaataggattagagcaagtttaatagtatagctaactaccagctccaattcatctatagccaatctaatagcccattcatacaatagttgcatactacactattaatacctggtcccacctgtcatacgcacactgcatcttggagtccgtgctacagctggctacaaatctgtagtccgctgcttctctctccttatttatctgcttaaaatatgtttgcagctggcttatagcctgctattgtacctgctcatcgataacatgtgagtggaggatttaaaataataataatttaatgaagaatatgtcatagttgattgcatgcttgcatgcatgccttatattatgaaacatcgaagaaaattggttatgccttatattatgtaatggagggagtacatccgtttcttatttagtgtattatgttgactctttatatgccgtttgatcatattcatatggttgaataaaaatacataagtattagtattttgtttgttgtcttgttttaaagtgcaaattatggttaagcttttgtactccctccatcccattttaagtgcaataataacttttcgtgtccaactttaagcatccgtcttatttgaagtttttttataattactctctccatcctataatataaggcatgtcaaacttggtacaatttttaaaactaatcttttgacttatatcttctcatacttctataaggtttgttgcaacaaaattataactatcttaaagtaaatttaaatgtcaatccaatgatattaattatagcaaataaaatttaatttatattataataattgttggtcaaatatttttaaagttgaatcctgaaatatatacacaccttatattatgggatagagaatgtagtatttttattgttgagatgataaaatataaatagtactttatatatgacttatgtttttcaagttttttttaagaaaataaataaaacggacggtcaaaattgtgcacagaaaattatggctgcacttgaaatgggatggatggagtatttctagtgttcaattcggctacacaaaacgaaatattcctgctaacggttttagagctggtttaacaagtactctcgggagtaaaatcatttcttaccagcacactcgggaaacgacgaggggtagcatgacagactgacttgatgatgaattgatgatagacgaccttgcgttggaaattcccacatgcagttactatttggttcatcactgcacacacgcgccgttgccatgcattccaagtttcgaaccctcggatggcgcgccgtcccactgctggttggtcggcaagaccttggacggcgcgacgtccactactacacaaatgctccagatgtcagaaatactaacggagcgtttaaactgagaggtgtaaagttttagtgtgtcacattggatattatataatgtatcgtatggagtgttcgggcattaataaaagaattaattatagaatccgtcagtaaatcgcgcgagacgaatttattaaatctaattaatccatcattagcaaatgcttactgtagcactacattgtcaatcatagagcaattaggcttaaaagattcgtctcgcaaattagtcacaatctgtgcaattagttattttttttactatatttaatacttcatacatgtgttcaaatgtttgatgtgacagggtgaaaaatatttgggtaggatctaaacatggcctaaaatcaacacacagtgttctttccacaaaaacatgcaccagcagagcaccatcagctagaatcggcacttttataaagaataggtgttgatttaaaaaaaaaaccagcaccaatacttgtccggtttttaaaacaatcgacacctttaattaatttattgtaggtgctagttaattaaaaactgacactacaaatatataaaatttaaaatcgactggaaaaatgtaaatttgactgtcaatgacacgatctattcagagtcaaatctactgtttttatttttacttatataagttaaattttataataatacattacatattaatttatcttattacaagtttttaaatttttgatattttatggatggcatgtaaatacaagagaatgtaccagcgagaaatgaagactttagtactatattttttttatttgtacttgtctactttaatgtagaagaacatagcgatccaatggatcactgcatgccacgtgtgattacaggctaaagtgtgtctcgttgcggatggtctgatgagttgaactgggactgctacgcatgaggtcgtgggccaaggccctttacagatgaggccgtgtgacaagcatgttctggcaaacacggtatcatgcttgcccaaacaatggaataatgaaaacctgataattaaagatagcaacctattatatagtcctccacataatgcacaccaggcacttgcgcagataaagtcgaagcatgtcacccatagataaataagctcgatcaactgaatgtctgaaacatcgaagacagtacgtagctaataggccagtcgactacgtacaacacatgcgcacgcatttccactgaaaaaacctactcacacgcgacattagctacggcgagcgggtaggcgaaggagttggagtactggaaggagacggcctcgctaggacccaaccggcctccgcccttcaccagacagtcgttgaagccgatacgctggaactggctggggtcgacgagctccgcggaggcaaactcgccgcaggagatgtggacgtcgtacaccgtgcacgccgtgcagacgttgatgatttccacgctgtaggtcgggatgccgctggggaggtgctccgcgttgttctggtacaccaccacgttctgctccgagcagctgtccggctgcatccgctgcatccagtggcgtccgccattaggagagtgatcttcacctgatgatcaacgcatgcatgcagggacattgagacaactaatatataaattcatgtatctaatgtatgaaatcagagggtttggtccttgtgtatatgagtatatagcgtactgatgttgagaagcttgttcatgttcaacgtcttggactgcatcgcggaggaagatgactcgccagagactactagagctgcattaaaatcaagatgatggtcacagagacgaagccaaacgcatgagaaactgagaaatttagaattgacagctgcataccttggctagctacgagcagcagcaagatgatggtcacagatgaagccaaacgcatcgtagtgcagtcggccattgccttctctgtataacctgcagctagatcttacctagatttgaaatagggtagcagttggcagcaaactgccaaatacttgctcaagctatacaggcatgcacttcacttgcctgccgggagtatataagttcaccaggccatctgctcatgcatgtttgcctctgcaaacatagcacgccacttgactcgggagaggcaatgcattaactgagaccgcgcgcatgcatgcacgcgcgcacaccattcgaacggttggcttcgtcccgcggataggtctcgatgccgattggttacccacgacggcatattgggtggactgccgccacgcgcgatgaagcggccggtggacggctgccactctatcgaagatgctgccacccggactgccgcccccgcccatagcttctactatggtggtgtttggatccataagtcctagggacttattttagtcttaggactaatcattttagtccataactgtttggttatagggactaaaagggactaaagtttattaaatgcgctgcacaatgaccatattaccccctaaaaccatacaaagtggactgcaccatgccccttgctgcagcatgctgtttgctgccgctgctagcactttacaagcaaaaccattgttgctgcatgacagcacaaccaaatgcaagccaaatcaatgtttcaccccaacatcacatgttttaatccatcataatttggacaaatacacaccttcagcaagccgaatcacaagcaataacccccacatcattttcatcatcaatatcacagcctaatcacagaaattcaaagaagctcatacacatctcaagttgttgaaatacatcacagaagtttcaatgttacaaattacaagcactcatggttcaattgacaagttaaaccaaatacaattcacaataaatttgaaccattcattacattcctttcaaagaccacaatccatcggcaacccagtcccgaaattggttcatgacacgcgagtccaaatcgtttgttggttcactagatggagcagaggttccacccaatggatcataattttcatcatggtcacaattgtcgaactctgtattagccatttgactgtctctaatgaaattatgaagtgctatgcatgcatggataattctgctttgtttttcctgcgagtagctaggtaaactaaacaaaatcctccacttgttcttcaagaccccaaatgacctctctatgacattccgacacgaagaatggcagtaattaaagtgctcccttcttccccttggcaatgtgctttcgttgtactcttggaatgatatgttatacccttgtatggtgctagataacccagcctatttgggtatcccgagtctacgagataaaactttcctggaggtggctttggaaacttggcactaaatctagtttgtgcatcattgaataccctcatgtcatgaaccgaaccaggccagccagcaagcacgaaagtaaatctcatatcaaagtcacagacaaacataacattctgactcttctccttatgtctattcctatgttgaacagcagctgaatttggcaccacaacttggatgtgagtaccatctattgctccaatgcaattatccaaatatggtgtgtactgtggagaaagcaatttcttatggactgttgtgaataagggatcttttggcctaatgatatcttttgcaagtttcagtagagcggtcaaaactgctttgaacttactatgtactgttctaagagacctaacaaatcggtcttgggcttgcctaactgattggggagcacctactatccacaaaaaaaagacccaaacactccatggaatctattttgtttgtggacttcaactcatatgattccacaagcacagaatgtaacctctcaaaaactggcctgtgcatcctaaacnnnnnnnnnnnnnnnnnnnnnnnnnntgatntcaggggcg

SEQ ID NO: 28212 - DNA, 1844 bp, Oryza sativa
cgcgcgccaattgactaacattgagtacccgcgtctatcaattagggtatttgacttatcactttcagagttgaaagaattgagcagccccttcatgagcttcaccactgggctcttactttttttcccaggactagaagctgtggacacatcacagctgctactccctctcttcctgttgttagtgctcatggggctgttctcataaccatcccctacagctctttcccctctagctgtctcccctgcatcccctgcttcttcttctccttcctctccatcttcatcttcaaaaccagggatatatgctgtggaaccatcaactgcaactccttgaaacatctctataagaaaatctaagtactcagggttgccatggcaaaatttcttggcatcccccttctcctgtattgacacttaatcaatatcacataaaactctaaaatcatgtaaactagctcaatttttgacaactgcgtacctttttttttcccaccaagcatttgatgcaattatttctccactagcacttctaccagctccagtttgttggttcagccacacccaagcaatgtactaattctttagatgggtgaatctattctttatctgtttggttgaatgccttaggttagccctttggaaatatttggccttcaaattctggtaccctctagttgtccatgctccattaggacaatgcccatcccttatttcctcacgtgctatttcacacaatgtgtaagttttttcttctgtccaatttgccttgtcatacgtattctaggaaagaaaaacatgatttaaccctaaattaaccacatgaacaacaaatgacataatacaaatgcttagctcacggcatgcatagcaatatcaatatcatgagcaacaattggcatatttcgcaatagaacagaacaaacataacagatttgaaccatcgggggtttaccatgtgctgaccatcaggaccaaagtcctcttcgtcttcatcgttgccgtcgtcctcagacacatatgtcccttgagacgacgacgcaccgactcgctgtcctcctccgaagactccaaagtcaaaggcgggtggcccactgtgcgacatggatgtcccatgacctcggacgcgtccttcgctagacgatgagccaggaggaacccatcctcgcattcccctgccagatccaacgccattggtcaacgacctgccacggcctcgtcctcctcctctccctccacgacttctgccgcgtccccctccccccgctggaggaggacgtgatggggggactggatctgctccctgcccgaatcggaggtaacccaaggctacccggttgaatgatctgttggtaggaggcgaaatcggggaaggcgtcggcctgggagttcagattgaggccccccgatccccctcccccaaaatggatgtcggcgccagatccaccatatcctgaagatccctgcgagaagccgtagtcggagccgtccatgtggcccgctggagcttcattgaacgactgggagaagaaatcgtgaggattcccccccgccattgttgatgcgcgattcgtgaggcttgcgtgagcggcgtcggcttgcacgacaccggtgagccaagcggcgggcagaggactagctaggcggtgggggctaacgcagggagacggcggcgaggtgtaacgccccgattttcgttcgggattaaaaatcatttaataatgcatttcctagaaattaaataaaaatttaagcaatttattcgagtgaattaattggagaattaaaaatttgccttaaaaatcactggccaggaatattttgcaatattctttgtgccctaa

SEQ ID NO: 28213 - DNA, 6695 bp, Oryza sativa
  unsure (1)..(6695): unsure at all n locations
ggcttganccgtgccgttgctcaaccgcgccaccccgtggtcccggtcccgggtgggaccgattccccttgacccgttgacgtgtgggcccgccctgtcggcgccggcctctttgatgacgtcagcgcttaagctttttcctttgagaaaataaataataattgcgcaataaatcgagtttaattctagaaattcattcaaatggctcaaaacttctaaaattcatacctaattcattcgaactccgaattgagccattcaacttgcaaaattcatctaaaattgagctctacatgtttgtttagtttttatgtactgttttattgatttttattagagtttttcctcgttttgcatgccagtgtgtagaatccgtcgtttcgaaagtccgcggtcgcgaggaaaagagttcggaagatcaaagtgaagaagcaaggcaagtcacacattccccttgagcatgttgatcccaatttacaaatattttactgtttgcaaataaatatgcatgttttgctaattacatggggtcagggttttacctatctgctcgcttgtgccatgtttacttgatatctgtcctttgtcaaccatgggtaataaatcacctagcttgtgttactttgatgacctagctagaactatatgcttagccatgcttaattaccactagctcagtcgatgggataattgcagtattagacattctagtatcttgttgagctgcgtgctcgagacatctggccatgcttcatggtcgtaattatccaactaaaatgcgactgaatggtgggctgtgggtgcatggttttgctagtcgcacccatggcaattaaggaccgattcgcgggatgccctggaagaacttatcgtacttaccacaagccagcgtgggcaacggctgggcttatagtgtagctttcctctagctgacgcatccaggcaaggatgggcgtgatggagcggggcgggccctgcgacggcctctgtcgcttccggattcacctaggcacgagaggggactgcccgtcgcccgctagggacgggggtgaaacctgaggtgtggtgtgcttggctagagggggttatgtgaagggtcctgtcacggcctctttccggtatgtcgtggtggcatgtcggcgcacggtaacgtgtcgtggggctgtgtcttgtgggtacagttgtacacctctgatcagagtaaaactattcgaatagccgtgcccgcggttatgggcggtcgaccagattcaccgtgattagtctcacacttaataaatcgacccaatacactgtagttcaggtgggttggttgggcctgttcaacgtggtgtagcgttgatcagtggagatttaatgttactctaattactcaacagttttactgttttgctcaataaaatgttttacaaccgcctttatgcaaatagccacaaacaatccttgtatccccttgcacgtctgcatcgttggtgtggcttgctgagtacggtggttgtactcagccttgctattattcccccttttcagaagtgtagtgcttctgagctgaagacgaagttagaggaccaaggctcagaccccagttgagttttgcctgtggagtggagctgaagccccgctaggatcgcctttttccgctgctgctgctttcgtttcggtgcgaggactaagtgcctcttttgtaagtattttacgctttatttacgtttggaactgtatattacttgtcgctttgtgtaccctggctggtccttgacagggatttaatacacaaaatagtctggaaatttgggctaaatttctgggcgtgacacgagggcgcggggttgtgaggagcgagagagagacggcggcgagggcgcggggttgtgaggagcgagagagagatgacgcgaggaagagatgaggcgaggaagagagtgggcgaggaaatggatagggttggctggcgtgaaggggcagtggctggaagagagccactttttcccaataagcacctccatttgggacttctggactaatgcactttagtcccattttagtccctcctgtttggtactctagggacttaaagggacttaaagtggtgggacttcttttttagaccctcaaagaaacagggcctatggctggcgtccaaccggttggcgtggagaggagaaagcgattcttcatatcccttaaatagttacaaaaaatataaaaaataacaaagataaatgcgaatgtgtattaaccaatttcagtttaatttactattttataacttgtagaagtcgaatttgctgcgaagtgcgaagtggtatatatcatattaatttatttattataattcttaaaagaacataaatatttagatgtcataaaataaacaagagaatattttctcaagatgaatatttatttccgtgtagagtagtgagtactacatgtagcaagaaagactctctactataaaacaccacgtagaggccggtctgtcttataggtattgatttgcctaaaaccgacacctataaagaatttttccactttttatcgggatataattaagaagaaatatctatacccagtcattggtatcggtttataaccaaaaccggcacaaaaagtcatatgtgctagtttacaattaaaaccggcacctatgatgcgcaacttatatatatatgtatttttacctaactttttcatactaagttgaagattacctttatatgaaatttgtagtgttccacgagatctacaacctgatagttaattactttttgatttgaggtagtttgggtatccgaaaatatattgtaaagtctcaaatctatttggataagtgaattttcaaaatttctaaacgatctcagatggaggcaaaacctataccttttgactaccctcattagtactgctaaattggtgccgatcacatataaggggtttggaaccaacaccaataagagattttctactggtgactaaatcaagagagataacattagtgcatgcatggacaatataaatatttggggactaggagcgtttgcttcatgtattgattccaatgattcaaatcattttgatgaattttaaagctaactagtaatttgtccgtgctaacgctacggtgacaatatgtatcacatataaacaatcaaatcgaactgtaagttcttgtaatttgccaatgcaacatcctcttcgtccaatattattagtttggacgatttgtggtttagtttagccacatgacacgatggatcgatcgagtaagattggtatattgttctgggtaaaggtgtgcgtacagcttaattcctcacatgtgttgttgattgtttgataaatgatctgtcgatcccataaaccaacttttagctatgtttcttaacatagccacagttagacatatagccagcaattggcctttttttttttttgggaatagagggtgtatatttgcttgataagctacttgccagcagggcaattactgaagtaccagagagttaaattgagcaacccgattcattcagcatcagctgaacacataagtcagtttctcccaaaataatgcactatgaaattccttgcccaagattctagcaagtctcactacaagaaaaaccttatgtagaggctcttttgtagaaacaattttcaaaatgcatctaagttttgaagctctatagtctagagacactttttagaggcacttccaaaatcgtctaaaatatttctactctagagacactttaaagacatttttagcatactttgttaaatttatcttgtagagacatcttttcggcactttaagatttgcctgatatgtaaagatattttcttaaggcacttaaaacgatgtaaaggtatttttccaaatattaatatatatcaagttactagatataagtaacacaaatcacatatttacatgtaattatatgatgttgagatggttagtgcattgaagataaaaatggtcaactcaagaagtcatgagttcaaggattggtaagggttaatatttttctttcttttttcatattgatttgctatagttcccacaacgtattaatgcaaatagagacatcgtagttcgtagagacaattcaccaaaaggcacttatgagagactcttcaaaatgtctcaataacactgaaaggcattaaaaatgtattaatgcctctacaaagtgcctctatttgcatagagacatcttataaaatgactcttagtttgtagagacaattcaccaaaaggcagttatgagacactcttcaaaatgtctcaataacactgaaaggcactttaaaaatgtctctacaaggtatatttgttgtagtgtctatttgcaggcgaccccaaaactgcatataaagacaaattgtaagtgaagttaccttgactttccaactgtactacataaataactcccttaaaccacaagtcatgcaagaccatagatcttagggcgacgctccggtgctctctacttgtagtattctactacaagtagaattaatctcgaccgtttattttaaagggtagattagtaatctcttaatacagattaggggcaattttggcatgggatgatttctctgtctcggtcgcttgttcgcatcaggtccgacgcaatctcgccccaagcccctgacgccgcatcatgtcatcgctaccacctgtaaaaaaaaaaaggttttcgctactcccggtaggcggcggcgcggcgaaaatcgtcggcggcgctgccagtggctcggcgccacgaatcctcagctggccactcctcccacccctgacctgtctatccgttcccattcctctctctcttccccaccatgcgtgtgcgctcgctactcctcctggaaggcagcggcgcagtgaaaatcgccggtggcgctgccagtggttcggcatggcgaaatctcaggtggccactccttccacccctcacctgtctatctgtttccattcatctatcttccccaccgtgcgtgcgcgctggagagcgcaagtcctgccggcggcggcggttgtgcatcacatcccctcccgctgatggctaatctttgcaacgctcccctctacttccattccccttcgcaaagtgagaatggggcactagcttgtggcagcaatattccatcctcttctgcagagggatcaaagaacggcgacatgattatttgtgctggatgagaatcacccaggtcatagcaacatcagttatcttaggtctactctggtggcactctgatccctcgacaccaaaaggtctacaagatcaggtatatagatagcaataatcatgtgattcattttacgccaaagaaaatgcgactcatttggaatggtggagttggttactcagagagcttattaatgatatgtcagctcaggtatgcatcaagattagcatcgtcacacaattttaccttatgtatgcatgccagcttactgtttttcatagctgtgttttggggtttctttcatgtgtttactgccattttcacattcccacaagagaggaaactgtagtaattgttcaatagtttagagtggcattgaattgatgcagttgatgaaacgaacataattttattttgggtggttgtactgatttttattacttatgatgtataaatgacataagcttatatttgggtgcttgtactgattttttttttgtacttattcataggtgaggtctgacataatgaattcgagctatttgagcctagaggatcaggaagagtataaaatgatgggtaatgtggttttttcaagcgaggacgaaggttacaaattctatttaggctatgcaaagggcaagggttttagtgtgaggaaaaacaagttgaagcggaaggacggggagatcatatggaggcaatttgtatgttcatgtgaagggcacatggagttgaagcactttgagaggatagaccgtaaaatggagccacgtgacctgacccgctgtggttgcttagctaagcttgagatcgagctgaacgagaagaagggagtgtggtttgttaaggagtttgataaccaacatacgcacgaacttgcaaatcctgaccatgttgcaactttaggagttcatcgtgtgatgagtgattcttagaaagcccaagcggtcgagcttcgcatgagtggccttaggccctttcaaatcatggaggttatggagaataaccacgatgagttggacgaggttggttttgtgatgaaggacctatataatttctttactcagtacaagatgaagaatatcaagggtcgggatgctgaagatgtgttcaaatatctgacaaagaagcaagaaaaagatgcagaatttttcttcaaatacaccacggatgaggaatggcatcttagtaatgtgttttggccagatgctgaatcgcgtattgactatgctgctttaggtggtattgtcatttaccatagcacttattgtgcgaccaagaataatcatcctttcattcctttcatagtagttaacccaccatagaaggacaacaatatttgggtgcggaattctatccaatgagtccgtaaattcttactgttggctccttgagacttttttggaggcaatgcatcaagtgcatccaaaatcagtaataaccgatgacgacctagcaatggcgaaggctgatcaatttgtacataagtagcaaag

SEQ ID NO: 28214 - DNA, 727 bp, Oryza sativa
tctcctacctccagctccatccccaaccgccgccatggccaccaaatcctcccacgtcgctgcctctcccgcgcgactccctctcccgcgcgtgcgtggacgcggtcgtcgcccacgtccgcgccgtttccccccactctccccgcaaaatccggccacgtcgccgcctcccgcatctctctctcctcccacgtcgccagccggtttctacctctctcgggctcgatcccgcctcccctcccctataaaaacattccccgcacctccctctccattttcccctctctcccgagccctcccgtgcatgaaaaccaccccgccaccgtcgcacctcccgccgccgctcgccgacgaccctccagccggtcgccacagccgctcccaccaccgtcgttccgcgcgaccgccaccagcggcttcgccgcgtcgtgccacaccccggcgtccgctccatttcccctccccacctccgaagtaccgtcgccacgtgcaccacctccttccaccgaagccgccgactccgccggtcctagccaccccaagtcgcgctgtcgccgccgctcgcttcacagtgccgaggagcaccttggccgccgcttttcacggccgggatcccgccggaacacggttcccctcgcgccggtacttccggccgccgtctgccggttctcgctcacggaacgccgccggggccgcctttccgccttcatcccgaggagcgccgacg

SEQ ID NO: 28215 - DNA, 541 bp, Oryza sativa
tgacggagcgtggggctcctcactgggagaccgcgcaggcccccctttgccggttcggccgggggcgctaagtgaggttcttcgccctcgatctgaggaacgtcagcgagagaggaagtgcacaagacacgggcgacgtagacaggttcgggccgctgagaagcgtaacaccctactcctatgttctggtggatctgtgtgtgaaggaatccagcgagccggagagcgagagagagttcaggctctagaacccctttttcttctcttctcttctccccttctaggcctgggcctcctttttatctggtcaggggtcaccacatgggcctctagctgcctaagaaaggaaacatgctttttacaatgagggctagtctacagccggaagtgacctctgacaagcagagcacacgcctcctgcccccctcgccagctttcccggtggacgcccatttcaaccttcattcaatggccagcgacttccttgccatgcttgcgctgaagcctggactggatctgaccgggactgacataccaactc

SEQ ID NO: 28216 - DNA, 11777 bp, Oryza sativa
ccactcactcattctttatatgttccataactctgtgtttggtttgcttgtgtgctgatcagtagaatcgactggtttctcaacacgttatcagcacgagactctaccgagctaaaaaggtaaaaagaacatgtcggacatagcaaagaaggaattcgtcgagcttgccttggatggtagtaactacctcacttgggcattggacgttgagattaaactcgactacatgggtctcgatcatactattgtgctgcccgaagttggcacggtggagtctacgaaggccgagaaagcaaaggcatttcatttcttgcgccaccatctccacccagacctgaagtttgaatatatgaccgagaaagatccactggtattatggcaatccctgaaggatcgctttgaccagcaagggtcaattgtgctcccacaggcacaacatgactggatcaccctacgcttccaagacaacaagtctgtggcggcgtataactctgctctccataggatcatttctcagttgcgtttatgtggcctgaagatcactgacgctgagatgatcgagaaaaccttatctacctttcatcccaacaatataatgctgcaacagcaatacaggaactcaaagtacccgaagtcctctgatcttatctcagtcctgttagttgcagaaaggcagaatgaggttcttctaaagaatcattctgctcgacccactgggtctatggcagtgcctgaagcacatgccaatgttgttggaaactcgcgtggccataaaagaggccacggtgagaagaaagggaaaggtaagggaagtatcatattcaagggcaagagcaagggtaaaccctgaggtaaaggcgaactcaagaaggttacaggtgaatcatctggggtaaagcaggataactgctatagatgtggaggcagagggcattggtctcgtaactgccgtgtccccaagcacctggttgagctctaccaacaaagcatgaatgagaaaaagagccaacatgagtcccacttcaccattgagcctgaagctcagattgaaaagcatgatgacatgcttatcaatgttgaggatggtggggacgtccgtatggacgatgattgggacaaccttcttgaaaaagatgatgacatatttggagacctgaagtaatctcctatatgtcagtcatatgcagtgttctgcatgagtagcacatgtagaactttggtcatgaataatgctcctgaagagcatgcttagtcttttactgggcctgaagtccttgtaatgtttcccttaatagaatcaacttactccatgtttaatttcatttatgtttatgttctataaacagactttgtgggaatcccatggcagaagaggatatatgtctagtagatagtgccaccactaacacaatcttaagggaaactagatatttccacaccttaactaagaaaactggaaatattatgaccattgccggaaacaatgctcatatagtaggccctagaagtgctactcttgttctccctatagggacccataactttgtaaaggatgctctattgtatcctgattgaaagcgtaccctcttaagctttaaagatatccgtgcaaacggtttccatatagaaaccgagattgagcaagatgctgaatatctgctcataacaaaaatagatggatatcaaaagcaagtggtggaaaggctcccttcatcaccatcaggtttgtactacacgtacataaagcccactgaggaatatgttgcgatgaaaaccatatttagaaacccagagtcatttagagtttggcatgacaggctgggtcatcttgggtttggtatgatgaggagaatcatcaacaattctgctagccacaatgttgaaactaatgacttccctaatcctgaagattttatttgccctgcttgtgcaaaagggaagtactaggccatccctcctgaagattagggatgagtcacctgttttcctggcaaggatacagggtgacatatatggacctatccagcccttgtcgggcccgtttagatatttcatggtactgattgatgcttctaccaggtggagccatgtggatctgttgtccacaaggaaccatgctttttcaaagctaattgcccaaatcatcaggctaaaagctagcttccctgatagccgcgtacaatccattcgaatggataatgctggtgagttcaggtcgaaggcttttgatgattattgtttagccatgggcattaaggtagaatattcagtaccacatgtccacactcaaaatggcctagctgagtccttgatcaagaggatcaagttgattgcacggccactgttgcaggattgtaggctaccaaccagttgttggggccatactgtgttgcatgcggcaacactaatccaactcaagccaactgcatatcatagtacatccccccttcagctagtgcgtggaaaagaaccaagtatttcccatctgcgtaatcccaccaccacagcgtacttctatgggaccccaccggaagttggggatatacgttggttatgagactttgtccataatcaagtatcttgagcctatgactagggatcttcatacggctcggtacgctgtttgtatctttgatgaggactattttcccagcattagggggagaaaggcatccagaagaatgccgagatataatatggaatgcaactgggatgcagtccttagatccacgcaatagtgaagctgaactggaagttcagagaatcataaatttgcaaaatcttgcaaataagttgctagatgccttcactgattacaagggaatgacaaggtcgcatatacctgcagtaaatgcgccggaaagagtagaagtaacccagaaggttactgactctgctcttaccccccatcctaggaagagggggagatctccgggtgttcaggacaaggttccgcggagacgtccgcggagacaaggacctgagccacttgttccactcaaagaatcagttgaagaagctcaacctgaagttgagaaagccccagaagaggcaactcaacctgaagttgagatggtcccagaaggacaccatcctgaagatggagaacccagtgctttacgcgcgaaccttggcactggaagatcggaacaccccaactcagtcgttatggcaaatcacgacgagctggaggaaataaatgaggagatttccactaactatgctgatataggagagtaacatcatagaaagaccactattgtcgacattcactttgcctcaaagattgctgttataatggatccagatccagaaccaatgtccatgattgagtgccagaagcactcagattgggacaaatggaaagcagcaatagaggcagagttgcgctcgctttataaaagagaggtttttgggcctacagtcccaacacctcaaagagtcatccctgtaggatgcaaatgggttgtcctccggaagaggaatggccaggtggtgaggtataaagcgaggctagtggcacaagggttcacacagagacccggtattgactaagatgaaactcactctcctgtgatgagtggaatcatgtttcgatacttaatctcaatggcaactaatatgaacttggatatgtagttgatggatgtagtgaccgcatacttgtatgggtcactagattcggaaatttatatgagggtccctgaaggactcaagattccgaatctgaaaggaaatcgcaacatgtatagtgttcgcctgcagtgatcattatacggattgaaacaatccggaaggatgtggttcaatcgattaagtaactatctcctgaagagaggttacttaaaccatgatgattgtccctgtgtgttcataaagaaatccctgaatggatcttgtatcatcttggtctatgtcgatgatcttgatatcattggcaccacagaggacattaaagaagcaatggcttattttaagaccgagtttgagatgaaggacttgtggaaaactaagttctgtttggacctacagctcgagcacctccctgaaggagtgttcatgcaccagtctacctataccaagagggtccttggtaagttcaatatgaataaatgtcatccgttgaaaacccccatggtggtccaatccctggaagcggataaggacccatttaaacccaaggaagatgatgaggaagtgttgggacctgaagttccctacttaagcgccattggagcactaatgtatctagccaattgcacgagacctgatattgtttttgcagttaatctattggctagatatagtgcaaccccaaccagaagacattgggttggcgtcaaaactatcctcacgtaccttcgaggtactcaagatcttgggttgtggttcccgaagaaccaagatccatccatggtgggatatgttaatgctggccatatgtctgatcctcataatgccagatcctagactgggtttgtatttctttgtggtaatactgccatttcctagcgatctgtaaagcataccctggttgcaacgtcaaccaaccacttagaagtaattgctctatatgaggccacacgagaatgtgtgtggcttagtcggatgatcggtcacatccagaagtcatgtggcctaaacattgataacacccccaccattatctatgaggataatgctgcttgtgttgcacaaatacatatgggctatgtgaaaagcaatttcacaaagcatattgctcccaaattcttttatcctcacaagctccagaagagcggggaaataaatgtcttgcaaactaagtcatgcgaaaatctcgtagatttatttataaagtctctgccagcatgtcacgcccggaaattcactagtaatttccgaactaatttgtgcataaaatcctcgtccaggaatcagccgaggtacacaaactgacaatttaatatacaaatccatcttaataataacgttacatacttacaaaagaaaagaaaacagcagcggaataacgatctagcgatggcttcagctccactcccacaggcagctcaactggggtataagccaaacgtcttctccttctggatcctttatcttcaactgaggtttgatgattattgcaagaatgagcatatgacatactcaacaagccacacagcaaatatgcaagtgcacaaggattccaaaggatggcataatataggctcatttgcaaaagcagcatttagcaaaacatttaagagaagtaaaacagtggagtaattaatcagaaattttaatcaacactcagcaacacacccatgctgcacaggcccaaccatcctgaacaaccatacccggctgtacagatctaactccaaaccaggagctaagcagattattaccagttataacatccataattattgtgagaggtgtgagactaatcacgaaaaacattgctcaactcgcccataaccgcgggcacggctattcgaatagttttactctggccagaggtgtaccactgtacccacaagacacgattccacacatgttgccatgccccgaaataccaccacggcattgcaaagggggaaatcgtgacagtaccctttgcacaacacaactcaaaacagtgcaccgttcctggatcataatctccccctcaaaaccagaggcaatggactccccagcgacccccacggacttctcgccgcttcacagtctagcacactatgatgaatcatgctatacaaaagataaagccgttgcccacgctggcttgtggttggcacgataaatgtttcacaacagtagctcgcgaaccggtccttaattgtcatgagcacaaccatcaaaaccatatgctcacaacccaccttaaccagattttatttatcaattaattaacatcacacgattaaccatcgtgagcgaccattaaatataaccataattaaaataatataatatagtttataattatcccctttagttagctaatgtttctaagcatagctaagcacacatacatatagcatttagctgaaccaatccaatatataaggttcatgctactcaaattataacccataggaaaataaagtcatcttaggccattaattaacggggaaaggttcaccacccaatgacattcgaaaataatgcatagttgaaataaaataatagctttaaacgggttcaacatgctcaaagggttatttgggatctgtgtgacttgccttgcaataatcggtcttcaattaatcttcttgaatacttccggcgcattcacgaaccttcgcaacgatggaaacgacaagctaacacgcaaaacgaagaaaaagactaataaaaaccaaataaacaatacaaaaacaagcataaacagtacatgtggatatttttaacatgtagatcttgattttagaaaaatttagcaacttgaaccacctgaaacggatctacggttatttagttatgattttccgaagatttaatctattagaaaaaaaaactggaaaaggggaagatgataatgtcatgatgacgtcatcaatggcggccggctcggatggcgacctcgccggagctagagtgatcggccgggattttggaggacatgtacacgtagaggacgacgagacgaacccaacgatactcaccctcgtgccaaacgacgaccgacgacggccggcgacgaggaggcgacggcggcggctcgggttggccggtggggacgggctacggcggccggcggcgaaggagaggcggcggccgagcttctccacctcttggcgaaaccaacggcggcgacggcaagcgacggcgacgacggaggcggcgtggcggcgcaaccggagttcggccggcggcggcagcggatggtttcacgcggcgacggctctacgggtcacgggagaggacgggagagggggcaaacgaaaaagaaggactagggggtcctatttatagccttggattgaagagatcggactcctcccgcaagaaaatcgactcgggaaatcaaaaactcggttttggagataaactcggaaacgagttcgattcgggcaagatactcaacgatttgctccgatttttgggggtaaagatagaggaggatgagaggataaaaactcctcaaacaatcggaagaaaaagggccggattgggtgcggatttggaggggaaaaggggcggctcgagctagcaaggccggccggccggaggtaggagaagggcccgacatgtgggccccacatgtcggtgtcccatgagaggaggggcggccggctcggcttgagccgactcgggcggccttgggccggctccggcgtgcggaagagagaggaatgttgggccgaattcggcccaacggcttagggaggggtttttgaactttttaattaaaataatttgtgaaatgttgtttcaattattaaaaatacttcccttgctcaaataattcccagaaaaatctagaaaatagaggaacaagcaaagtatttaataaaattttatctagctcatttttatgttgaaaattttcctagattattagagtttaacttgtaggcttttaaaataaattctaataattccaattaaacaacaatttatatatttaggatttttagggcgtgacacatcatcaagcttttacaaatgtgttcatgacatcggcatgagacgactttgtgaattgcaaggattagagggagcaaacaattagcccatgattgtgatcctgaagaatcacaaacaagtcctgaagacttgatcaactgttgtactctttttcccttggtgagtttttttttcccattaggtttttctcacacaaggtttttaacgaggcaacaggtgcaacacaatatctagagtgccatgtactcttttctcctaccattttttcccactgggtttttgggaggagtttttaatgaggcatgcgcataattcaaattcgtccaagggggagtgttatgaaacctatcttattatagacaaattaaattatgattgggaagcttactacaaaagaaagcttacgccagaagccagcttacagaggaagccagcttatggcgcaagccagcttacacgagaagccagcttacgctgtaagccggcttatgatgcaagccagaaggttcaaggcttacgatgcaagcctctaccctcctccgcctataaatagggcccagaaggtccaaggcggggataaccgatcttcggtctactgcttcttcttttgtagcttgtactcaaatccagaagaaataaagcttccgctcgcttattatttctgtgttccataactctgcgtttggtttgcttgtgtgctgatcagtagaatcgactggtttctcaacattgtcaaatctgaaccttccgataatatttccaattttaatacttcaattggtaaagtcctttataattttattttccttaaccatcagacaaacggatgatctctacattcgtgggcaccgtcctggttctgggttttacggaagtaaacaatcgcgtaggccgcacgacacttcaagatagggtgcggcgcactgcggccaccgtcgatgcagatgatttggccggtgatgtatgccgctgctggcatacacaggaacgccaccagcgaccagacctcctccggcttgcctgcacgccgcatcggtgttcgtgcgatttcctcctgtacgaaatccggcgaagtcacgccttgaatatgaggattgttgccgctcttgcactgtagtagagagcatttatattcaatgggagatgaaacaaaaacgaaataattaggctcgattgcatatatagttccgataattccaatggtaaaaaactggttcaattcattgccacccgggtaaaaaagtgtgtaaattactggagcgtgtttcatatatatacatatatggctatcaattgtgcattattctttaggatatatagttcggataaactattcttcttgagtgaaaaaataacttctatctatctatctatttccatctatctatctatctatctatctattattcttcttgagtgaaaaaataacttctaaaagcactccgaaacagccatgtggcactctaattaatcagtggacccactattttaggttttcatctattagatttacacttatatgatcgacccgacattatatgtcattagatctatttttcaaaaaaaaaaaaagaaaatcacatcccctcccgtgtcgcttatgtacgtgtccgtgtacgccctccccctttttatttttgaccgggtgtacgccctcccctttgttccttttctctcctatttttatgctattttagttagatggaaatcacaattatttataatatgtttttagaaaataaaactaaatcattgtcctatacatgtatgtcgacgtttgatgtcgtgattccggtatttgcatagtatggagatcgttgatactagtatatacgcgagacttaggtaaaagacacagagacgaggatttttatacaggttcgggcccttgaattgtcaggtaataaccctacatcctgttggccgaagccggtcgttgctcttatttatcataatcacaccagtacaatatttggggtagcctatctaactgttgtcgacatggcggtctgaaggtctaactcgtagtcgataacagggtagccttcctcctcgaatccacatccggcgagatcagagacaacgctatatctctcctgacggtatccataggcaccgtaggggactagccatgcctatctctgaagtcgatatccggcgtcttgtcttggcgtatgttggcttgtatgttgatctattgtttcgtgtcccctctcctcctagggggtcttgtatttatacccataggtgttcccttgtccaagtagaactatggaaaccaatatggatacaatccgagtagtccttgtcgtttccatgtagaactctattcatcctttcttatgcggaactcctcctatatccgaaagttgtttccgtataagacatgatatgtggtgggttctgccgagatttagcccataaccctgacaacgtacttatagtacgccctcctccccatgttccttggcaggtgtccaccctcctttttttaattatattatttaaattcaaattagaccaaacatttttgaccattaaattattagttttcactattagatcttatcttcgagaaaagaaatatgtatgtttctctctccctgtgcacgtatttaagtttcaaaaagacaaaaaaaaatcatcacttccatctcaggagggatcccatctccctgctgtctctcctttttctcttctattctttagctatcaaccaaatatataaaaaaaaatactcccaccatattatgacgccgttgtctttttatcaatgtttgactattcgtcttattcaaaatttttgtacaaatataaaattatttatgtcatgcttaaagaacatttgatgataaatcaaatcacaataaaataaatgataattacataatttttgaataagaggaatagttaaacgttggtcaaagagttaatggctttatacattaaaatacggagggagtaataattagatagataaacaatcataactctcgagtacatatccaatttttaatttgtttaaactattatttatttaaatgttatcatatgtttctctacaaaaattataatacgtcacctggatatggcgaacccaagaaaagaattatcagggcatcgcatggatatatgccctttctttcagtggcgaggctagcaaaaaattatcagggtactacacatataaattatgcaattgttgattgctatatattgattaatatgaaatgaatatagctagaatcgaataatctacccaggaaggtgaatgtagttaggccaatgtatcttttgcatatcaatcaaacaaaaaaaagctattataaaaaaatgtacatatattttgtcatcttaaaccatttaacgaacatactccgtgaataaattttcatataaaagaaacattaaaaataaaataaacatgtattatgtgatcttaagttattccacaaaattgcatagctatatcagattgacggcgttaaaataaaaattataattgcaaccatgaaaataaatttatgcataaatttaatttatctagggaccacactcctacactttgaatgtaatccaaattgtcatacaaaattgtaaaataatttaacaacatataaattactttgcaagcatgcatagaaaaaatagatatataatatgtaagtgaaaagaaaaaaattaactatgaataacataaaaattataaaaaaaattgtacctttagttggatgcaacaatatctaattaattatgtcttttgaaatatgctcaaccgacgagataaattaaatcggttgatttgtacgtaagcgttctaaaatatagtatacattaccatttaatggacttagaggtaaaaaaacaaaagaatattactatggcttccatatcttttagatataaagataaattagtctattttatatgcgtagaccgttaaaaatgtgaatactcctatatatgaatattaataggctacgagcatgtccgttgttcgtacgcatgcataaccaactttaaaatccatttcgattttctgatataatttactatgtatgaatattaatattatttagattgactatagtttttctttaaactattgtatgggtctcacgtatcatagagaaacaatgttt

SEQ ID NO: 28217 - DNA, 36227 bp, Oryza sativa
  unsure (1)..(36227): unsure at all n locations
caaatcatatacatttgtcagtagtaaaagtttggcgaggtttcttaagaaaatagaaacaatggatcgaacgtatgttattatatattaaaagcacgttaaacttcctacaaacgctcttaaaccgccacgtgtgactcctacaaacgttcctaagtcaccacgtggcgctctaataaattagaggaatttctaataattcttagaaaaagaaaaacatctaacaattgattttactttaaactcagttgttggtgatatgggtgcgggggtattacgtttagagggaggaggccgcccccaaacccacgtggcaccccccgaggggggtcgagccccgggtgcagcggcggctacctcctcatagcttggggtcgggctgccccgaacccacgtggctccctaggaggggggtcgagcccggggtggagcggcggctgccccctcccagcttggggtcgggccgccccgaaccccatgtggctccctccgaggggggtcgagcctgggccgcagcggcagctgccccctcacagcttggggtcgggccgtccccaaacccacgtggctccccccgaggggggtcgagcccggggtggagcggcggccgccccctcccagcttggggtcgggctgccccgactccctccacgtatcagcccacgtgtacagggttcggtgggtgtgcctaacgcccaccttactgcatttaaagcggtccatgcagccgcgccatgccgcatttaatgcggcgtgctgcgcatctgactggtctgtgatcggtcgaatgaccgatgggacggcgactgtgtacccccgccctgtcagtgtgtcaagtggtgtgcgtcgtgctccgtcccatcccatcataatgatgaggggcttcacagcctcttattgcggtcagagctggtccaaccactctgaactgacccgggttcccgtttcctggtgcaaacgggaacccggaagtcctcatccattaaacggtgaatgacaagggtgccccgcatgatttgatgggccccgcacagcagccgacgtgtagatagcttctgggctaaggcacaagacatgtaattaatatagagaatattttcccttctccctaggtagcactcacagcacatgtggtatccccttagaaaataaaaggaggaccatgcctagcgggaaagggggatcgaactctggatcctaagccaaagcttgtctagccctagcttgtacaccagggattcagagactttctaagcacagaagaatcatcatacacacaggagtagagtgttacgcttcatagcagctcgaacctgtataatccctctctcccttcctctctgatctacatctcgtgggcctagctcccgcaaattcaccgcggttgcgtcgaaagagactcctcaggatttcatccgctcccccggccgaactcacaaaggggggcctcacagcctcccgctagagagcatcacccctcgacatcagtggacccactattttcgaccattagatttgctaacaaaaagtaaaagcccctaaggcccataggggctgtccatatcgtttacgcgtatggtgcatgtacatacgctacatcctcccctcttattcaagctcccctccactgtatagaaaatatattttgtgataatctaaatcatagagctaatattttacgtacatcattagattatttattacaaaatttataattcaagacccaaaccattggatttatctcaaaggaaacagacactggtggagaaaccctttgtagtcccggttcgtaacccccctttagtcccggtttccaaaccgggagtaccaatccgggactaaagatcgctatctttagtcccgggtgaaataaccgggagtaaagatcgatctttagtcccggttggtaacaccagccgggactaaagatcgagctgaccttttttttttttgcatgcccctgttgctgcatggtttatatatatatatataaaccatgcatatatatgtttcaatacatatatatgcatacatatatatatgtatttatacatatatatgttatgcaaatgcatatgtatatagatatatatatgaacaaaatatatttacattatagaaaatgtgtacacatgcatatagaaacatatgtagtcatgtattaattacaatccattatatgtcctagctagctacgatttcgacgtagtagtactcgctgctagctcagaagctaaggaccggtgaattgtgtttccgtcgtagtagaattcacccttgggatcaaggatttcttcgttgatgaatcccatgagttgttcttgaaccgccgtgataaattccttgtgtgtggtcaggttatccctcatgcgaataaactatatgaatgtatgaaattgattagtaattaaacaagaaatcgctacgtaatgaaattttgaatttatttgtacgtacatcgagctctcttgtggtgatgatttggtctgcaaggcagtggcaatactcgcacacgtaatagccgcacaagttagttccctgcttttgctttgcgcactacaaataaatgacaaacaacgagagatctaattaatatacacttgtatgtatttgaatcggagaaatataaatatagagcatgtgtactcacaggaaatttgaacttccgcctaagtctttctctccatttgccgcggaccaaatgacggaaccgataccaagccctacatggagtttaaagctatgattcgtagtagcaattaacataacaagattttcttaattaacaaaggaacttatgacggtacctgtctataagttcgaaaacctttcaaacgtagactcttttttatccattgagtcatatacgttgacggtgcaggcctccaggtcgaagagtaaaagcacccagtggaatctgcaatgtgcgtgggatgcattacatatgaaacacttagcaagttcgtacgggaatgaaatttggtatgtaggaagacagtaaaattaaactaactctatgttgtatggcaacagtatgaacgtcttgtaatgctgcgccttcagaagatggacgagattgtcctctgtttcttgtggatattggtcgagcattgcgacgtttactttccgagggtcgatgaatccagtatcgaaaaccctccgccgtcgggccctttgaatctccattctacaacgataaaagggagtatattattttctatggtctacttatatacaaggacctaattaattaaaggagacatatagtaagaaatctaactgaacgatatacttacaaaatccagcaactcataatagagacgtcgagggcgtccagctggtatagttcgtagattcccctaaaattgatccagagaatgtcatctccttgcaagaagtccgtgtccctgatcctcgctccgatcatctctctaccggtggcgctcatctccatgtacagctgatggaacttgtacatttgtgtgggtagggactgcagcagctcaggcttgacaagcggtttaccgagttcgtacatgtatttcacttccgccttttcgattggtgcgactcctagcaattgatccgtagttagaccggtgtcagtaataaattgttctatcgtcatttctttaccggtcaccaacggctcgatctcctggtttggttgctctccaagctgagggactggtttggactttccagaagatgctttcttcagcgttcgctcatagtccgatagcttgatggcctccttgacagatgcagacatacccctgaagaagttcctgacactggggtctataggaatcttcttttctggacttcgaggcttgaattgtttcttgacttctgatgcaacgtaagcgtcaagctcctcttgcgtgcaatcgtaccccgggtccttgttcttggcggcgtcaactttcgccttctttgttgcccttgtgtgggcaagcggtggagctgggggggcccttgactttgaaggtgccggaagaggagcttgcgggggagtaggtgtaggagcacgaggaggagtcggtgcaggatcctgaggaggagtcgatgctggagcctgcggtggagacggtgctggcggagcatgaggaggagacggtgcaggatcctgaggaggagatggcggagccggaggagatggtgcacgagacgccgcttgtcgcccagggaggatgatgtaccgcctgcgccatagaataatggcatggcatgtgtctcgtagatgcgtctcaccgtctcctccagggtaatccagctcgaggtcctcgtacgcgccttcgaccaactcaacttcgaccttggagtatcctgctagaatcggcctgcagtggtaagtacctgaagggtccgttgggatggccatgcccgacgccaccttcatgttgtgagagattatttgttagtaatcaacatatataagcagcaactagcggaatggctaaatcttacctttattgataagttcttgaagggaatatgcagctcacatggtgtccgctgagtgatgtcatcaacgggacaggtcgattcgtcctgtgtttgcatggcgtccatgctctgtgatcctacctgccccgttgaggcgcagctgctacggtttcctgacgggctcaccattgcaggaggaatggtcggctggggatcatgggaccgatgtgcggccatgcgttcatcaaccttccttgccacctcctcttgcatgttgagttcgtagctcgatacccggaactctaggtctgcaatcttcgcctcggtatctctcttgctcctcatccgactcctgtacgtgtggatgtcctccttgaaaccaatcttccaaggaatcacccctttccctcgagttcgtcctggatgctctggagtctgcagggcgagtgtcagctcgtccctatctctgtctggtcggaacgtgccctgagaggaggcttccactgcatctgttagtcgtcgcgcagcctcttgtatctgatagccgaagaccagtgagccatcagctgggttgagcgttccaccgtgagcatagtaccagaacttcgatcgttccggccaattggctgttgccggttcgatacccctctcaatcaagctagcctccatctgctcccacttcggcatcgcgacgctatagcctcctgaccccaagtggtgatggtacttcttcttggcggcattttctttgtttctttccatcatcgcctgcccttgttcacctgtcttatatgcaacgaactcgtcccagtgatcccttagctttgggaatgtgtcgaagttcggtgtctgccccttcagtatatacttctggtacagatctcccttgaagctctgaaactgttctgccattttcttcagagtccaccttttcactttgtcctctgtacccgcaggaagggtgaatgtctcgagcattgtggtccacagcatctctttctccgaatctgggacaaagctctcatgatctccgcgtgcccttgttcttcgccagtacaccgtactgacaggcacgttatcccgcacaacccaaccgctgtgacgtacatagttcttggcggcttcggccggggcactaggacgtccatcttcttccacttccgttatgatgtgccgaccctcaagcttcttcgctgcacctcgttgcccgcgtgccctcttctgtccaacggagggttgactaccactaccctcttcctcctggttcccctccacatccctttccacgtgcccctgctggttcccctccgcatccctctccacgttcccttcctcgttcaagtactggtttggatcctcgttcccctcttcttcattccagtactggctgcttccctccgcgattgtatcgtacaatatctgttcctcatcgcggtcagccatctgttgatacaagaaacatctgctaagtcacgagacatttatgttttaacaatctaagtcatgtatgctaagtgtaaatgtcgtacattagaaccctacacaaccttacgtgctaagtctaattacaaatcgtgatataagctaagtctaggtgacgtatattatacaaccctagctagtaaataattatatactaaatctaattacaaataaaataatcttatattaaaactcaaataatattacatgctaagactaaaatagtcatgtacatgctaagtgtttcgtgcgtatatgctaagtcacgagacatttatgttttaacaatctaagtgctacttgtcgcaccaattccgtagtcaataattacataccaagtctaattacaaataaagtaatattatattaaaactcaaataatattacatgctaagactaaaatagtaatgtatgctaagtgtttcgtgcgtatatgctaagtctaattaagactacaatagtcaattgctaggagtcgcaccaattccgtagtcaataatgtcatactaagtctaatttgcaataaaataatcttatattaaaactcaaataatattagaacactacacaaccttatatgataagtctaattacaggtctaataatcttaattaattgcattacaaatataacaatcatttatattattacgtcacttgcctgctccaattccttatagggctagctcttccactcaggcttgacggacgactccgacaacacgtcttttctgcaagatacaaaaaaatgtattaggataaatgcgaagtaacatatatacatatatatacatatatatacatatatatatacatatatatatatatatatacatatatatatattgcatttcacgttaacgttcgtcctcgttcgttcgctcgttcacgttccctagctcgttcacgttcgttcgctcgttctcattcacgttcgttccctcgttctcgcttgtcttcgttcgatcgttctcgttctcgctctcgttcgttcgatcgttctcgttctagtaacaaaatgtcgcggcaacgtacgttgacgtgttcgttctcgctctcgttcgttcgatcgttctcgttctcgttcgttaacagcggtgtgccggcatcgggcggcgggttggcacgccggcgtgtcnacgacgctgtcggcgtggcgttgtgggnccgtgacgccgccggcgtggcgtgacggcggtggcgtggcgtggcgtgccggcgacggcgtggcgtgtcggcgtcgacattgcgcgcgcggcggtgaagacggcgccggcgtggcgacgtcggcggcggcgtggcgttggcatcaggcggcggcgttgcgcggcgtcgaaggcggcggcgtggcgcgtcgtcgtcgtggcgcggcgtctcgtggcgggcggcgcgacggagagagatcgagatcggagagatcgagatgcatgaagggagttctggcggcggcggctctcaccccaaacatttgccgacaccttaggaggcggcgaggactacgagctctagacaccggcgagatacgtcggcgtcggcgcgggtatttgccctaggcagtgtcggcgaaggagagagtccaagagagatcgatcggccgaaaacgtctaagtgttggtgaagaagacgagggcgcaccgggaatatatatacccccggatctttagtcccggttgttctcaacaaccgggagtaaatatcttttcccgctatttcgaaattctttttaaacccggttagggttaagaaccgggactaaagtggctctattgggaaaaagtggctctattccagccactgccccttcacgccagccatccctatccatttcctcgcctcatctcttcctcgcgtcgtctctctctcgctcctcacaaccccgcgccctcgccgccgccctgcgttagcccccaccgcagctacgcgctagctagtcctctgcccgccgcttggttcgccggtgtcgtgcaagccgacgccgctcgcgcaagcctcacgaatcgcgcatcagcaatggcgggtggaaatcctcacgatttcttctccagtcgttcaatgaagctccaacgggccacatggacggctccgactacggcttctcgcaggggtcttcaggatatggtggatctggcaccggcatccattttgggggagggggatcggggggcctcgatctgaactcccaggccgacgccttccccgatttcgcctcctaccaacagatccttgaaccgggtagccttgtgttacctccgattcgggcagggagcagatccacagtccccccgtcacgtcctcctccagcggcgggagggggacgtggcagaagtcgtggagggagaggaggaggacgaggccgtggcatgtcgttgaccaatggcgctggatctggcaggggaatgcgaggatttgttcctcctggctcatcgtctggccaaggaggcgtccgaggtcatggggcatccatgtcgcacagcgggccacccgccttcaactttggagtcttcggaggaggacggcgagccggtgcctcgtcgtcccaagggacaaatgtgtccgaggacgacggcaacgaagaagacgaagaggactttggtcctgatggtcagcacatggtaaaccccccatggttactttctgttatgtttgatttgtgctattgcgaaatatgccaattgttgctcatgatattgatactgctatgcatgccgtgatctaagcatgtatatgttgttttacagtatatgttgttcattggttaatttagggttaaatcatgtttttctttcctagaatacgtatgacaaggcaaattggacagaagaaaaaacttacacattgtgtgaaatagcatgtgaggaaataagggatgggcattgtcctaatggagcatggacaactagagggtaccagaatttgaaggccaaatatttccaaagggctaacctaaggcattcaaccaaacagataaagaatagattcacccatctaaagaattattacattgcttgggtgtggctgaaccaacaaactggagctggtagaagtgctagtgaagaaataattgcatcaaatgcttggtgggaaaaaaaaattaaggtatgcagttgtcaaaaatttagctagtttacatgattttagagttttctgtgatattgatttagtgtcaatacaggagaagggggacgccaagaaatttcgccatggcaaccctgagtacttagattttcttatagagatatttcaaggagttgcagttgatggttccacagcatacatccctggttttgaagatgaagatgaagaggaaggagaagaagaagcaggggatgcaggggaggcagctagaggggaaagagctgtaggggatggttatgagaacagccccatgagcactaacagcaggaagagagggagtagcagctgtaatgtgtccacagcttctagtcctgggaaaaaaagcaagagcccagtggtgaagctcatgcaggggctgctcaattctttcaactttgattgtgataagtcaaataccctaattactgaacttgttaacagcaagaagttaaaggagcagaagaaagaagaaattgttagttcattgacaaactgtcagaggttgncagtagagtgtggtgcacaagaagaaagtgtgcaatacttttgtgccacacagttgtttgcttccaaacataacagagttatgtttaagaacattagcactaaagaagcaagatttatgtggctgaggagatggtgccagcagaagaatttgtattagatgatccctttctttagctgcatatcatgggtctggtctgcattagttgtgtcttagctgcattagttatgatctacttttgtgttgaactatcaacttgtttgatgtgatgtgacgtaatgaacatgtgatgtgtggacctatttaaaccttcccttcttttcttcttgaagtttgttcatattatatttatgatgtgctttctttctatgcatatgtcactcctgcaggatggtgaaggcagtggtgatgaagatatctctgatgaagatagcagtgatgatgaaattgatcttatcatttatattttgaagaaaagagaaatggacaggagaagagcatgtatgcttgccgccatgattggtacgtattacttggaactttactctaataaggctccaagaagggtagcacctgagtctggacatgattgggttatgagaacattagctaatagaactgtttgttacaacatgtttaggatgcacaggccagtttttgagaggttacattctgtgcttgtggaatcatatgagttgaagtccacaaacaacatggattccatggagtgtttgggtctttttttatggatagtaggtgctccccaatcagttaggcaagcccaagacagatttgttaggtctcttaaaacagtacatagtaagttcaaagcagttttgaccgctctactgaaacttgcacaagatatcattaggccaaaagatcccttattcacaacagtccataagaaattgctttctcctcagtacacaccatatttggataattgcattggagcaatagatggtactcacatccaagttgtggtgccaaattcagctgctgttcaacataggaatagacatgaggagaagagtcagaatgttatgtgtgtctgtgacttcgatatgagatttactttcgtgcttgctgggtggcctggttcggttcatgacatgagggtattcaatgatgcacaaactagatttagtgccaagtttccaaagctacctctaggaaagttttatctcgtagactcgggatacccaaataggccgggttatttagcaccatacaagggtataacatatcatttccaagagtacaacgaaagcacattgccaaggggaagaagggagcactttaattactgccattcttcgtgtcggaatgtcattgagaggtcatttggggtcttgaagaacaagtggaggattttgtttagtttaccaagctactcgcaggaaaagcaaagcagaattatccatgcatgagcacttcataatttcattagagacagttaaatggctgatacagagttcgacaattgtgaccatgatgaaaattatgatccattgggtggaacctcttctccatctagcgaaccaacaaacgaattggactcgcgtgtcatgaaccaatttcgggactggattgccgatggattgtggtatttgaaaggaatgtaatgaatggttcaatttttcttgtgaattgtatttggtttaacttgtcaattgaaccatgagtgcttgtaatttgtaacattgaaacttctgtgatgtatttcaacaacttgagatgtatatgagcttctttgaatttctgtgattgggctgtgatattgatgatgaaattgagcgtctcgtggcgggcggcgtctcgtggcggcgaaggggagaggccgagagagatcgatcggccgaaaacgtctaagtgttggtgaagaagacgagggcgcaccgggaatatatatacccccggatctttactcccggttgttctcaacaaccgggactaaagatatcattagtcccggttgttgagaacaaccgggagtaaagaaaatatctttactcccggttggtgacaacaaccgggactaaggattatagcactgcatatgattttcgcttacatatgtgtttataaaatagaagttaatgcattaacattatttaaagttcaaagattaatgacaattacttcgaaaaattatttttgtctgtaataaattaagtggataaatcgtaataagcaaatatatgacttataattaataaaaattccaatatatatatatacttagcatatatatgaatgatattattatattggtaaaaactctagtcaattataattagcatatgaatgctagtaaattaaatgttaaaaactctaattaacatacatatgaaattgccacctgtgtgatttaaaacttttaaaaattgtaagtatcacatataactagcatatacatgatggataatcaatacatccaaaatagtttacatcgtgtacacaataattacggcattacatcggcggtgacggttgaccgcacgtactttctcctcactattgttccctccttgtgatcgctgcgtgagtaaggggtgtcttcatttgataggaggatgctagggtcaatcgtcaccgtgaaagggggttgcccatccaactgatcgtaatcctcgtcagtcttgtcctcaactccgacgatttttcttttgcctgggagaaccacttgacgcttaggctcatcaggccctctgcccttctttcctttgctagacatgtccttcacgaaaaagacttgcgttacatcattggcaaggacaaaaggttcgtccgagtatccaaccttgttaaggtcaacagttgtcatcccactgtcatcaatcattacgcctccaccagtcaacctaacccattggcaccggaacagaggaaccttgagaggaccatagtcaagttcccatatgtcctcgatggcaccgtaatacgtggcagttgttccatcgtgtcccatggcatcgacacgaacagcgctgttttggttcgtgctcttcatgtcttgggctctcgtgtagaatgtgtacccattgatctcatatccctggaatgtcgcgatcgacccagacggtcccctcgccaggaaggcaagttgttggttgatcgactcgttacccatgagatgttgtcgtagccacgcggggaaagtatcaatgtgatgccgtgtaatccatgcatcggacttaccgatgttcctggcgcgaactagagccaagtgctcctcgatgtaaggagctaccaatgaagagtgttgcagaacagtgaaattggctttacggaataaattgttgtctaccgtcattattgctttccttccgagagttccctttccccgtagtctcccttcatggcgtgattcaggtaccccgattgggcgaaggtcttcgataaattctacgcaaaattcgatgacctcctctgttccataacccttggcgatgcttgcctctggacgagcacggttacgaacatacttcttcagaacgcccatgtacctctcgaaaggaaacatgttgtgtaggtacataggcccgagaatacggatctctttcacaaggtgacaaagcagatgcgtcattatattgaaaaatgaaggtggaaatatcaactcaaaactgacgagacattgcaccactttattctgaagggtttctaatctatccggatcgatgaccttctgcgaaattgcgttcatgaatgcacatagctttgttattgttgcccggacattgtctggaaggataccccttattacaactggtagcagttgtgtcatcaacacgtgacagtcatgagactttaggtttgtgaacttcttctccttcgtgcttattattcgcttgatattcgtggagtatccagacggtacctttatgctctccaagcattcaaacatactttccttctctgccttgctaagagtgtagctggctggactcaagtaattgcttcctttctcctttggttccgggtgaaggtcgccgcgttgttccatatgcttcagatcattacgtgcttccagtgtatctttcgactttccgtatacacctaggaagccaagaaggtttacgcaaaggtttttagtgaggtgcatcacgtcgattgcgtggcgtacgtccaagaattcccaatatggtaactcccaaaatatagagttctttttccacatcgccgcgtgaccatcttcgctctctatatgctggcttccaggcccctttccgaacactactttaagatctttaaccatagcaaacactgttttcccgctgcgatgtttaggcttcgtacggtggtcggccttatgttcgaagtgcttgcctttcttccgtaccgggtggtttgctgcaaggaatcgacgatgacccatgtatacaaccttcctacagtgcttaagatacgtactttctgtttcatccatacagtgagtgcaagccttgtaccccttgttggactgtccggataggttgctaagtgcaggccaatcgttgatggttacgaacagcagcactcgtaggttaaactcctcctgtttgtcctcgaccgacacggggacaccttccttcttccacaactgtttaagatctttgaccagtggtcttaggtacacgtccatgtcgataccaggttgcttggggccttgaataataatcggcatcattatgtacttcctcttcatgcatagccagggggggaggttgtagatacacatcgtaacgggccaagtgctatggccgctgctcatctctccaaaaggattcatgccatccgtactcaaaccaaaccgtatgtttcgtgcatcctttccaaattctttaaattttctgtcgatgtttcgccactgcgaaccatcggcggggtgtctcagcatcccgtcctgttgacgctcttcagcgtgccatcgcaacattctagcattctccttgttcctgaacaaacgccttagccgcggtattatagggaaataccacatcaccttagcaggaattctcttctttgttagctgcccgtcaacttctcctggatcgtcccgtctaatcttgtatcgtagtgctttgcaaacagggcatgcttctaggttctcatactcctcaccgcgatataggatacaatcgttcggacatgcgtgaatcttatgaacttccagtcctaacgggcagactatcttcttagcctcgtacgttgtctcgggcaatttgtttcccccccggaagaatgttcttgacgagtttcaataaatcgccaaatgccttgtcactaaccccattttttgccttccattgcaacaactccagagtggtatccaactttttgtgcccctactcgcaacctgggtacaacgaagttctgtggtcctccaacatcttgtccaatttatgggcctccttttcactttcgcagtcctccctggcgtcctgcaacatctgaccaagatcatccgcaacgtcgttaccatcagcagctatttcctcctcgcccatttgatttccttcaaatccaacatactgagcaaagtccggaatattgtcgtcttccacttcatcttcttccatttcaacaccttgctctccgtgggatgtccaacaattatagcttggcatgaaccccgactcaaacaagtggaaatgaatagtcctggatgcagaatactccttctgattcttacacttattgcatggacaacaaataaaacccctttgcctgttagcttcggccactctcaaaaaatagtgcacgccgtcaataaactctttggaccgccggtcagcgtacatccattgccgatccatctacatgagtcaaataaaccgcacacaaataattattcttacaataatgacagtcatacaataattataagatatctttattcatacaaaaatcataaaatattacaccaaataattcttaaaaactatttgtaaagttttaaactaattttaatgtgttttacttcttttaattttcattttagtttgttttctattatttaagattaactttcactagagttttccatctcaactattttataaaaccttgtttagcaaatgaactaaatttctatatattctttcttccccacacacattttctctctcatcaacttacaactaaattttggagacaaaaaaaagtgtgcaaaacataggtgcaaatgtagtatgacaaaaaaaacattggaggatgaagttgcaaaccttttaggcacctccgatttgtatataatcaccaaaataaattcaatagaaattttggcatgacctcccctcttttttgaagtaattttgaagcttgctcgggcagctggaggaggaagaagacatatatatatataggggtgggactttagtcccggttggtagcaccaaccgggactaaagatcccgggggggcctgacaggtcctgacagcattcgaaccgggactaaagatgatgtttagtcccggttggtaacacaaaccgggactaaagatcaaatatgcccgtttcccttttgaaccgggactaaagatcatctttaccccggtttttattgcatccgggactattgtggaaatcggccgaccgacgaaagatggtttctccaccagtgagaattcctcccctcctcatgtcgtacgtacatgtgcatgtctcccgaaagaaaaatcaggatatatctactctatattcattgatgcatatgtaaatatgtataacaaattacgttaatatgaaccaattaaaaggagggctagcttgatggtacattattaacaataataatttttcgagatttattaaaaaaattgccccaaaacattcaattaaaaaagaaaaacacattaccttttaatttgaacttaatttgttacacatgttttctaaacgaactaagtctatctccattttaaatggtgaagaagaaaatgataattacgtatactgatgcattaaatattacatagtagaaaggtaacagatacctaacaaaatttatttaagcaaagtcggcagataaatttatgaagaaaacatatttctgaagtttggcaagtatggttgacattcattcctggtaagtttttcaaatatagcctacgatatacatgcccgcacaaatgtgcgggctaccatcctagttatatataaaagtagaaggaccattatcttagaatttcgatgtggaaatgaagaatataaaactgggaaataaatatatatagtaattgaacagcttatttggcatagctctagatctcacattcacggtacacttttagtttgtatgttaaaatatttaggtttgaaattttaaatttttattaattaaaatgagaataaattgattatccaaatattatcaaaataatcgtagatctggatttataaattagatttatagaattagaaataaccaagttaagaaaatcttgaatgcagagctgtgccaaaactaacctaattgtgacggaaaaaagacacccgcctttgtaacagaattggtgtacatatgtgggagtattaattcaacgtacatcatcaacaaggtgtgtagcgatgacgcctggcgcgatgcagttcacacgcatcctgtcgctcgcccattcaacagctaggctcttggtaatttaatttgattcatcgcttctgagattagtaagggtattatcttgcgattaattctaactaacattagtggagaatcgatctttactcgatcgaccaaaatcggtactaaaacctttataaccagacaataagaccaatgtactaattaagtacaaaccaaaatcacaaacgagaataattattttctaattacactcaaggaatttatgaatggcaaaatatccagtgcacacaaatttctcgtgctgcctctaactaacaaaattgaccaaaagacgtcataacaagccatatcttcgtatgtctactactgtgtcttaattaattagttatatcgaacctatttgtatttactgagcttttttgtataatatatatagtcaattttatttgttgtttttttattgtttgtatgggtctggatatgtctagtgtaattctgtataagccaaaatatagttaatatggttaacttgttaatttaatcaacaatgaatacatatatcatggtaaaatctaaaccgagaagcctctcggtttagtgctaaccagcgacgatccaattgtgagaagaattactgctacacgtgctgatgtgcgtgttgtttttcctcttagacatgtgtgtctttttcttccttcttataaagttttctcttaaattacttatccgatttacaatccaattacaccattgtgttcgttacaattaaatcttcacaacaagatcttacatgattatattacgatgaaaaaatatttatatttgtaaattacttttattatatactaagttacttttataatatatataagttacttttagatttgactaaattacttatatacatttataatgctctaagttaattattcttattattgtttttagttaattctatattttgtggactttataaatcttctctacactttacttgcaaattcactctacatagtttcttatttcagctcactcacaatataattatttctactacagagagttactccccccgtttcataatgtaagtcattttagtgttgcccacatttatatagatgttaatgaatctagatatagttctaaattaaagttactttctttttgttataagttacttctataatatatgtaaattagttttaagctttactgaatttacttttatatgtctaagaagtaacttagtgaaatctaaaagtaatttagacatatcataaaagtaatttgtgattcttcatgaaaatataatcatgtgagatcttgttgtaaagatttaattgttacgaacacaacggtgtaatcggattataaatcggatgagtaatttaagagaaacttctctaagaggaaaaaaaatacataaatattgagtgaactagtagcttttttttttttggaaagaatggtgtctctttttagcactatccagctagcactctcggtgtagttgtgtccatatatcatttagaaggtataatagttttgaaaatatgttaggcaataatggttacatttcagaatctaaacagcatcagctaaacaaaaggaaggaaagagcttatagtagaagagagaagtagagtgactatacgtaatagggaaacgtaactatacgtaagtacgtcaagtatgtgcaaggaaatgagactggtacatacgttaggtaggtgggatgggaggtggtgctgtgggttttgttttttccattgcaagattaatcctatggcctacaattgcagatgttctattttattttttcaaaatttctcgaatttatctaatctattagatcgccagatgacgacctatgagcatctgtaagatgtttaatctattttgctatagatagaagatgacgggagctgatgctttatcctcccttgcacacgcacttctaatattaccagagtttcaacttccttgaaaaaaataaaaaaaaaatctaaactattaattggtgcgcacagtgaatacgttctaaattttgtgctctttttagttaccttttgctgcacagaaagcacaaatgggaagagatgggaacccggtaacagttgatatgccggagatgttgacgacgttgcccttgccggaggtcttgaggagagggtgcatcagctggcttaggtggaagcatgactctaggttgcccgccatcactctggagagctcctccggcgtcacgttcacggctggttttaggaagaggaagccaacattgttcacctgcaggtaagttaacaaattataagtcatctaataaccattttctgtatctctacccaacttctacacctctttatagcattgagagaaatagattaagaaaatgttcaagagatggatctgcaaccaagaaccaagtgtactagctccttgtcgcgatctggcagacacgccgccacaagctagcacatgcacacatgtgaaggttcttgcattttgtaagggaaaaaaatggagatcaaggctaggtcgtcagtttgtcgtggtttggtgtatgcgtacaaggatgtcgagcttgccgtcgaacatggcggtgaccctgccggcgagcgcctccctgtcggcgcgggctgacacgtcgcagacggaggaggtgatggagagcttcttggcgctccactcctccaggcagctgttcagggtagcctcgttccgggcgcacgtgtgcaccgtcgcgccgaagctcgccaactcctccacgatggctcgcctggatgatgcatatataaatgcttaatttctgccactaagctagtagtaatgtgccgaagcaacgatatgatcaaactgacgatgaacagacaggaggtcagaaattaaggcacacaagctagtactgattcttttttttttgagggaaactacggcgggtgtttaacaccagcctgaagctagtactgattctagagaggctatatagtctattggtgccgatttcggtgcgattagaactaatgaccggatagacactaatcagaaaagtcattggtgttgtttctagctagggtagcgctggtagcctcatagacgtccatgctaggccagaacatggtgatgaccgggttgcgcatataattaagaacgtaatctaaagagcttgaattggttggagagctagctgtatttgggattttgggatgaggtcctcgagcgccttaatttgtttcctcttctcaaacagatgtgaaaactacgtggaccttggattcgatgaagggatgaatattatttagttacccgattcctttgctgccgccggtgacgagagctgtggcgccggcgaggctccaccgcccggtctcctgcgcgctgctgctggatgccatcatctcttggggttggtgtgtgagggagacaatagagtggagtacttgagtactacttgtatgggcataaagcgtttgacgccatatatctgcacaatattttgggtgcttgtttagccgcaagcccgcaaggcccgcaaccgcttgccaagcccccttccttgtgtccacctcatgtctcttctcgtcatctctatctcttcttgtcatctaattagactcgtttagcaaggacatactttctattatttatacaaggatttccaaaaaaaaaagtcttatctcatcgtatccacggtagagacgtagattaccttctaattgtaaaatgactagaaaaaaaataaatgtgcgttataataggtgaagatatttttcacgattgataaaaactttgccaatagaaacgctaaactgaaataagacaaacaaaacaatgggaaaaaaagttagaaatcacatataacattgtacccggttgcgaagtgagcatagctcaactggttaggttccttgtggtggaaccagcccacccgggttcaaatcctagatttgacacgggtgctcgcatttacggctaattattctttcagtggtaggcgatgtacccgtcgacagcgaggcgcctgtggtgacttcgtcaatctcaaaatatgccgacccagtcttccggaggtgctcatagtgatagggtgtgcgtgtgtgcgttcataggggtgagtgtgctcgaggcgcctgtggtgacttcgtcaatctcaagatatgccggcccagtcttccggaggtgctcatagtgatagggtgtgcgtgtgtgcgttcataggggtgagtgtgctgccggcccagtcttccggaggtgctcataggggtagggtgtgcgtgtgtgccttcataggggtgagcgtgcgcacgttgtgagcgcctgtgtttgatagggtgtgcgtgtgtgcgttcataggggtgagtgtgctcgaggcgcctgtggtgacttcgtcaatctcaagatatgccggcccagtcttccggaggtgctcatagtgatagggtgtgcgtgtgtgcgttcataggggtgagtgtgctgccggcccagtcttccggaggtgctcataggggtagggtgtgcgtgtgtgccttcataggggtgagcgtgcgcacgttgtgagcgcctgtgtttgtactgtgtttctcaaaaaaacattgtacccggttgcactcgcttcatgcgtcatcccacacgaataatctcttatatacaccattccatagcctcataaatcgatcgggtggctatgccataggttaatgcatatggattttgctatacctcaccgactaatgattgaactttttaattattcaattagtgaaaggtttttttaccatagatagaaaacttctacatggtaacaaacttgccgcatatcaattgtaatttcaaaaggaaaatatttatgagagaaatttggaaaaataaaagaaaaggaaaggagagggaaagtgaggtaattggaaggagagggagaggattaggatgatcggaagaaaaggaatgaacaaaaagaaaacagatcgcgcaacaccgagtggaggtgcataggatggggaggcaggatggtgtgggccggttgggattgggtttggagatggaggggccgggctggaatgctggaagtgagtgtatattagttattttaggcttatggtgaattggatataggcgacgtagacttatggtgaattggatattggcgacgtacaactaactcaaagacagatgacgtactaaaattttcgtgtaaatatcttttaatttttataatagtagagaaaaggaaaaaaatatatgtcattaagttagaccacaaaatttgatatacaaatggcgtctcccagttcaaacagaaatcactttgtcccgcttaattacatgtaaactctcataacacaactacttattatcattgtctggcaatgatgggtccatttttaattgatgaaattgtatatgtaccacaaaaatgatcccgtttcaaagtcgaactaccattttaagcccgctttttcaagtttgctcattggaccattctttttaaaaatgaaggttgggcctgacctattacgtgaaagtaacctaatggtgttaactcactaagaaaagatgttcataccctttgccatttgaccctactttcccaatttttttattcaatccaacttttttgcaccgccatctgagagctcaaaaaagtgattaggctttacatgattactgtcaatcaaatgttaacagaaagacataaatctcacctctgggtgccactgtgtgtcacacacaacttgcttaaggtgtggctgcgtgatttgttgccaacaatgtatcctgaaaataatggctacttgaaacaaatattgaacttgcactttagcataggtagacttcactacctgaataggtcagcctcgttcccatttctctggtccttcacgtttttttgctagtaccattcctgatgtacgtgagagtgtcccgatctttcgatgagaggataagtcgttggatggagcaacgttggtaatccaactataactatccagggacgttgcgccttagcaatcgttacaccaactgtagaggtagtcgtgaatgtcaacggatgcacggtcagcctaaccacgaggatatttgttcctgcaagcaatcgagaactagcaattacaagatgaacaggcaactcaatttgcggaataaagttttaagattgaatcaacaaaagtatcacaggtggggtttcgtaatgagcaaaccagcgatctaaccgatcacgggattacatggtaaagtagcaagctaaactttgatctaaacaaagcccggattgatctacggcagctaagggaaataaataggtgggaggacaagttagggtcgccctctaaccctaagatgcatccctaatggacccaacttgatacacacccaaataaggtgacgcaacaccatggatagaaaaaggtctctatggtaaaacgatgattgtggcctctccagaacagatatggacattgtagattatgtgatctactaaacataatttgctaaaccgatacatgatcaccctaatgcggaattttaggattacactgaccgttatttgaagccatggatgcgattctccctttgttgtcaaccggagtggaagtaggggatcgagaacctcgaaccacctcctcgcttgtcggtgtaggtgaagtagattgtcacaccctgaagttcttctcccaagcctaaatttaatttataaatggtcttgagaaattaccggtgtaaaagcaagagtgaaaccctaatcaaattaatgcaaataataatcggaaatggcatgtggaatttttcttgagttctacatttcgaaatatgctaacaagatttttagtggaattttcagagctctagaaataattttaaccaattaaaaatgagcataagtgacggagcgtggggctcctcaccgggagaccgcgcaggcccccctttgccggttcggccgggggcgctaagtgaggttcttcgccctcgatctgaggaacgtcagcgagagaggaagtgcacaagacacgggcgacgtagacaggttcgggccgctgagaagcgtaacaccctactcctatgttctggtggatctgtgtgtgaaggaatccagcgagccggagagcgagagagagttcaggctctagaacccctttttcttctcttctcttctccccttctaggcctgggcctcctttttatctggtcaggggtcaccacatgggcctctagctgcctaagaaaggaaacatgctttttacaatgagggctagtctacagccggaagtgacctctgacaagcagagcacacgcctcctgcccccctcgccagctttcccggtggacgcccatttcaaccttcattcaatggccagcgacttccttgccatgcttgcgctgaagcctggactggatctgaccgggactgacataccaactccaggagttagcacgccggctccggctagggacgagagccaggaagctctcatcattccgacgggacggggcgaggcgtgtgacaggccgcctgttgccacctaacccgcgatctgaccggtctgtgaccggtcacacgccgcgaccggtcacggaccggataagcgtgcgctgcgccgcattaaatgcggcgtggcgcgctcgtccaacccgctataaatgcggttaggtgagccccgctgtgctcacctaacccacacacgtggcgccaaaaccacagggggtcagggcgccccagccctcggggccgaaacgggggcggcccgacctctcggggagacagagggaggggtggccacgtcaccctcgggcccgacccccccgagggggtcaggccacgtgggtgaccgcggctacccaagcctctagtcacgatacccccgaccccatgtcaccgacagtagcccccggcgttacgccaaggcgatcacctccctcgagggaagcgctcgggcgtgacgccactccttaggcccggtgacaggtggggccggtccctacaggcgggcagaaacccagcggtcgcaaatcgcgcgcatcggcaagggaaaaccgaccgacaataatgagcggcctctttaagaccgctacattactcgagcagcgcgcgattcgggacgagccggttcgtttcgcctggagacatgatgatggcgcttttcgcggttggcgagcgtagttaatgcgcgcacgatctgccccatctcaaccgccacggccacacatctgccgcgtgcgccgcaaacgggtgagtggggttagtggaggcgtgggcgcgagaaacgagggggcgaggtagtgggcgcgggaagcgaggagccgggcatagcgttggcaagggtgtaaagacgctgaggaagggattcgtttccttcctctcgccactcttccccttgccttcgccactcgcgctccaactcttcgtttcccgtgccctacccttgccgcactcgctcgctctcaagctcctcctccgccggcgtcatggcacggggctccgcaccgctcgacggtagcatgctgccgccttcccgcatcgtgagcgagaggcaggccgggctgccgcgccgattcatgccggaatctgccaccggccgggaggtggtcgcgctaggcgagggactcccggcgccacactacccggggcggtccgtcttcttcctctctttcgcaatggcggggctggtcccgccattctctatttttttcatggatattctggagttttatgatctccagatggcgcacctcacccctaacgcgataatgacgttggccatcttcgcgcacctgtgcgagatgtttatcggggtgcgcccatctctccggctgttccggtggttcttcaccgtacagccggtgtcgccgccgacggtagtcggtggctgctacttccagccgcgggggcaggtgctgaaccgctacattccctgcgtcctccgcaaaaagtgggacgactggaagagcgattggttctacacccccctcgccgatgaagcgcgcctccgacttccgagccagccgtagatctgggagatggctacgacgccgttcttgaccgcctcgcgggtctgcgatcccaggggctcacgggagccatggtgttcggcgactaccttcgtcgccggatcgcgccgctccagcggcgcgcccggggcgcctgggagtacaccgggcccgaggactacatgaggacccaccaggggcgcaaatgggactgggaccctgaggacttcaggatggtggtccaacgggtgctgaatctcagctccgtggaggcatccctcatcccccaaggggtcctccccctttgctgcgatccagagcgcgccaacatcctgaccatcatgcaggaggtcggggcgtcgggggagcgggccccccgaggccacgatggcgcgggcgggagccgcaggggggaacaatctaccccgggagggggtcgtgcttctgggccccgcgacgggggcccggagggcagccgtcctgccgacgcccgggagaagaggaagcaggagggtacccctcccccatctcctccccgagggggcggggtggtgcgtgccagcagcaggcgcccggagggtgccgtgctgacgccgcagcccgagggggagcgaaagaagaaacggctccgcaagatgggggggaccgagccatgccgggggaacctcatctcgcccccgaggtggtcgtttagccgacctccccgcaggttcgtccccgcgcccaccgcggccgtattcattctcctatctcccaaggcgagttttcactcacccgtttctttttgtcttctggtttttcttctgcctcagcgagatcctgtcgcgccccccccccccccgcccgccatcccaagtccggcgggtctgaggtcgaggagacggcgaccgcggaggcccggaggcgggaagctgaccagcgagaagccgcggaccgcctccgggaagccgaggaggctgcccaggaggccgtccgggttcgccaggctgaggaggccgctcgagaggaggccagactccgccgggccggggagtccgtccgggaggcagaggcggcgcgcgcacgccaggcggcctgccaagcccccgacccgactccgcccgaggcgacgacgacttccgaggccacccacgacgaggccgcgggcgcgccgctcgggcccgacccctcgggcgacgcttgggacgagccagcttcgggggacgcccccgagtctggcacgtcgatcggcgggccgagccgcgcggcacccacaccgagacggctctcccctctgccttccgctgccccactgagcgcggagtccctcctgcaggccttggccgccgcgaacagcacggtgctggacgggttaagtgcccagatggaggccctgcaggcggagcgggcggagctcgacgcggcgtgggcgcgcgtcgaggaggggcggcgctcggtggaggccatggtggaggcgggccgcaaggcacaccgccggcacgcctcacagctcgaggcccgtcgtagggacctggcggagatcgccagggaggtggaggaggagcgggagactgccctcatcgccaccgccgtgctcgacgaggcgcgggacgacctccgcctccaatacgggagccgggcggcggagctagaggagaagctcgacgccgcccggggagtccttgacgccgccgctgcccgggaacggcgggcggcggagaacgaggcggcgtcccggcagcgcgaagaggcccttgaggctcgcgccacggcgctggaggagcgcgcccgcgccctggacgcgaaggagagagacctggcggaccgcgaggccgccgtcgccgcccgggaggcaacactggcggcgcacgaggccgcctgcgccgaagaggagtccgcactccgcctccgcgaggacgagctcaccgagcgggggcgagctctcgaggaggccgaggccgtggcgcagcggctggcggacagcctgttcctccgcgaggtagcgcgggaggagcaggcgcgccgcaatctggaaggcgcccgcgccgagagggccgcgctggatcagtgggccgcagagctcgaggcgcgggcgaaggagctggacgcgagagcgcacagcggcggggcggccgcgggccagggcgacctagccgcccgccttgcagccgccgaacacaccatcgccgagctgcagggcgcgctggacttgtccgccggggaggtcgaggccctccgcttggcgagcgaggtagggcccggcatgcttcgggacgccgtctcccgtctagaccgcgccgggcggcaggcgggcctctggggcaggcggtacgcgaagtacgccgccaaccaggggggcctcgcccagcgcctctcagagatggccgggaccctcaagcggctccccgaggagctcgaggagacgatcaagtcatcctcgagggacctcgcccggggggcggtggagctcgtactggcaaggtaccaggccagggaccctgacttctccccgtgggcagcgctggaagagttccctcccggaaccgaggacggcgcgcgcgcgcaggtccgggacgccgccgaccacatcatccacagcttcgagggtacggcccctcggctcgcgttcgccctcgactccgacgaggagggcggtgacgacggtgcggacgacagcgacgacaaggagggcggtaacttttccttcttcttccgaggccttcggcccccttcttgtatagactgatttaatctgcaatcaagtaaagaggaaatttctgcgtcagttctgtttgttgtgtgtataagacgaggatggtctgtgccgcggtcattctgtgtcttagcttgaacaagggctcgtgcccaggtcccagcctcaaacggcgcgggtcggggctagtgcctggggagatcctcgtgtcgagactggccaggctgggagcgcggtgaccgagggttatggatgacccgattgtgggcctttgccgattcccccccgaagttcaccacgccccggggcacggctcggttctgggccccgtttggcgattttagccggcccgggccaccgagggcagggtcaagcacgagcgtgctaattcaagccaagattcttcaaaaggaaacgatggcacagacacagtcctcaggaaatcgaaaatgcttttattgaaatacggaagagaaaaaaggtaagtatatgcatgtggtagcccaggccaaccctgcacgcccgggggggtgcggggttggcccgagcccgagacatgacacccgacccccactaggggtagaagcgacgaaggtgttcgatgttccacgggttaggcagctctgtgccgtcgcccgtggccagccgaacggagcccggccgggggacgccgatcactcgatacggaccctcccacattggtgagagcttgctcagttcagcacgcgtttggacgcggcgtaggacgaggtcgtcgacgcagagtgatcgggcccggacgtggcactgatggtagcgccgcaggctctgctggtagcgcgcggctcggagggccgcgcgccgtcttcactcttccaaatagtcgaggtcgtctcggcgaagctgatcttgatcagcctcggaatacatggtgacccgaggggacctcagggtgagctcagatgggaggaccgcctccgcgccgtagacgaggaagaaaggcgtttccccggttgctcggcttggcgtggttcagttcgcccagagcaccgctggcagctcctcgatccacgagtcgccgtgcttcttgaggatgttgtaggtcttggttttgaggcccttgaggatttccgcgttggcgcgctccacttggccgttgcttctggggtgggcgggggaggcgaagcagagcttgatgcccatgtcttcgcagtagtcaccgaagagttcactagttgtcacgaccgaaaataacccaacgggcgttccttacgtgcgtgcattattccttgtcccaggaggcaaggtacaccaaaagttgatacagttcagagttcaacaagcggaagcgtaaatagttaatttattacatgggcagcgaaggcccagcacacacaaagacaaacgagaaacagcggaagactagggcgacgaccacaggcgcttgacggcaggcacgagctagacaccaaaatcttcatcttccggagactcctcttctgggtttgggaaaaattgagcaagactgagtacaaccaccgtactcaacaagacacaccgacaagtgcataataaatgcaagggagtacaagggagttataatataaagggttagggttgcagtaaacagcattaaaagacacttagttgctcaaagctattttgtaaacacgattctagaactatacaatattatttatcaaggccgtgaacccacacgaacctgccttaactcaaggcctacgatgattcagaccgaaccggcaacccgaccctgggtcccagctcgtcccaagccaacccaggccaaccattcctccttttagttgttaagcaggttttaagaattaaaacactaacttgggtacattgctcggcttgcccataaccgagggcgcggctattcgaatagattatactctgatcagaggtgtacatctttacccacaagacacatcttcctcacgtgcaaccacgtgccacataccaccacggtatacagacggaagacgtgacatagtttccaacccatcctagccatagacaagagtaccgacccaatcccacctacggccgcaacccccgggacaggtaggcaggactgagcccctagcagcaggacaccggccctgtgccatgacatctcgactaccgggccgcagctcgtgtagccttcatttgtcctagagatgtccatcgacccccgacttcgtccatctccatccgtgtacttttgtttataaccagactgagccacaaactaagccttacccactagacatgtggaagtacggtagtgctttgcaacagaggcccgaagaccggtccttatatggccgaggtgctactatcaaaaccatgcaccccgagcccagcctaaaactattttgagggttttgaatagagggggaggtgtgaatccaattccacaataatcaaaccaatccatagtgtccaggtgatacgaatatcccaaagtctagagttgaaaaaccacctaatgttacctaattaaatagcgaagcatctacctaaaatcatactagtggtaccatgagtagagtgtccactagttggggttttgtttattctagggtgaacaaggaaataataacaataacaataataaggtcataacaaaggaaaataggcatggctagataaaacagtgataacgcgggaatttaaataaagcgataatgcaataatttaaagcaacataattttataaactgggattcaatatgttcaaagatgatgtgacttgccttgctcgctttcccaaacgtcggcttcaacctccacgaagagcggatcttccgaagctgcagcgtctacacgaccaacggaaaagaaaaggcttttactctaataaactccatataacaagcagaaacaaagcacaaaaatgggttcttgacttcttaaggaaaaattagagacttgaacggtctaattccgagttcaaatggccaagttatggccatttgaagtttatatgctctttaaatgaatatttgcgaatttcttcatttaaattttaatttaaaatggatttattgcgtcagccgaggggaggggcgcgcggactgggtccacgggagtggggcccacgtggcagccccacggcccacggtggaccgggcgcacccggggtcgcaccggccggcgccgtgggtcccacgcgtcagccgcacctaagggcgcgggcggctgacagccgggccccacacggcagccgcggggcgtgcccaaaggcggccacgccggcacagccgacgggaggcggcgcgcccgcgcccctatggtcgccggtggcggccataggtacggcggagcggcggccgagagaggggagggaagggggaaacgaatcggcggtccacggctcaccccgggtcgatggcgacgacgggaacggcgaccggagctgaggaaggcggcggcgcggctcgggtggacggggtcgacggtgctccggcggtcggcgtgcgaaacggaggggtggacgaggtcggcgaggatgcggcgaagccgaaggaggcggcgccgaggggagaggtggtccggggcgacaacggcggcggaccggagctcggcggcgacggcggagagagagagcgacggcgcgagctcgattccggcggggagagagagcggcgagtggcggaaacggtggagggaggcacggggagggtttatatagggttaagagagggaaggggtggccggaggagggggaaacgggcgcgggagtcccggccgccattaatggcgccggcgaggttagggggaaagtttccaaatgaatccgagggagagagagagggaaaaatggggggaaagagggaggggatcccggggaatatttcccctctcttgattgcacgcggggcggacgggggcggcgggattcgcggcggcagcggcggcgctagggcgcgggcggggcggcgggagcggcgggaggaaggggatgacgggtgggccccacccgtcagcgagggtggcgggcgggcccgcccgtcagcggcgcgcgcgcggggaggaggccgaatgggccgcggggaagaggagagagagggaaagagatgggccgagctggcccaagagggggagggggaaaaaaggactttttagagcttttctttttataaaaccattttaacttcgtttatttcttaataattattatttgtgctctgaaaattccactaaaatttatttatgcattttaggcttttaggaaatatacaaaaatcctccaagccttatttgactttttactttgcacattttaattgttggaggctttcacatggattttaattattctaggcataatttcgaggatgtattttagagtcgttttgagacgcgacactagtgaactgggtgccgttatcctatttgtcgtccagaagaccaccgattcgtgtggtcttggacgggccgtcgctcagggcaacctccttgaccgggacctcgtcgcacgtgaccatccgctgccttggggcggccgggacggaggtactgagcctctcgtcgccacccgcgggcttggacgccgcggcgaggtggtccgcgcgctgctccatacaagcaagcgcgactttgaggtcgccatggacggtgatggggccaccggggcccggcatcttcatctggtgataggcgtagtggaccgccgccatgaacttcaccaacacgggcctccccaggaccgcgttgtagggcagactgaggtccgccacatcgaagtccacccgctccgtgcggaagttggcggaaccaccgaaggtgaccgggaggtcgatatgacccagcggccaggtgtgccccggcgtcacaccgatgatcggctgggatggccggagcaccatccccggggccttgatggcgtcaaaggctgcgggggaaaggatgttgagggctgcacccccgtctatgaggacacgccccaacttcacattgcaaacggtgggggaaaccaccatcgcgatctgtcctccccaggcaacgcacggcgggtggtcggtctggtcgaaggtgagggcaacctccgaccaccgcgcccgccgtgtcgcctcatgggtaggggccgcggccagaagctcgcgcttcatggccttgaggctccggcgagaaacgtgagcgcacgctcccccatcgacggtggcgacggtggcctcaggctcctggaaccccaggtcatcgtcgccatcgtcgatgtcctcggcggtggccttctgcttggcctcacctcgccggttgccggcgggagccgccggggccttgccctcacggcgctcctgcctcttctcctcctcccatttcctcgtccgctcagccaaacttttgaccgcgcggcagtccgcgagatcgtggagggtggtgttgtgcacggtacaccacttgccggtcgggcgctccctgctgggagcgccggcctccttctttttgtcgctcgcaggcctcccctttcgtggggcccgcgaagcgccctcgacggcgaggacatgaccctcgtcgtcggaacgggccgacttcttcttcctcctcctgtcccgccgctctgaccgagcggcggacccgggggcggccagagctgccacaccagaaccggaggagttccaggtccaggcctcctccttgcgagccacacggtccgcgagctcaaaaagctgcgcggtggtctggggctccttggaggcgatcttctcgagcatgcggttgtgccgcacgccccccctgaacacgtagatcaccgcgtgtgcggggatacacggtatggtgttgcggacttgacagaaccgctgaatgtacgagcgaagaggctcatcgtcccttcgctgtaccgcatgcaagtccgcttcttcgcctgggcgcggatatgtgccctggaagttcgtggtgaactgctggcacaaatcctcccaagagtagaccgacgcgggtggcaagttcattagccaaccccgcgcctgacccttcagggccatggggaagaaattcgccatgaccctgtcgtcacccccggcggcctcgatcccggtcgtgtagatctggagaaactcagcggggttgacgcttccgtcgtatttttcggtgatggtggaccagaaccttgggggccaacggacgttccgaaggctcgccacaaaggctcgacagccggcaccgccaaccggggacacggggggccggcccccgtgcccggaccgaagtggcgctccggacgaggaagcgccctccgttgcgtcggcggcgcgacgatcgtcgcgccggcgctcgatatcgaggcgggcatccggccccccacgcacatcttcttgggtcggaggcgttgacgagggaacggcggacgaacggcgggtaacggccgccgctcgccgcgccctccgcctcgacgacatggagccggcggcggcagcgccagaggcctcggtggcggaggaccgcccgccggcgcctaggcgctgctgcgccgtcatgaccaagtcagccacgtcatccagccaacgtcgggccggagtctctggatcggggacgacgggcgggtgacgcaggagcgcgcccgcagcctggagcgcgccctggggcatgccgccatcgccgtagacgaggcggcgacgcgccccgtctcgccgtcctcccccgtcgcccgcgggcggcgaagtcgcggatcctccgacctccccgagcgcctccccccgcccaagatttcggcgagagggggacggtggggtgcgagcccgacggcgcgggttctgctccccgtcgtcaccgctagcgttcggagagaggctgtgcaccactgcccgttcggccattgggctgagcgggagaagcttggcgcacacgaaagaggacgagggcttagaaagtcacgcgcgccccctacctggcgcgccagatgacggagcgtggggctcctcactgggagaccgcgcaggcccccctttgccggttcggccggggacgctaagtgaggttcttcgccctcgatctgaggaacgtcagcgagagaggaagtgcacaagacacgggcgacgtagacaggttcgggccgctgagaagcgtaacaccctactcctgtgttctggtggatctgtgtgtgaaggaatccagcgagccggagagcgagagagagttcaggctctagaaccctttttcttctcttctcttctccccttctaggcctgggcctcctttttatctggtcaggggtcaccacatgggcctctagctgcctaagaaaggaaacatgctttttacaatgagggctagtctacagccggaagtgacctctgacaagcagagcacacgcctcctgcccccctcgccagctttcccggtggacgcccatttcaaccttcattcaatggccagcgacttccttgccatgcttgcgctgaagcctggactggatctgaccgggactg

SEQ ID NO: 28218 - DNA, 17678 bp, Oryza sativa
acccctcggggagacagagggaggggtggccacgtcaccctcgggcccgacccccccgagggggtcaggccacgtgggtgactgcggctacccaagcctctagtcacgatacccccgaccccatgtcaccgacaataagcattatttaaatccctggaaattctttcctttttttctttttcctttttcccctcctttttccctaatgggccaccagcccatttcctcctccctcccgcacctagctgggctggccgaaggccacggcccagctgagcccgcgcctcctccctcctcccctcgggtcgtcgacaggtggggcccacctgtcgggcccgtccccaacctccagccgcccaccgtccgcagccgccgcctcgcaactgcccgcgcccgccttccccgcaccacatcggccacgcccgcgcgtgcgcccgccttctctgcgcccctcaaccccctctcccgctcgcccgcgcccccgagatggctgggatttgaatttcgaatcccgcctctgtctccacctccacctccccacgtcggccggcgaaatcgggctgctcccggccacgtccgagccccctctcccctatttaagcatcaccgctctcccctctctctttttccccatttggccaagctctctcgtgctttcctccgctctagcgtcgttgccctcctctccgccgccatttcggttgccgctagccaccgctagccgccaaaccgagccaccgtcgtgcgggccgcctcatccacccctcctccgtcggattccggggctggaacccactccgcaccgagcgttggtgagttcggccatggtcgccgccttcggccggcgtccccgccttctatgatctctctctccccctctaacttctcccattttgctccttaggttgtcccggaccccgtccgccgctcgttgacctctctccgtcatttctcgtcgccgttcgccgtcgtctccctccacgccagtcggacctcttcggtgaggacaccccctccttcttccccctgtcttttcctctcgtagcgccaccgcatagctgccgccgggccgcccgccggtcaccgccggtgtcgcgccgtcgtgcgcaatggcgccgggccggcttgagccgagccccgtgcgcgccggccgcatcctcccgccgctgtccgatctacccgggggtagatcggggccgtccgcctcgccacccacgtggctgccatgtggccgccacgtcagcgccatgtggtgtgctgtttttccccggttcgtggacccggtccaccacggaccgcaaccccgagccactgccatgtggggcccgcgtgtcggtgccgccccttctctctccagggtttatttattgcgcaataaatcctttaaggatttttctgtttatagtaaaaacacagtgaaccttctaaaattcatagaaaactcatccgagctccgtttaagcccattcaagtctcagtaaatcaagaaaaatgcaaagaatccattaaaaatggttttgttctctgtttcagtagtcttgtattctgtttgtattgtttgctttgtatgtcgcttagattccggctctcccgacgctccggtgtactttgaaatagtcaccgagattcctccagcagcaaaccaaggcaagtcatgcttgtcacttgaacatattgaacctatattgcaaatgctctatcgttttcccttaaacattgcattgttttataatgttactatgggatgttgacctactgttacaagccatgctatctttgtaccttgctcctttgttagcatgggatatgacctgattagatgttggattagaaattgcttagccatgcttagttcaactagcacacaatggggaaactacattaatgtatagctatcacattctagtattgttgagggtttagtgccaccgctttggtgacggttaattaaaatatattaaatggtgggccgcgggtgcatggttctgatggtcgcgcccatggcatttaaggaccggttcgcgggaaaccctggaaaaattcctcgtacttaccacaagccagcgtgggcaatggctgggcttgtattgtagctttcctctagctgacgcatccaggcaagggtgagcgtgatggagttcggatgggtcctgcgacggcctatgcggctttcggattcacctaggcacgagaggggactgcccgctgccttgcgaggagtgggggtgaaacctaaggtgtggtgtgtttggttagagggggttatgcgaagcgtcctgtcacggtctctttccggtatgtcgtggtggcatgtcagcgcacggaaacgtgtcgtggggctgtgtcttgtggctacagttatacacctctgatcagagtaaaactattcgaaaacgtgcccgcgattatgggcggtcaaccagattcaccatgattagtctcaccctagcttagtctaatggaattgattatttcaggtggatggttgggcctgttgcaacgtggtgtagcattggacagtggatgagtaatattgattaattattacaactgttttaccgctttcaactactgtttataaatgctcgcttttatgcaaatgaaccgctctagctatcctttggttatatcctgcatcataccccggttccggtatgacatgctaagtacagtgggtagtactcagtcttgctctattttccccaaccccagagtttgagtatgcgccagatggtggcttttccgaggagtaggcttcgtccgtgccgtcgaggatgcctgtggagtggtgttcccgctgcagtccaagtcaaggatcagctccagttatcttttattttccgctgcatttatgtaagacttttatgatgtttgtaggacgtagatctgtatgtcaactttgtcgtttgtgtaccctggccggtcttggacaggggttttaatgcacatgttgcttggaattctattcggaaatttctgggcgtgacatagatgtaatagtagtagtagggacgccggcttgatcccgaaggggtcgccggcgatcacttgcggggtagcggtggacttctggtcgccacctgcactatccctgaaccgcctcacgtttcccctccagcgccaatgttgatcggggtttagggttttgttatcggggagattgagaccgagagagatcatcatccctcttgggctggcctccccttttatatttagcactgtagggaatcaggggcgactcaataggaaataaattgggcaccaccgatcacggcgcgttagttaatctggaattaaaacggattcagtcgctgtgatttcgcgtagacaaggggtggaaaacggtctagcacgatttcctcctagcgcggtctcctcccggttttccaaaccgagagatcaattttcccaacattctcccctttgatcttgaggttaatgaattctttcttaataaaatagttcaccaaggcaacgcgtcatggcagttatcatatcgtaccaagactccggtacctatagttcactataaaatttctaaagaactctatctaatcttaatgggagttagttaggactaatgcccctatttccaggatcttagtcttaatcaaaggcaatcagttattcccatgccggctacatgatctttaaataagttgggaagtaagcctttggtaagcggatccgcgagcattgacttagtactaatatgctcaatcttaatggtttgatcctggattctatctttcacaacatgatacttaatgtcgatgtgtttggcagcaccactcgacttgttgttacttgaatagaatactgcagctatattatcgcagtataatgtgattggtctagaaatgctgtcgaccactcttaaacaatggataaaaatcttaagccatttggcctgccccgttgcttcaaaacatgccacaaattcagcctgcattgtcaacgatgcagtcaaagtttgtttagagcttttccatgaaatagctccctttgcgagagtgaagacataacctaatgtagatttcttagtgtctacacatcccataaagtctgcatctgaataacctaggacttcaagttcttcagacttcttgtatgtgagcatgtaatccttagtgccttgcaaataatgcaagacctttttaacagccttccagtggtctaatcctggattagactgaaatctgccaagcatcccggtaacaaatgctaagtctggacgcgtacagacttgagcatacactaggcttctgacagctgaagcgtatggtaccattttcatctgatctaattgtaatttatttttcgggctttgaaatgatccgaatttatcgcccttaactattggagcaggtgttgcagagcacttactcatattatatctttctagtactctgctaatgtatgatttctaagataatcccagtactcctctagacctaaaacataagatacctcaccaagatccttcatatcaaaattagatgacaaaaattctttagtctgatgcaacatattaatgtcgctgcttgctaacagtatgtcatccacatagagtactagtattataaattttccacccttagtattaatgtaaatgcaattatccacctcattctccttaaatccgaatctcttaattatttcatcgaatttaaggtaccattgccttgacgcttgtttaagtccataaatagatttcttaagtttgcaagccaaatggtccttgccttccataataaaaccctcgggttctgccatgtatacatcctcatgtcagtcaccattaagaaatgcagtctttacatccatctgatggagctctaaatcataatgagcaacaagcgccatgacaattctaaatgagtctttcttagagacaggagaaaaggtttcattgtaatctattccctctctttgtgaaaaaccctttgctacaagccttgccttgaacctttcaattttccctttggagtcaagcttagttttgtagacccaattacagcctactgttttggctcctttaggaatttctactaagtcccagactccattatgactcatagattttaattaatcttccatagcttcaagccatttggatgaatgttcactcgttattgcttctttaaattaggtgggatcatctaccttcccaatatcttcacctaaataaacctcataataatttggaatggcagatctcctctcccgttgtgatcttctaagtggttcattttccatcactgacggttgagaaggttcctctagaatttcttcattttgtgcctcagaagtatgttgagtgtcattatttaattctttattattttcaacagagtcggtattaccagaatttttatctggtgctaccacggtctgagtcacaggtacaacatgaggtaccaaatttattggaatattattctcttggatttccggtgtaacattagcccgaatttcctcaagattaatttccctttcttgtgagctcccacagacttcattattttctaagaatacggcgtgtctagtttccaaaaatttagtgacacggtccgggcaataaaatcggtaccccttagatgtctcagggtatccgataaagtggcagcttacagtcttaggatctaatttctttagttgtggattaaatatttttgcctcagcacgacaaccccacacacgtaaataatttaatgtcggttttcttccggtccataatttataaggtgttttgggtaccgacttacttggaactcgattgagtatgtgtgcagctgtttaaagtgcctctatccataaattcacagacaaagtagaataactaagcatactccgtaccatgtccataagtgtacgattgcgatgctcagccactccattttgttgtggttctccaggcatggaatattcggcaattattccatgtatctgaaggtattgggcaaatggaccaggactttgcccataaggagtatgtctcccataatattctcctcctcgatttgatctcactaccttaatttttgcattatgctgattttcaatctcagctttgaatattttaaacttatcaagtgattcagatctatctttaatggggaaaacgtatccataatgggagaaatcatctgtgaaggtaatgaacgagtcatatccatcaacagatgttactgggaacggtccacatatatccgtgtgaattatttctaatggacacgtgctcctagtagctctttcttaattttcttagtgaattttcccttaatacaatctgagcaatgatccacattcgaaaaatataagggttgaagtatctcttccttaatgagacgctccattcttcccttagaaatgtggcctaaacgacagtgccacaatttcgaagacgtctcattatcattacaggcattcaatatattcataatatgatcatccaaagagagcaaatagagcttgtcttgcacgctagcaagaccaatatcaatattattatacttaataaagcatttgtctttagaaaaattacaatcataaccactgtttgttaaaaccattacagaaataaggttcctcttaacagagggagcataaagaacatcatgaagtaaaagattattgccgcttagaagtcgaagatgaagctccccaacggccatcactttaatttcagctccatcagcactcttaggatccgctccccctttcttagcgtcctcacggaacggaaatccctgtaatgagttagcaacgtgcacagtggcacctgagtcaatccaccctgatttatgagaaaattcaacataaagtaattcatcaacattagagacaatattaacattagtacctttcttagcaagcgaagcccgaaagccttcacagttcctctgtgcatgaccttctgccttgcaaaacttgcaaaagaacttaccagcagagttctgacctgctggaacctgagctttgcccttatgggcaccattagaagcctgagtggaaggagtgttgggcttcttcttcttgttttgggagttgctggactccccttgatagaactttttcttaccgcccttagcactatgaaggaggttcagctgatccttatgcttctgtttgtcagccttttgacgatcctcctcctcaatagaatgagaaatgagttcttcaatggaccacttatccctatgattattatagttaatgatgaaagactcaaaatcatcattaattcccatgtccatactcttaagctctccattcatagcacccatctgcataatgtgctttctcacaccacctttataattatagcgcgtggacgttaggcgcttaattatagagctagcgtaagacatagaagaactcctgaagttcctatcaatattttctaagtatgtcttaacatcatcagagtcctcaataccaccaataatgacatttgatatggcactcttgatgtacatgagagaaatcctattggacttctcccattcattagttttctcacgatataacttcagtttctcctcataatcgtgctgaacactaaagggttcctcaggacggtcctctctaatggcataatcataatcaagtatgcctaagttgagcaacacgtcagccttccacttagcataatttgacccttcaagaggctcaatgggtcggatgtcacgcccggaatttctatccaaaattccaaacgcttacatgtgtgtgaaccctcgtccaggaatcagccgaggcacacaataacaaattgataatagagtacaaatattactctaattaataagcgaataaactgtcattacagaggtagatagttcctctcaatcaataaagatctaagcagcggaaaataaataaacggcgcagacggctccactccacaggcagcttgaccaaggctacacctaatcctccacaccatcagcctcattgtagaactcttcctctgatgaatgattgcaaggtgagtatatgacatactcagcaagccacgcagcaaatatgcaagtgcacaggataacaaaggatggcataatagggttgcatttgcaaaagcagcatttaacaaatatttgagaatttgataaaacagttaagtaattaaacaatattaatccaacgctatacaacataccctgttgtataggcccaaccattctgaacaaccaccccggctgcacagttctatctccaaaccaggaatataccattccaaaccaggagctaatcaaattattaccagtttaagcatcttttacaatgatgagaggtgtgagactaatcacgaaagacattgttagacccgcccataaccgcgggcacggctattcgaatagttttactctggccagaggtgtaccactgtacccacaagacacaaccccacatcatgtcaccatgtgcctcaataccaccacggtatctcggaaaggagttgtgacaatacccctcgcataacacaatccactgcagcgcaccttcctggatcataatcacccccttataaacaaggcatggactccccagcgacccccgtgggcttatctccgccacttctcagtctggtgccccgcaatgaaccatgctatacaaaagataaagccgttgcccatgctggcttgtggttggcacggttaatgtttcacaaccgaaactcgtgaaccggtccttaattgtcatgagcacgaccaacaaaaccatgtgctcacaacccaccattaccaggttttagttggcacattaattaattaactaatcacgattgaccatcgtgaactatcatgaaaccatcattaaataatagtgaatcattagttatcccataagtgagctaatgtttctaagcatggctaagcaattatatctaatatctagttgaaccaatataaataaagctcaactagtcaaattataatatcccaaggtatcaaggaataaggtgatcaagaacaaaagggctatagcaacaataggtcaattccactcaatgacattcgaaaatagatgcaatagttgaatagaaacaatagctttaaataggatcaacatgctcaaagggttgtttgggatctgtgtgacttgccttgctgccttggaactcttcaaactcttcttctgcgaaaacggactctccggaaacgacggaatctaagcagaaaagagcaaaatcaccaaaacagcacataaacaagcatgaacagtacatgtggatatttttaatgtgtagatctcgattttagaaaaatttagagacttgaaccaactaaatcggagctaagatgaattagttatgaatttttaaagattaaatcggattaaaacacttaaattgattttaattgaattatggcgcaataatgaattatttttgaaaaggaaaaggaggattattgcgtcaacggctagggtttggtggaccgggcgcacgggcgacggttcacgcgaacggacggccgagatcgaaccaatccaaaacggacggccgagatcgatcggtctacgaccggctcacggaagagggcgacgatgacgtcagcgatgacgtcaccaccggcggcggcggctcggcggctcgggcttgcatgctcgccggcgaacgacggcacggcgacgcggacggaaggcaccaacggaccaaagcgacggcggaggaccaacggacggcgacggcgacgaggttgaaacggcggcggagatcgggtcgacgacggcgacgatgctccgacggtctccgacggctgcgaagcagcggacgaggacggcgacgacttggcgagcacgacggcggtcttcccgaacgacggcgacggctgaaacgacggcaacgcacggctggagcggcggcggcgacggcggcgctagggcacacggcgctagggctcttccggcgacgagaggcgaaggcgagggtggcgacgggtagaggagacaccgggggtccttttaaaggggctaggaggcggcggcgaaggcccacggcggcggcaacggcgaaggaaagctcggacttggagagaagaaagccgatccgattcgaactcgaatcaaactcattccaaaccgatttagccgaagtttccaaagaagaaaaggtagaggagatcccggagatcatttcccctctatcaattcggccagagaaggaaaggaacggccagattggaaagcggcggcggcggcggcaaagctagggtttcggcccgaggaggacgacgatcccgacaggtgggccccacctgtcagcgggcggacgcgcgctcgcgcgcggcggactgggccggctgggccgaggagagagaagagagggttttgggccgactttcggcccaaagccaaaagaagactttttaaaacctttttcaatttaaattattcatgaaatgcaattccatttattaaaaatacttccttagctcaaataaatcccagaaaaatctaggaattatagaattaagcaaagtatttagtgaaattttatctggccccattttatattggaatttattaattaaaattagatcttctcttcaagacttttaaaattatttctaaaaattccagttaaacaacaatttatatattttgaattttcagggtgtgacatcggatctgaccaaaagctgaaaaaatcatgaagaaaaaatatccaaaagtacatatatgcaattaatttgcgttggctcaattaattacataattaaacagaaatgaattcccctaattacatcaccgttgggcagaaataattttgggaaacataatcataaataaatttacgtgaatttataatcaatgtaggtcagaaaataaattcatatcatggaaaacaaatatctagccaaatttctcgttggttccatttagctagtattaaattaataagcctccataaaaaatttcataatttttcagcaattttaagcaatataaatggtactaatgcaatttctgaaaaatacttaaaggtggattaaaaaattagaaattataatatttgggccggcctggcgcgtgcggcccatgatgcatggctcggcccaacccggagggcgcgctgcggcctgctaatggcagtggcccgatcggaagcgatccgagccgttcgcttagatggacggctcagatcgattaatattagtaaaagaagaaaaaaaaattaaaaacataaaagtgccggctctaaccctaaccctaaaaatttccccattatgtttctctctcccgaaaagaacggctgcagcggcgattttcacggtggcggcggcggcagcggcgcttgtgaggcggcgccacgccatgacgtcgcttgaggcggcggcagagtgcagcacgggaggcggtggcagcaaggcgcagcacgggaggcggtggcggcagggcacagcgctggtggcggcggcggtagggcgcaacggcggggcggcgcggtgcgcagcggagaggccgcggccggcggcgcctcatgcggcaggctgatgccgcacagtctgatgccgtgccggcacccgccgtcccggttctcctccacacgcagccggggccatggcagcgaggctcaacctcgcgcggctaacgggaggcaggtgcgaggccggtccaggacgacggcaaggacgtcaacgagcgcgcgggcgagctgatgccacgcgcggcgacgacaacgtgtttgtaatgccggtaagtgagttgctaatttggggattttagggttctaatttggggaattatgtgattagggtttctgaaaattttggggaaatttggggattgttactatccgccgaaattcacctccttctaattgctacccaagccctaatcgatcttggaacgtaaacctaaacttaataaaccatgagcagcgcttaatggaaacataatccgaataaaacatgattaattcacattaatcttaatgtaatttgcatcaaaaaccgacatggaaatgaggcttagatgcatcttatggcttctaaacaggatgatgggatcattaggctatagcagtggctctgataccaaatgtagattatgtgatctactaaacataatttgctaagccgatacatgatcaccctaatgcggaattttaggattacactgaccgttgtttgaagccatggatgtgattctccctttgttgtcaaccggactggaagtaggggatcgagaacctcgaaccacctcctcacttgtcggtgtaggtgaagtagatgtagcagtagcagtagggacgccggcttgatcccgaaggggtcgccggcgatcacttgcggggtagtggtggccttccagtcgccaccagcactgtccctgaaccgcctcacgtttcccctccagcgccaatgttgatcggggtttagggtttggttgtcggggagattgagaccgagagagatcgtcatccctcttgggccggcctccccttttatatttagcgctatagggaatcgggggtgactcaataggaaataaattgggcgccaccgatcacggcgtgttagttaatcgggaattaaaacggattcaatcgctgtgagttcacgtagacaacgggtggaaaacggtctagcacgatttcctcctagcgcgatctcctaccggttttccaaaccgagagattaattttcccgacagacatgagaccggatccatttgaaaatagactttataagctttccatgaagtgcttgcactcccaaattggagttcgtatgaagtcgtggcggtcgtcacatggtgctttccttcagtccgaatccaaaccgcacgaatactctccccttttgatcatctccatcattcctgagtaaaacaagagcccatgcgtctccggggtataaataagatgaacatgaactcaagaatgaagtcacctgatagttgagttgatgtgcacaagcgcggacaataggaccatgaagttgtacttgtagagacgtggatgtatcgatggtgttgatgtcctcatcaattcctgctattcacatagtactatatagttttcttcttgatggaagtgtcaaatacttactaggaagtccccgtgggtaatcaccaaatgttctagtatgagtaaatctagttccgggtggtcatctagtatgggacctaagagaagccctttttgtatgtgtatgtcttacttgtgtccaaatttatttaatagtactctagacatactgtttttctcagttaatgggataacaccgttgacattagacatgaatatccctctaacgggtgaagtcgacggtgatgccatgaaatctttgccccgtatcatagaggatggcataggtaagcatgcatgttgaactataccgataacagtggactcccaccggggccaccttatgtcgaaactagatttcgtcaatactaaaagggggtggcgaacaagctatgaaagtggatgggttaggaaacaacggatttatacaggttcagcccttctcgatgataagtaataccctactcctatccgaggaaatattccaccgatcgtggtatttatctgatgatcttggatgtgattctcccctcagggcacccccgacccctccttatatgggctaaggagtcgggattacaagagagcttatcccttacgatctaagttctatatatactttacaattgtaaccgactaagactacgggatacttccttgacatagaagttaacataacacccgagtccttatctttacatattttgttactctgagttacccccgatatccagtcaggtaacgtagccctgtgggtatatggtacccataatctccacagtagcccctgagagcttcatagatgacgagacaaccttctcccgagtggtaatgatcttttgacgagtgatttcatgaagaattcgagtacttgaatcatcctcaccacaactcccgagtacctcaatcatctcaagctatgaagggctaaaaaagaaaaaaaatctaggtgcatcgactagatgcaccaaattaggtgtagccccccgactatatgattagttgaacaacctaaacatatagtcaataaaaaaataaacaaccgagtggtttataaaaaatatagtcaccaaaatgattgaatcaattagaaagcatatgcggcttaaatcctcaaaaataatcataattcattggatataccgactgcttttgatatagaaaaacatttagcctaagcataaatgctgattttaataatttacttacgtgataataacatttgatatagtaataaaaatgttgtattaaaccccacaacttttgcagcttataaagaagcccacaaaataagcataacaaagctataaactatagggtaccttttaaaattcatcgtagcaatttcctaaggaattatctaacagcggtataaaaagatatgtaacggtattgggtaattgatcacgtacaaattgccgaagcagagtttgctgaaatcccaaaggaacgtgacaaatcacaccgaaggatatgggctgaaaacactatacgggcctcggcccaacactgttttccaataccctaaataaaaccgccgaaatgaagtcatcttcctgcgctgcttcgtcttccttgcagaatcccctcacaaagcgttattcaaaccttcacgccgccagagttagggttcagatccactgcagcattcgccatccaaaaacaacaccaactgcacaaatcaactacgggcgaacccatctccatcttcccccaaacgatttagcaacaatcccccgcaaccctctcaaccaatctcacggaaatggcagaggagagagaattggctcaaagccagtgggctttgtctgacgtcaaggaatctaccttgttggagatggtggaacactgtgttcttcccagcaaagagatcatcggttggcatctagcattcggtgaggccttccccactccggacaccgacgaaatcatggtatttactcacttcttctactccggcttcgctttgcccacgtctgatttctttcgttgtcttctggaattctacggaatcaatatttatcaccttaaccccaactcaattcttcacatttctgtcttcattcatctgtgcgaagccttccttggtattcagccccattttattctttttcgctgcatcttcttcctcaaactccagcctaacaagagaaatccctgtctggttggcggatccggcctgcaactccgcgggtccctctccaaaaaatacttcagtcttccttttaaatcatccaataagggctggcattcgatctggttttacatccataacccttctccttctctacccgagtactcttgcactcctcctgtctataatgaaatctggagttcactcccgatgggagacgagttatctcaagccaaacaccctcctggaaaaaatgctgaaaatcaaagagcagggactgcaacgggagcaagtcacctggcacttcatcaaatgctgactagctctgataaaagagaggtcaaagcctgccttcgagtacaagggccaaactgtcccaatcatgaagaccccgactcactggacttcaagatcacgaaggctagaatgtacacgatcttctctacgggcattgaggtagactacagccaagggctgcctgttacccctttcaacatattcaacctgcctccaaaggtaattgtcaacaaacttctgccttcttctttcagtcggtatcataaattgtaattcgctttcttgattgttgctataggaaaatgctctttacagctctaagccattctcctcgctaccaaacgactaactgaccaacaggtggcccaaccatcaaccctgccggccaagaaaaacaagctacgggcaaggatagccaagctatgatgaaccctgagttcctctcgacactcaaggctgttgttggcctgatctttcggtgagtactgataactacgatttttggagaagacgttgacgatccgactacaaccgtacgagacgttatgttgcgccttagcgatcgatacacctctccgtgggatgttgatcttgccgatgcaaatcaaccttattcctgcaagcaaatcaaagaaacaagcaagaacaagataaaagcaatctgaattgcaaataggaatgaatacacaccataagttggggttccgaagaacaagcagacggatggtctagccgacacacgcgctgcaagcaagtagcaatggctaaactttaatctatcaaaaccaaagaaacactgaaggggtacctaactatttatagtggtgggaggacggtcgtcctccacctggttggggcgcaccccacatgggccccacttgggccggggtcccaaacaaagttacaagcccagaggcccaagataggtgatgcagcaccttgtttatatgattgcggccaaatgacttggaatctggcgatgaggcaagatccgttggaaagagggctccgagagctttccatcaagtattcacgggccaaaaacaaaggtcgtatgcagattcgacggccatttgaaatcagcagtatagcaggtggccgaatcggattccagcacttggaggacttgaacttgatatcatgctgttcatccatgatgtgagcaatggttgtatccatagtagccatggtcccatcatcctccccttcttcacggaaaaccgtcctcggtttttccatatggtgctcatcacgtggtcgatttaaaacaacctgtttcatccaatcaaaagaagacaaactcgaagtaatatgattagaaataacatgtctctctagcttgcaagttttatccacatgtacaggaggttctaaatccgagcatatataaactctatgcaccaaatatatttctctatcattatattcgccaaagatatgaaaaatagcattagttggacatggcaaataatatttagcaaataatttctccttcaaactatcgagctcacaaaaatcatcacactgaacatagcccaaagtatttaaagaagaagtcaattcacattcctctacttcattagcaatttgaataacatgcttaaaatcatcgcataaagaactgacattagaaatagcatgttcattcactagttgtggcattgatataagtgaagcattatcacacaactcttctttatcacaaggaacaacaaacaaatcaacttgtgacaaaggaatctcagcagttggttacactaatggttgctctactatagcatgaaaagtggataaattcaattcattaacaacacactcaccttgattaatttcagcaccattaagtttacctttgatgccctcttcagatgatggaggtgcctcgactttgagtgtgaacaatgggactgacggctctttcatgtctctctcctccttgttgcagttgttcacttcctgcaaaatattagtaataggaggtacgtgcacaacttgtttcttgttcacatcctcaattggtttttccacatggcaagcaagttgtaacaaatgagcaaaagagctataactttgacaaacaagcatgtcctgaatttctttattaagcccacgtaaaaacctcaactctgtagcttcttcgtactcatctaaactacaacataataaacaagcataatacatgggaacataaacatctctgaaata

SEQ ID NO: 28219 - DNA, 3747 bp, Oryza sativa
cacttggaggacttgaacttgatattgtgttgttcatccatgatgtgagcaatggttgtatccgtagtagccatggtcacatcaagctagctccaggaagaggccaagaaaactgatcattgacgacgatgatgaagactcggacgaccaaacgattggcccgactgcctttgcccagaagaaaccagccgacagattcgtcccctaaatccaaaaatcttcaaggtaaagaaaaaacacttcttttgacgcataacacttgatggtactgcaatgaaatcaatgaatgtctcttctccgactttagaaaaccctcgaacatagatccgtctggcaagacagagattctggttgccagatcagagacagttggtacaaaagaatcagacgccaactccaacccaaacgctgaggaagaggcaaggaaaaccagcggcgcggctgataacaagcccccgactggaaatcagtcggctggcgccaacactggatcgaaccaggagcccctggctgaaaaccaatctggtggagaaaaccatgacgaccaaataccaagtttccaagagaaaacatctagcccaccacctgcccaggaggaaaaaaccactgatccagagctcagcggtggccctcatcacttccatgctgacatcatcaccggttatttctaaaattcgtcactcgtagcctctcacagtctgctttataaagacccaataattagagaaaaagaagaaatcttccgaataaaatctaccaaggactctaatcctcctggcaagctgacatggagagattttcgtaggcggatgacaaaatcaagccccgtcaacattttcgcatgcggtattttagtctcatctaaaatgtccgcgtgcgaaaacaaaaggctctattatgcgaaaatcattttcctaccagtgatttaccgattagcttcacacaagtgttctcgatgcccactgtcgaaagaacggctatgatttgaagtcgttattaccttcatagagggtgatatcgaacaaggtcaaataatttattcgtcgaattgcacagacacattgcttaatcggcacttcgaactagtgatttgttctcgaagaattcaccacaagttaaaaacgctagatccaaggtaattaattatttaaagtaaatattggttatctgagctagcatcccttctcccgtacttctagcttttgggatcatatatcacagattaataactaattgatctaactggataacaatgtccctagatcaattttattttaccgtccgattaaatagcctatggattcaggattatcgtaggaatgttgaatgttttttaaaaacttaatttaacagcatctcttatgtttttgaaatcaaagtattaactttcaaatatttaactcatacatttgtaatctccattaattgtcataaactcgaactttttaggacgcatcactactcactcacgtatatagtcatgtttttttgtgagagcgatgctttggtactctactggtagtattatcctaccattaaaaatatttgttactaagaatatatcagtaaattactaatacagtgatatattagaggtaattttgtcatatatgttttttcctaactagattaatatgcggtcatccattgcgttggcatcgctttccatcggaaaagccaaaaaagatgggaaaaaaggtttagtcactgctaaataataattatacctattcgcacctttttttcaataatatgtctctttatttttctactaccgctaattagaatagtagtataaatccgaccttttcgatcaaatgaaatcaactatgtatattttttttatactagtagtagagggcatcatagtggagcttaattgcaaaccgggaactaattcgaagaatctgcgcacatcgatgtgcatcaagtggagcggcaagacgattaatttattgaacaacagttaattaactaactaataacataacatcatcgcttaattcatactcctaccaacatgctgcacacggtaacagatataattaattaagctcacacattaacacagcacacgtcaactacgacgtcatcatattaagcttttgcttccgacgcacgtacacatggcaatgcgcgcaaccacatagtcctcacggatgcccgccagcgccgccgcttccggcaccgccgccaccgccgccagccgatccttcctgccctgagccggacccactccctccgccactgcccgtgccgccgttcgcgcttccagagccctgcccggtgcccacggcgttgccggaacgtccagtcccgctacctccgccggaagcaccacccccgccggatcctccacctgcgccgccaccgccaccgtgggtgacggtcacgccgccagggccgatgtgaatgcctacgccttttccgccgccgccacccacgctgccgtcggccgagctcgcggcaccgcctccgccaacgccgatgccgacatcgacgccgcctctgcccacgtcgacgccgaccccgacgccgacgcctccaccggcgctcgagccgccgccacggctggtccagacgccgccgccaacacctccgccgaacccgatggtcgtgtcggacccgttgtgcgacaccatccaaccgaaaccatggccactgccagagccactcccggacccggcggctttactcgggaacggcagcgagaacttgctgccactgacgacggcgccgccgctcttgtcatccgggaaggtcctcgcggcggcaggcgggaacacaaccgccgtaacacacaggagcgcaaggaggaaaaaggggaaggcactggagctgctactactaccactagagatcgccattgttgaggtcgtgtttgtttgatgtgtgaagctctcgtcaccccaggtggggcttttataggggattaggtatcaacaagtcgcggtatttgggtccaaatctagaggcagagatgagcatatgagctactaggttttgtggcagcttgcgtgtggagaaaaaaacctaacttagtatatatgcggcttgcatgcatgcctgtgtggcgtacgttgaccgataattcatttggatttagcgaattaaatgcgaatttaaaataaattatggacggtgtatgaaatattcatggagtgtagtttaagctcgacagtgactgatttgtttgtgttggccatttgggtggcatccagattactgttgcgtagcttaatcacgccctggtttgtgtaatttacttacaaaaggtatggacgtaactatatagctagtgatagctggttttagctattacttcatctataagagacaccatcaacctatactttaaatacaattttctcttaaactactcatccaatctacgatccgattacaccgttgtgttcgtaacaattaaatatttacaataagatctcacatgattatattttgatgaaaaatcgcaaattacttttaagatatatctaaattacttttagatttcactaagctacttcttagacatacaaaagtaaattcagtaaagcttaaaagtaatttacatatattatagaagtaacttataaaaaaagaaagtaactttaattaataccttttttcattgaacaaagtatcatatatatataagttacttttagattttagatttgattaaaatacttcctatacattcataatgctctaaggtgattacttttattatggacgtaactacac

SEQ ID NO: 28220 - DNA, 5616 bp, Oryza sativa
ccaaaactcctaaagtactagtacgtgggtgtctctggttaagactaattggagatgcctctccaattagatttaccgttttattattgtttttagttaatttcataatttgtgctgattaatttaatttctagatagagtcatgtttttatctctacaacatatttacttcaaatgacatgccaaagttacattcatttttttctaagttacttctataatatatgtaaattacttttagaatttacttttgtatgtctaagaagtaacttagtgaaatctaaaagtaatttagacatatcataaaagtaatttgtgatttttcatcaaaatataatcatgtgaaatcttgttgtaaagatttaattgttacgaacacaatgtgtaatcggatcgtagattggatgagtagattaagagaaaatttcataagaagaaaaaaaaatatgcacaacctaatagcaaaaactacttgcatcttgcatgcatgtctgtaacgctactagtactttccacataattgtccgcgtcgctcgttaagtctaaatcgatatgcctctcgaaatagattttacgaaaaggtatacgtactcctagaagacatatttgtttaaaagcatatttgtttcagttcaaaaaaaccatatatgtttatctacacatatattttggatgtaaaaaatattcgttttattgcttggggtgctgaaaaactcggtttggggctcagctcgaaaaccaaacgagaaccaagcccaaacttccttcgcagctcgagaaaatcaaggcaaggtctcgtttttttacccctattgcgttttcagtagaaattccttgtcatctatccatttgatttttgcctagataagtacgtttcagcgtgggttatagtgtggtgtactcataatagatccgtctctataccagtttgagcgtacacgcacggatgtgtgatggtgtatgcatattcgtatttatttatgtaatttttaacttagaaaggaagacaggagattacatagtggtctacagctacaaaattaacactatataagagtactttcaaatgagaatataatgatatatattaaatgcgtcacactaaatatatatattatttattagttcaattactggtcaaaattacatttgttaattagaaatctgcatgatggaaggcttaaaaatctgtcacatgatgtataagcagttccttgttaattttgttggaaatttggtcataattcggcatattttaatccaaaataacaagataataaacattatatttacaataggatttgatccagtgatagtggtgaatgtaatcaacatgagcatgcttaacgttgaataagcatcaacaatcacataatgacacaatgttgacattgcgatgaacattaacagtaaaacttctaattgaaataatgtaataaggttataccccaagaatggtcctccgctggagtttgaggcagtattgcctccgttggtgttgacgggagtctccttctccttgtctccagtgttcgacatgttggtgaagatgaagtagatgttgacgaacagtgagtagtcgcgccttgcgctccccaaaaacctgatcgcccgcccgtctgtgcaaacgtcgcagcaacgcgtggtttcggaggcctactctcccaacgcgtgtgcacacactcgtcgggatgggattaccgtagcagcaacagcttttgaaaatggatgaaagtgtgtcttcttcttctcgcgggagatcaaatccattctcattttataagaggaatggaagatgaagagtaagagtcatggaataggaagaggaatggagcaactaattgtcatcaactagccatgaaccatcctccactacacaaccatcaaccaacaatcaattaagagtaattgatgtaagttaccaatggaataggaagaggaatagagcaactaattgtcatcaactagccatgaaccatcctccactacacaaccatcaaccatccatcaattaggactaattgatataagttaccaattccttaatcaaatggattaattctcaaaactcttcatcccattgatatcccatagaagaatgaattcacatgaattcctagcataatgagccttggaatttatttgatttaattgatttaaatggattaattacccaattaaatctaacaatccccaccaaatttcaaggctcatgagaatgctctctattccatagcagcttttatataccagtgtttcggtgaagactgttaagttgaactttcacctaaaaaaggagctacacctgaccacaactgaacaatggactatgccttgaattgtcagtcttgtgcagttaggtttcactcaattccataactgatactaggcaaccattagtattccctcgggttggagcttataagtcatactccaggcctttcatgagtatctagagatcacccaaatctcatagactgtgactagcagtcgaactcatataggtgtgttccttctaagatgttctgcaggtcaacatctctgcttggaaaagccactcggatcacattaagacataagccatcctaccatgcaggaaagaagagaagcacatcatgaaaatgagcccatttcaagggtctcttctctcagtcacacaatagtttgtttcaccatccaaattcacgggatctctgatcataatggacaggtttccactattatgcaaccttaggtgggtatcaagcccatttccctcgatgcactgtctatcacattacgtggtagccccttggtaaactgatctgccagatttctagccgtttggacatagtccaatgctatcactccggagtttttctgctttctgacagatttcagtcttctcttgatgtgtctagatgacttcatgttgtcctttgaactgttcactttaataatcattgtttgattatcgcagttcattaggatagctggcactggtttttcaaccaccggcaaatccatcaggagttcacgaagccactcggcctcaactgtcgcagtatctagtgctgtaagttctgcttccattgttgacctcgttaagatggtctgcttacaagacttccaggaaacatcgccacctccaagtgtgaacacatatccacttgtggcttttatctcatcagcatcagatatccagtttgagtcactatacccttctagtacttttggatacccggtatagtgaattccatagctcatagtaccctttagatagcgcattactctttccagagcctgccaatgatcatctcccggatttgagacaaaccggctcagcttgcttacagcaaatgagatgtcaggcctcgttgcgctagccaagtacatcaatgaaccaatgatttgagagtatctcagctgatcccttgctattcttcggtttttccttaatagcacgctgggatcatagggagtaggagctggcttgcagtcactatatccaaagcgactcaaaaccttgtccacatagtgggattgcacaagtgtaatcccaccctcatctcctctttgtagtttgatgttaagaataacatcagcctctcccaaatctttcatttcaaaactcttggacagatagtctttgacctcctcaatcacattaaggctggtcccaaagatcagtatgtcatcgacatataagcacaagatcaccccttctcccccaccatagcgatagtatacacatttgtcagcttcgttcacaacaaagcctgcagatgtaagtgtggtgtcaaacttctcatgccattgcttaggtgcttgcttgaggccatacaaggatttcaatagtttacacaccattccctcctgaccttctagtacatacccgtctggttgatccatatagatctcctcctccagctctccgtttaggaaagctgtcttaacgtccatctgatggacgagaagaccatgagaggctgccagagcaagtagtactcgaatcgtggtcaagcgagcaactagtgagtatgtgtcgaagaagtcctcgccttccttttgggtataacccttggccacaagccttgccttgtacttttcgattgtaccatcaggcttaagctttttcttgaaaacccatttgcatcctacgggcttgcacccatatggacgctcaacgacttcccaagtatcattagacataatcgagtccatttcactgcgtactgcttccttccagtagtcagcgtcaggagatgaatatgcctcttctatggttcttggggtgtcatccacgaggtatacaatgtagtcatctccaaaggattttgcaaccctttgtctcttactcttgcgagtatctacaatgttgtccttctcaggattttcctcaggcgtttgatcattgtgttctatcggtgcaaagtgctcatggggcatgacagtttctttactagaagtgctaggtgtatatttcataggaaattattctcaaagaatgtagcatctctggactcaagaattgtaccaacatgcatgtcgggtactccagagtttactattaagaatctataacccacactgtggatagcataaccaagaaacacacaatcaacagtttttggtccaagtttccgccttttgggctataggtacatttaccttggccaaacagccccatgttcgtaggtatgagagatttaatttcttcctttcccattcctcgaatggtgttatttccttatgcttcattggaattttattcaggacatgacacgcagtcaaaactgcctcaccccaccattccttggaaagccccgcagtgtctaacatggcattcaccatctcagttagagtacggttctttctttcggccaccccatttgattggggtgaatagggaggcgtcatctcatgaataattccaaactcttcgcaaaaggatgcaaactcattggaaaaatactccccacctctatcagacctcaaccgtttgattttcctttcaagttggttttctacctcagctttatagattttaaagaaatgcaatgcctcatccttagttttcaatagatacacatagcaaaatctagtgcaatcatctatcagtgtcatgaaatatttctttccccctttagtcaacacgccgttcatttcgcacaaatcggaatgaacaagttctagaggtgccaaattcctcacctcagatgccttgtgaggcttgcgaggttgtttcgattgaacacaagtatggcacttggaaccttttaccaaagtgaattttggaattaaactcatgttagctaagcgcgtcatacaaccgaaattcacatgacagagtcgcgaatgccacacattagactcatcattctcgctaatatggttcacagcattatgattattacacatgtcattcaaagaaaagcggaacaagcctccgctgtcataaccttttccaacaaaagtcccatatttagatacgacacatttattggactcaaacacaagtctaaacccttctctacacaatagagagccgctaactagattcttctttattgaagggacatgctgcacgttcttcagctgcacggtctttcccgaagtaaacttcagatcgaccgt

SEQ ID NO: 28221 - DNA, 28259 bp, Oryza sativa
atattagcaccagtgtccacccaccaatcaggtgaatgaaaaacagagagaactgtaggtaatattttaccgtaccccgatgttcctccgccctcgctaatgatcatgttggcagacttcctgtctttgcgctcaggacagtccttggcccaatgcccagacttgccacacacaaagcagtctccctttgcctttcccttgcttttcttcttaaaattggttgcagccttgggtttgacatcaggcttgactttcttgttgttgtgggatgcatgagggttcttcttctgtaccatattggcactagaacctccctcaacctttttgccccggacgtcctttgccctcgccttctcctcaacacccaaagagccaatgagatcaggaacactgaactcttgtctcttgtgctttagagaagtggcaaagtccgaccaagaaggtggtagtttggcaataatgccacctgccacaaacttgtccggcaactcacagttgttgttctcaagttccttagccagcatctgaatctcatgagcttgttcaactatagaacggtcatcgaccatcttgtagtcatagaactgctccataacatacagctcactgccggcgtcagaaactccgaacttggcctcaagtgcatcccacatttccttcccagaaggcatgtacatgtacacgtccactatgttgtcagcgagtacactgatcaatgctccacggaacaggcaatccgaagcctcgaacttagcctcttcctcaggagaaagaggtggttcacttcgtttgccccgtgaaacatagaagcactgcatcgctgtcaaccacaatagtgcacgtgctttccatctcttatagtttgaaccatcaaaggcatgtggtttcagtgtagcagcaaagccaactaccgaaaatgacctatcaggtttttagattgttggaaatttggtcataattcggcatattttaatccaaaataacaagataataaacatgatatttacaataggatttgatccagtgatagtggtgaatgtaatcaacatgagcatgcttaacgttgaataagcatcaacaatcacataatgacacaatgttgacattgcgatgaacattaacagtaaaacttctaattgaaataatgtaataaggttataccccaagaatggtcctccgctggagtttgaggcagtattgcctccgttggtgttgacgggagtctccttctccttgtctccagtgttcgacatgttggtgaagatgaagtagatgttgacgaacagtgagtagtcgcgccttgcgctccccaaaaacctgatcgcccgcccgtctgtgcaaacgtcgcagcaacgcgtggtttcagaggcctactctcccaacgcgtgtgcacacactcgtcgggatgggatttccgtagcagcaacagcttttgaaaatggatgaaagtgtgtcttcttcttttagcgggagatcaaatccattctcattttataagaggaatggaagatgaagagtaagagtcatgcaataggaagaggaatggagcaactaattgtcatcaactagccatgaaccatcctccactacgcaaccatcaaccgacaatcaattaagagtaattgatgtaagttaccaatggaataggaagaggaatagagcaactaattgtcatcaactagccatgaaccatcctccactacacaaccatcaaccatccatcaattaggactaattgatataagttaccaattccttaatcaaatggattaattctcaaaactcttcatcccattgatatcccatagaagaatgaattcacatgaattcctagcataatgagccttggaatttatttgatttaattgatttaaatggattaattacccaattaaatctaacaaattttacatagaacattagttaaggacacattatattttgggcgggatagagcaagtataatctctattattttggtaaaaatatatgatatgggtgataaaagaaagattgggagcctcgattattttacattaattacgttagaccaacaaaaacgtgcatacttacagctgcaatttcatttttctatgtaaaatttatactttcggaaattaagataactgattaatattctatttccggactgtcatgcacttcggtttctttttgactttagatatggccgtgccttcgctttcaactgaatgtataattttcttgctaaaggtcaacccttccgaaagtaggataaaaaattatcagcgtatatattaacaaagtcagatacaagagttcgacgttcaactgactaagaaaacaatcttctgccaagttttccctataatttgccttttccgcattttctcgcgcagattatatcttcgtttgaccttacgaacccgatttgttccaaacagttatatgtacgtatcaattttcgatgaaacttatgaagcatatatatatatatatatatatatatatatatatatatatactagtatggtccaaattaagaaagatgaactactgttcagacacctttctgtgaacattgtttgtttatatactataaaggctgtgaggtttagaatctctacctaattaaccagcttccagatggatatattttgtactttccacggaccaaacttttgaccgtcgattttaccaactacctccactgaaactgaagatggctgtgaaactgaagaaacaggaagccaatgaggggagagagagagagagaaatgtccaggggtttttcggctagctccacaaggtggtgggctagacgacctgggttcaaagcctcaccccttctaattatttgatattagatccttccctaatattcgagttttaacgaggggagagaggggacaacaatggaaactctttcaatcacccaatcacccaggaaaacatccacccttttattgtaaatatatcatctaaatctctactattataaaaattgaagatgtttttaccggtgttttggtaggcgatccgtatacgagaaggttttaagttcgtttgcttttggaaatacagatccgtatttgagttgggttttaaatccgttcgcttttggaaatatagaaggagccgtatcagaaatctctttaaaaaaattgcatactaacttgacatgattttctggaaaaatatatatccaagcgaattctcacagtgaacaataataataagattaaaacagccttcacccattgcaacgcacaggtattttttctaatagttataaaaagaaaaaaataacagtaagatggagcaatatgtaatatatcactccgcaaagatgtagcttaaaattcaacttgtataaattgtaacaaaaataataaataaactcaaattattatacttatatttacagctaaatttatcatttttgttataacttgtacaagttgaatttaaactttcatgtttgtgaagtattatattacatatttatcgatcatgttaatattttttaagaaaatttataaccatttaattaacatataataaacggatgaacatcgacgtgattagaaccatcttggggataacaggacgaggagacgccgtcttgtcagcaattcgagtcggctcaagtcactcaacagtcaacacattcgagcacaaattggacgaacacctagtcggctatgcgaggaaacaaagcaagaacaaagacatggtttgtgctgccgaacacatcgcagcttgctccgtgccgaacagagacataggcgtgtgaaacaaacacataaacacggcggttaagccactctaataatcgtgcgccatgaccgtccattgtccgcacggaccgcacaatcacaacacgcacgtatgaaaaaacaggaaaacatgaaaaagttgaatttgttgagattataggcatataatgatttaatctattccataaataaatcatgacattacagacgaaaactagcatgaacgcatcattagatctacacatgtaaattacacagtataacataaacagatcaaatatgtacaacatattgaacacgtaccgaggtgggggaaagaccggctgctcggacgaaacttttcgcaggcgtctacgaaggcacgcaacacgcgaacgaagaggaagacgagccgacgcggacgaacagggagcagtcgcgcaaagcacttcccaaaaaccttattgccaccttctcccggtgcaggagtcgaaggcagagattccggagacctgctctcccgatcgcaggtgcacgagcgacggtgcagcacagagtaggaggcaaaccctagattgatttcgcgtgtgttgcgtaaagatggcgggtcggtttatatagagaagggtcgcttgatcagggcgcccgtacgatctccactgcgcgtaaccttaccggataagtcgcgtgtaacttatccagactccacgccctgcgcaaggtgaggaaccaattttggtggaccattcgacgcgtacgtcgtgcacgcgcgccgcctgccctgccctgccctgccttgccaggtgaggcgagcgagcgcgcgtgtgttccccctcttctctccaccacacatgcttcaagtggctaggagggtatcctcccttttaaggaggtccccctctcctagaataagcaaggtggtactaaactccacatgcatgctatcctatgaggtgggcttttgtgattttccagagaattaatcttcgagtgggctaaggcccattcattaattccagcaatcccccaccaaatctcaaaacccactgagatttgccttttccaatgtactgtttatataccagcgattcgatggagaccgattaaggttgaacatccacctagaactccaagctacacttactcacaacttgaacaatagactatgccttgaattgcaagtcttgtgtaagcaagtttcactcagagtcttatctggtactaaaccgtctgtagactacccctcgggtggagcatataagtcatactcctaggtctatagtaagcttcctagaagattcacccaaaatctccatagactgcgaccaacaatcaagctcacaaaggtgagttctttgaagaatactctgcaggacaacatcttcgctaattaaagccaacagaactcattaaggcatagccaacctgccttgtagctcacgagagtacatgcatcttcacttagagagggtatagattggtactctcctctagtttattaatggtttgttcttcccagattctaattcacgggatcttcgatcacatagactgggttaccacgatagtataactcacatgggtctcaaacccatctccttcgatgcattgtctatcacatttcgtgatagtcccttcgtgaaaggatctgccaggtttctagctgtttggatgtaatccaacgttataactctagagtttcttaatttcctgacagacttcaatcgtcttttcacatgtctagacgatttcatattatccttagaactattcactttgacaattaccatttgattgtcacagttcataaggatagccggcaccgatttttcaacaataggcagatccattaatagatcatgcagccattctgcctcaacagtagcagtatccagtgccatcagctctgcttccatggttgacctcgtcaaaatggtctgtttgcaagacctccattaaacagcaccgccacccagtgtgaagacatatccactagtggctttgatctcatccacatcagagatccagttagaatcactataaccctccagtaccgcaggatacccagtatagtgaagccccaattccacagtacctttcagatagcgcattactcgctcaagcacacgccagtgatcatctcccggattagaggtaaatcggttcaacttgctcacagcaaaggagatatcaggcctagttgcactagccaggtacatcaacgagataatgatttgggagtattccagttgattcctagcaattctcttgttcttgcgaagcaacaagctaggatcatcaggtgttggagaaggcttactatcaatatagccaaagcgattcaagatcttctccacataatgggactgcaagagtgtaatcccattctcacctctaattagcttaatgtttaagataatatcagctactcccaaatccttcatatcaaaattttgagacaagaatgatttaacctcatttatcacctcaagatttgtctcaaatatcagtatgtcatcaacatacaagcataaaataactccctcacccccaccatggcgatagtacacacatttatctgcctcattgactgcgaagcctgcagatgtcaatgttttgtcaaatttctcatgccattgcttagaagcttgtttcagaccatacaaagacttcaacaatttgcacaccttgccttcttgaccttcaactacaaacccatcaggctgatccatatagatctcctcatccagctctccattcagaaaagttgtcttaacgtccatttgatgaacgagaagaccatgtgaggctgctagggaaagtagcacacgaattgtggtcaatctagcaacaggtgagtaagtgtcaaagaaatctccgccttctttctgagtatagcccttagcaataagccgagccttgtacttttcaatagtaccgtcaggcctaagcttctttttgaacacccacttgcatcccataggtttacacccatagggtcgctctgtcacctcccaagtcccgttagcgataatggaatccatttcactacggacagtctccttccagtagtcagcatcaggagatgcatatgcttctgaaattgacttaggagtgtcatccacgaggtacaaagtaaaatccttaccaaaagacttagccgtcctttgtctcttactccttcgtggagctgcactgtcatcctcctcagtgacatgttcatgtgtatgttcagtttgttctggtggtgtgattgaactgggaattatttcagatgattggctcgaactactatgtgtatccttcattgggaaaaagctttcaaagaaggtagcatcacgagactccataattgtaccaacatgcatgtcaggttcctcagatttaactattaaaaatctataggcaatgctgtgataagcatatcccagaatgacacagtccatagtcttaggtccaagtttgcgcttcttcgttattggtacattgactttcgccaagcaccccatgtgcgcaagtaagaaagtgatggttttctcccaatccatatctcatatggtgttttgtccttatttctgttaggaactctgtttaacacatgattcaaggtcaacaatgcctccccccaccatgccttaggtagtcccgcagtgtccaacatggcattcaccaagtcagtcagtgtgcggttctttctttcagcaatcccattagactcgggagaatagggaggcatcctctcatgtatgatgccatgttcctcacagaataagtcaaactcgtttgagaaaaactctccaccacgatcagacctaagtctttttatctttctgtcaagttgattttcaacttctgccttataaattttaaaatagtctagagcgtcgtctttcgttttcaacaagtacacatagcaaaatctagtagcatcatcaatcaaagtcatgaaatatcgttttccaccctttgtcaacaccccattcatttcacaaagatctgaatgtaggagttctagtggtgccaagtttctttcctcggcagccttgtgaggcttgcgaggttacttcgattgcacacaactatggcacttagaacctttgacaatggaaaacttaggaattaaacacatgctggaaagccgagacatcaagccaaaattaatatgacataaacgtgagtgctaaacattagcctcatcatccacactgccacaaatatggttcacagacttattgcagaaatcagaaaggaaaagcggaacaggcctccgcactcataacctttaccaataaaatatccatgtttagacacgactactttattagactcaaaaaacaacttaaatccgtctctagtcagacgggagccactaacaagatttctgtcgatagaagagacatgctgcacgttcttcagctgcacgatctttcccgaagtaaacttcagatctaccgtgccaacaccatgaacagaagcatgtgacccattccccattaggacggtggaaccccgtgcgacctgataagaagaaaacaatgagatgtcagcacaaacatgtacattggccctagtatcaacccaccaattagtagactgattaactgaaaaaacagtaggtaaattaccacacccgcttccatctctagtgttgccaatggtcacattagcagacttagatgtctgccctgcaggtgtcttcatccccttgcgctgtggacacttactagccagatgaccaagttggccacacacaaagcaagtccattcatcctgattaggattgttgttgttcttcttctgcttcttgaagttggtggtctgctgagctttgtatttccccttgctcttgttctgggccttgtgcacaacattggcactggactgcccaccatcgcccttagacgcggcatctttttcctgagctttctcctcaacatcaagagacgctatcaacccctcaacggagtattcctgtctcttgtgtttgagtgcagtaccgaaacttctccaagatggacttagtttcgcaataatgcacccggccacaaatttgtcgggtaagacacacttaaggagttcaagttccttagccatggtttgtatctcatgagcctgttcgactatagaacggttatcagccatcttgtagtcatgaaactgctccatgatatacagatcattgctagcatcagtagcaccgaatttagtattcagtgcatcccacaactccttagcgtcggtcatatgcatatacacctcgaccagacgatcgccaagaacgctaagaatgcatcccacaaagagagtagtggcttcctcgaattgcttctgctattctgcagtaagaactccttcaggtttgccagtactcacccagaagcatttcatagctgtcagccatagagtgaccctgatctgccatctcttaaaatgcacaccggtgaatttatccggcctcagtgcattggcaaaaccagccatagtaaaatcaaagtttttggattgttgagattataggcatataatgatttaatctatttcataaatgaatcatgacattacagacgaaaactagcacgaacgcatcattagatctacacatgtaaactacacagtataacatgaacagatcaaatatgcgcaacatattgaatacgtaccgaggtggcggaaagaccagctgctcggtcgagacgtttcgcaggcgtctacgaaggcacgcagcacgcgagcgaagaggaagataagccgtcgcggacgaacagggagcagtcgcgcaaagcgcttcccaaaaaccttattgccaccttctcccggtgcaggacgtcgaaggcagaggttccggagacctactctcctgatcgcaggtgcacgccggcgagcgggatggagtaatctacgagcgacagcgcagcacagagtaggaggcatactctagattgattttgcgtgtgttgcgtgaagacggcgggtcggtttatatagagaagggttgcttgatcagggcgcccgcacgatctccactgcgcgtaaccgtaccggataagtcgcgcgtaacttatccggactgcacgccgtttgcacgcaccggattttggcggaccattcgacgcgtacgtcgtgcacgcgcgccgcctgccctgccctgccctgccaggagagcgagcgcgcacgtgtgttccccctcttctctccaccacacatgcttcaagtggctaggagggcatcctcccttttaaggaggtccccctctcctagaataagcaaggtggtactaaaatccacatgcatgccatcccatgaggtgggcttttgtgattttccaaagaattaatcttcgagtgggctaaggcccattcattaattccaacagaattaacccctcgttttttatacacccttcctcccaaaatataaggcacaaccacttttctctcatgtctcataaatataatgcatgtatacattaactagcacctcttaatcctataaaattgatttattttaaatcctataccatcaaacctcccaatcatattgtttgcacgagtcaaggtgatccaaccaagaaggcgattaaacattttcttggttttttattacgagtggttgagccttctacaataatattgtaggatagagagagtatatctatatgtctactatcataaaaattgaaaattatttcgtcaaaattttggtatgtcatctatagaaattggtttttatatgtttataagggcatctctagtgtgagttcaactgtaccatccatttttagatgatggaaataggttacatctccggcctctgcccgtaggcacacagccaaaaagtccagaagtgaacagaaaagagcttaaaaaaaaggcgagatgggacaaacccactacttctgccaataatatgatctagtaaaataatgtttttaaaatcacgtagattctatcacaaaattctgtaggtactacgccatccaaacaggaataaaagttccttggctaccaattccaagcatagtatcctgttgttcctgtgaaagcatcatacattaagagtagagccaatttgaacacataaagataacctgcatgatgttaggcatttttttatgattaaaaactatatcattacggcaacgccaaattgaccaacatagagcactagctccaaataagattattttttgtctaggcactccccttagccatttaccaaaaataacgttgtggggaggggaatattgaaggcaaagaagacacattgccaagtaaaacgtgcaacatgacagtcaaagaaaagatgttggatggtctcttgtatattaaaaaacaacattgctggtttaccctacattttctctttatgaggttatcttttggtaagatcatttttttaagaaaccacataaatactttgatttttaactgtatcatccataaaagcgaatttcacttctactcggtgcatgcagtgtttaaagtcgatctgcaggacctatgtataaaatttaaaaatgggcaaagatcgacttcagccgagacgtcgattttcattctgacaaataacaaccgactctcacaacgtgcatggttcagttttttttgttgcaagtgtcgatttatcatcacgctggagttgctctaagtcgtctgtatctaattcaacatgagtctagaataactatcatggatccttctcctagcccagcccaacggaccaacaccttccaatgcgcctccactccgcgctgcacgcgctcctcccctgatcgacgtctttttttctttcccttgttttgttttctttttcttcttttcttttctcacagccatactgatcccttctaatctcctctcttttctctttttcctttttttttctcttccaaatttatctcatcaaaaatatcttccttttgaaattattattgtttaaggtgtatatgagacaagtttgttatttgcaattgctttccatttacagtaaaaaaattcactaactgaataatcaaaatttcaatctttggtcaacttatggaattgtcacagaatcgatttgtgaagctatggaaaggtatacataaaaatcatgtgatgatgcatgaagtgaacgcaactggattcaatgctatatatgatttctgactttgttttgccattgttttgttttgttttgtttcaatttgtcgtttaaattgacagagttttatcaatcgtgaaaattgtcttcacctgttgcaacacacacctatttttctagtcacctaaaagtcataaaaaacttgtaaaaaattggtaggacaaattacgtgatacatcactacaaaaatatataagtgcaaattcaacttatataaaaaaatatgcacatctctatggatttgtatgacaaccaccattgtccacgccatatttcataaagaagaggttttccattaccattcttttcttacaacaaaataacttttaattatatatacttgagtgaaggcaaaactagcgcacaaaaaatcatcaatataatggaaatagaagcatgattcaaggactcaaccgaaagttttagttgtttacatgagtgtgtaaattaaattttcttttagatttttaaacccaacacaagttttaattatttagcaaccaaaagcaaatctttaactggttaatcaaatctactaaaaatggcattgccatttagaacttggattatctactgcctgctttgataccatcgtatcaattgtagtgccgagtgctagggcgctacccaacataaaaatccggacagagccttctagtatatatgggatccattagtgactgtctacatgaattttaagcacattagccataagcaggaaattaatgagtgtgtccgcttattgtgagtgccgacgtttgtaatgtgtttaaaaaacggtttggctatttatattgagggtacagagagggctgaaatttctgaaattttagatattttgtttagggaaggcactgtaggggaagcccccacagttaaatagctttattatagaaaataaattacaaaagatataacaaattcaaaagggactgtctctcagaaacatttaatctaaaaactaaaagggaaagatcactcttaaagagagctttccaagaagaaattgagggtgctaaattctggaaaatcagggagttcctctgttaccaaatattccaggctgcataaagaatttgtagcgaggtggtgtggcctttgtgcttgcaagctggaggtaccaaattttagatatttcagtacgaaataatttgaaatgttttaaaaaatggtcgaatttgattttatttaataaattcaaaaaaatttgaaaaaatcctcaaattttgggcaaaatagtttactatcgattttggaaattccactccaaaatattgaaccttgccttttgaatgaatgaatgacccctggaggggcaaaaatacaccttcgattaatgatattgctttagagtttcttaagtgtggttttaattttgatatctcctcattcttttcatctcatctaaatagtcactaaaaagttataaaaaaagttaacaacatagaatatgagatataccatgacacaaacatataagtttaaattcgaattttgatatattaaaaaataacaaattaagctattatatgtactttttaaaatttttcttaggacttgtaaaaagtaaattttgacttatatgtttgtgcagtgatatatcttatattaatatatctttttatttttttaaataatatatatgattatttatgtgacataaatatagaggatatgtcttcttgatagcaacactttttttttcaattgtagcattttggagcaggcaattggcccaaccattaaagaaaaactagatgatgccacgctctttaatgtgggatatttcgataaatatatgttaaatgatggatgaatttgcgaaacgattacaaatcaggcacctgattttttcccaaaaatcgggcgctatttcatgatctttttatgaaaatgtttcaatacttgaaaaaaatgtgtcagcatttgaaatgatgaaacataaccaaatcattcttgaaacattgggctaaaacatatgaaacattgatttcgaaccattgaaacattaaaaaacccatgtgcatcaaagatgaaaatatgaaacactatcaaaatatccactgcaatatttaatccaaacaaaaagaaacatcacaagtgcaatagctgaaacacacaaaaaaaaatatacccggtctgtactacatcttcctcccctcttgctaaaacaggcttgctgagggccaccggttttgtgctctcctccgatcttcgctggagatacacgccgagacgctacaacacactcctgctacgctgaggtgagcaaccgccgcttccctatcgctgctgctactgggaactcggtatgccatcattgtcgcttgggcaaaacggaatccacgccaccaccagatcctcacagggttcgtcatcttcctcccagctcctggcctagctagagctatgctgatgtgcaccggcacgccactgcaaccgcgaggaaccctctccggccacgacaaccatggcctggccgctgccatggagcccatgcagtgatgcttggtcatcatgagctcgtacatgtgagagataaaaggtggctgagaaggaagcgattacgtggcgatatggaataggtggctgagcaggcgcctgatgtttagttagccatcaggcgcccaagcctaatcgttttcgatgaatttagatcgtgaaaatgatgagaaatgatgatttagcatgtttatatgttgagctttaaaatgtaataatttgtagatgatagacgtaattaaagttaagtttttgtatgtactatggtggtgtttgaatctcttgaagatgaagatgaagattaagtgtttcacgcaaaacgatatggtaataatgtgtgattaattgagttttaattattacaaacttgaaaaatggattaatctgatattttagaacaacttttatatagaaagttttcgcaccaaacacaccatttagcagtttgaaaaacgtgccattttaatccaaaatttaatccactcttttaagtggattcaaacagggcctatacatgttgatcttttagtgcttagtgggttgatgtgacctacttgcatgttactaattataattgctatgcttacatattgtgttttacatgtttagtaggttgtaacttcgtagaaatgtataaattcacacatcaacaatcatatgctcaagcagatcaatatatttcacaaggacaggggtaaataaattaaaacttcacatagattgctccaactttaggatgatttcagcgcaattcctaattcgcgcatatgcgcccgctgcgtccacttccagcccacatgacccatgcggcaccgcagaagcttggcactagtttctttcttttttttcatgaaatcaggcgctagtttttttttgggaaatcgcttctttttttctctccacactcgtgcgtgttttgcgatattttataaattcaatatttcaccttcaataatatccattgagagttttgaatttgagttgaaagtttcttaaattaaagttgaatgttttgaattttgcgatgaaagttttcaaatttaaattgagttttttgaatttcgaagtgggagtttttaaatttgagttaaaagtttttcaaacgtgagttaagttttcaaattttgagttaaatgttttcaaatccaagttgaatgtttttcaagtctgaattgaaagttttcgaatccaagttgaaagtttttaaatccaaattaaaagtttttaaatcttgacttgaaagttttcaaatttaagttaacaatttcaaaaaatcttaacttaaaatttcaaacctttgttgaaagtttattgcagctaaacgtccatacttgttccaatttttcgcgtgctaaaaaaataactgatcagagtaattaacactaatgatagtaattagtgggatccgatccactaatcaggaggacgtggggagggggtcgcccattaggaaccccctgattttagacaaatgaggggacatctcctcgagatatcagattcccctccaaaatttacaagaacacggccttcgctgacctgctcatcatccaccttttaattttccttttcttacgcatctgcatcccaattctacccctcgtcagcacgacgcacacgcattggagcactagtgcgttcctcagcagcagcctggccactgtcgcctgcccgtcatcaccctcgtagtgcaccaggttgatctccttcacccgacgccgcaggcaccggatcgccgagaagctcgcgataccaggggagctgtcttcttcgctgtcgtcgccatcttcttcgctgtggctgttgtaaccgatgttgctgccgtagtcatcaccgtcggtgtcgtcgtcgtcgtcgtcgctgtggctgatgtagccactgtcactgctgccgtcgctctcgctctcactatcacagttcgtcggattacatttttctggtttcaagaacagggtgagagactccaggtttggggtcatctccaggatcctcctcatggcgatggctacgccgcaatctgggacgtgcccggtgagttccagccgtcggaggttcgtgaacgtccggaagccggcggccgggaagaggtcactatcgatgcacgaaccgagacgatcaaacttgaggtggaggtgcgtcgagcctgcaaacatcgcgagaaatctttttgcatactgtcgaattcctcctccgaggtgatgagttcctcgctgcagaaatccacagtgcaggaggttattgccagtgagccgtgcatcgaaagagtatacgacggatcgtccgacacggcgcccctgtacgcaattgttgtgagctccgacgcgtcgatggcgacgttgtcgacgttgtggcagcaccggagggcgaagctgcggaggcgcttgtcaagtagggagagggtcttcagctggcggagggcttcgagcgtcaggtcggcgaggcgcgggcagctcgagatcaaccgttggattctgctcctggagccgtggatgccagtcaagcgcattgtcttcaacaacgacaggtcgatggattccagcaggttcaggtcgcagtagcttaggcacagggtctgcaaggcgacgcaggagtagagcgaccgtggaagctcataatggcgcccagggaaaacagggggctcgctgtcgacgatggtggagagtctgtccctttcgccgccggcgcagatcgggccgatccagaagcgcaggtcgaggtggagctcctgcgagctatggcacacgacataggtgacccacgcgtcgacgatgaccctgtcccagacgtggtagctgtcgcaggcgaagtggaagctgcgcagcggcacgtggcggccggcgcagcggcggcggcagaggagcgcggcgttcatccggtcgaggagcttccagctcatgctcttcttctcctcggcttggaagtacatggttatccaatcgtcctccctctcgccctcctcctcctcgaaggagatggtgtggacgtagccgaagatgtatcgccaccggcgggacagtacggcggtgcgggcggccaggttgttggggaggaaggagagaatgtggccgagcaggtcgtcggggagctcactgatccgatcttctccgtccccgccgccggcgatgcgcctcttcttgctttgagaagccatcggtcgtcggctcgtcggttgtggccctaggttcgtgtcgaaacaagatttcggcaataataaaagggggtggctatcaagctaggaaagtggatggatttggagacaaggaattttatacaggttcaggccttcttattcaagaagtaataccctactcctgtccggggatgattccgccgagtgtgttattgatcgtatgatctgggaaaaaagaaattgtcccgagaggaacccggacccctccttatataggggaagagatccgtattacaaaatacagtccatatccctaaaggaatatgtgattacagataaaatacaatcttaaccgactaagatctcgggtatttccttgacatacaagttagaaactaacccgagttctcataaatatattctatctatatttggtaccgtatatccgactaaattataactgtcatgtagatatggggtatccataatctccacagtagcccccgagaccttcgcagttgacaaaatagccttctcgaaacaaaaaacagtaatccgagtgcttcaattcaacttgctccagcttgccgagtgctaaaatcaaagactgtgaagggcgaaaataaaacatggtgcatcgagtagatgcacctaattaggtgtagccccccgactatgtgattagttgaaacactaaacatgtagccaagaaccgagtggttttatagcgaagtatgcatggtactcagtaaaatacccagccgactacttctcaacttgaacatatcaaggataaaaaatacgaaaagggccgagtgataaacactcaaaaggtctaaaaatagacatatttgataggaatccgagtaagaaactcttaaaatgatccaccaaacatgataaaaatcatagtaatcaacgagtctaatagcctaagctatgactctcaccataaccaaattaagcatataacatgctaagagaatgactcttaataaattagtcatctccaatcaacccaaacagcttttgcagcctaataaggcttacaaaaatagtataacaccttcctgtcaggcaccttttgtttgcatcgtgttaattccaaagaattatcaaaccacattaaaaaggattttaacagcattagtccacatcattgtgagcacaaattgccaaagcaaaaagcgcctaagtccctagagatcacaacgggccacgctgaaaataaaattgggctaaagtactgtgtttaggctaataacaccgaagtgaaataaaacgtctcttcgtcttccccgccgagactctcgccattttccccatttcctgctatagtacaaaactgcgccggcaattcatcaatccgctccaatccatcctcaaaaacttcacgaaatttcaccccgcgtccaccgcttcaattccccatccctttccagccatatctcggatcaaattaaaccattcagttcacattcatggcggaagaaagagaaagcttcgagagtcagtgggcgccctccgatgtgacggaaggtaatctgaaggagatggtggcgcacggcgttcttccggcgaaggagattatcgggtggcgaccggcattcggcgaagcattcccgacccccgatacgcatgaagtcgtggtatttgctgatttcttctatggcggtttctcccttccaacctcaagattttttcggggaattctgaatttctatggaatcagcctgcatcatctgaacccgaactccatagttcacatcgccaattttattcatgcctgcgaagcttttctgggcattaggcctcatttcaccttgttccgccgaatcttcttcctcaagccctagccaaacaagagcaaaccatgcgttgttgggggcactggtttccaactcaggggaacactaagccaaaaatacttctccatgcccttcaagacctcaaacaaaggctggcacgccaactggttctacgttcaaaatcctgaacctgcccttcccgagtactcttgtctccctccggtctaccaagacacatggaattcattgcctataggagatgaggctgctcaagcagtggaactgatggagcgcatgataaagctgaaggagcagggtttgcagggagaacaaatcactcggcacttcattaaaagccggttagctccaatcaaagagagatcccgcacagcttttgagtttgacggcaaacatgatccaaatcgtgcagatccagactctcttgactttaaggtcatgaagaaaaggatgtacaagatcttctcaaatgctatcgtcgtcagttattcgcacttgctgccagtcgtgccattcaatgccttcaatcctcctccaccggtatgtaatcaaacacttaaacctttcacaaaatatggtcttgtctttttattgaatcagttaacaatgaaggatattacgcccaggaatttgctttgatgaagttggatcccccaatcactcaacgccgatcaccccaccaccaaaccggtcaagggagcgggggtcccaaaatccgttccgaagcccggccaaatacctctaatccagccggccagccagattcacgcaaaaggaagttggtgtcgagtgacgatgaaggcgataccgctagaaagcctggagaccgagaaacaaccaagaaactgccgaagcaggctactacaaggaaaaaagcatccagtcgtccagtgccaaagatcaggaagtcttccaggtacaaaccacataacgatcttccttgcattgatgtgtacccagtgtagtaataatactgataaccaaacttgtaggaaaccgtctgatatagacccttctggaaaagactctaacccaaccagcacgggaacaaacttaaaagaaaccgagccaaccgctgaggatcatccgagtgataaccagccagcaaccgataatgtaggatctggtgatcaacccccaaccggaaacgagtcggccgaaactggagccggggttaatcaggagcccccgactaaaaaccaggcactgggccaagtcaagagattccagaagttggagctcaggcagacagccctcgtaaagaagacaccagcagtgacccaacgccaggatctcccgttaagacgcaagaatcgactcatccccgtccggaaatcatcacgggtaaacaccttgcccgaaaccgtgttgatccaaatgactctaaccaatcgtctaccctttatacgtggatacattaggaccaatgattggtgatgaagaagaaattccccgtatacaggcggctgaagactcacgccctcccatcctagttaagtggtgggacgatgatatgcaacctcaaggaatcgtgataagcaagcagaaagaagatgaagaagtatgcttgttgaaaaaggcactcagccaggccactcgtattgtaaatgtaagtccatttgtgcatagttttaattgtcccctttcatatcttgctgaaacgccgataaattcatattgcagagaattcatcttagaaatgaggcgaaaaccacaactttggagaaattagttccccatcttggaacccttgaagctactaaaaaccagctacatgaggtcaaagagctcgcgagaaaaactgagcatgatctaaggaatagaatctccgagcttcaagaatccaactatgaattgaatggttcgtccaaaggtaaataccatatctgtctgacgtattcgcgaagccttccttgtcatatcaattaaccgaaaagcattacagtacaagctgccaggatttccgacctagagaagcaggtcgaggccctggagaaggacaaggccgaattagcaaagcagagggactcgaccttaaaagatgttgaaggtaatgataattgattccccatgttcttatagccgctcgctgatatgaatctattgatgaagatcgcaaaatcaagtcccaggcacagtttgatgtcttagttgacaagatcaataggcttgaaggggccagggataaagtcgctaatgccgctaccccactcatccaagccatgttcttcaataacaccggtccaagtgcacttgacacttccgagatctttgacaagctaagagtcgctccagatacttacttcaagaatatcagggaggctgggagtatgggagcaagcctggtgttggcgatgaccaagtccttgtacccgaagattgatattgacgccattgacggctttgcagacgggacaagtgaagaaacagccctcgacctcatcaatgatgcgcaaaaagccgctgacaagattgctgctgacgtagttgagagattccaagatgtcgaccttcggccgactgggtctgataattccgatgatgaaagaactgacactgattagtaacagtgattctgattatgatggaagatcaatttgtacaatactgatgaatttatgctgtgctagacatttctaacttagcctctaatttcttaaaagtttttgtcaaaccttattgagcctaaaactcacaaaagttattaaaaaactttcagtcctgattgactaagccaaaaaatcaagcagggcaatgataaatcaagtaagcaaattgaattgataaaaatcatgttccattattattatagtagcccccgactgataactcaagaaaaggcttgatgttagcagtcaaagagaaaaatacagaagtaatgtctaagcataaaaatgatgaagatgttcaatattccaagaattgttgataagagtaccatcttcgcgcttgagtcgataagaacctggccgagtgacttcagcaattatgaacggtccttcccacaagggagataatttatgccgatcctgtgtggtttgaattttcctcagaaccagatcgccgactaaaaaggctcgtgatcgaacattgcgattatgataacggcacaacccttgtaagtaccgagctgactggattagggcggcttcgcgggcttcttccagtcggttgatatcgtccgcttgatcttcctcatagcgctcctcccggaagttgcgaaatcgaagggattcaaactctaccttacttggcaacattgcttctgcgccataaaccaagaagaacggcgactggccggtagcccaactgggagtagtgcgcaaagaccaaagtatggacggcagctgttctacccacatgccagcatagggacgcagtcggtcgaaaactcgtgctttgatcccttgaagtaccacgccattagcgcgctcaacttgtccgttactcatggggtgtgccacggaggcgtaacaaattttaatgccaaaatcttcacaaaagtctttaaatactccgccagtgaattgagtgtcattatcagtgatgatacgatttggtactccaaaccgatgtacaatattgatgaagaaatctttagctttttctgcggtgattgtaatgaccagtttagcttcaatccacttggaaaatttatccacagctacaaagagatgagtataaccaccgaccgcctttttgaatgggccgaccatatcaagcccccaaactgcgaacggccaagacaacgggatggtttgcagctcctgagctggtaaatgagtttgtcgggcaaagaattgacaaccctcacatgttcgcacaattttgtcggcgtcggagacagctgtgggccagaaaaaaccctaccgataagccttgccgacaatggttcgtgcggcagcgtgattaccacagatgcctgaatgaatatcttttagcaattgtcttccctcttccaaagatacgcagcgctgcagaattcctgatggacttttcttgtacaactcggtctcgtgaatgacatagagtctgctgcgcctggaaatctgctcggcttcatttttgtcttgagggagttcttgtttggtcaaaaatcttatgagaggttctctccagtcggcttcaatcatgcttacgccttgagtatccatggtttcaattgtttcttttctgggcacggttggttcgtaaagatgttcgacgaacacatctgaaggagctgcttcccgttttgaaccaaaattggccagtctgtctgctgcctcattattatgtcagaggacattggtgagctcgagtccatcgaatttatcttccaacttgcgtacctcttgtcgataagcggtcatattatcatctagacaagaccactctttcatgacttgattaacaaccaactgagagtctccacggacgattaatcggcgaatgcctagagagatggcaatccttaatccatggagcagcgcctcgtattccgccatgttatgggacgcagaaaaatgtatccacaatacgtagctcaatctttctccagtcggggaaattaaaacaaccccagctccagtgcctgtaagcctcctcgacccatcaaaatgcatagtccaatattccatctttttctctggcatgtcttcttggcactcgttccactcggcgaggaaatcagctaaagcttgtgacttgatcgaagttcgtggcttgaaagatatgtccaaagacatcaattctaaggcccactttgcaatccgtccgtttgcttcgcggttatgaagtatatccccgagtagaaacgatgtgaccaccatgaccgagtgactttgaaagtagtgagataatttcctgacggtaattaagacaccatatagtaacttttgaacctgaggatatattgtcttggagtcggccaaaacctcgctaacgaaataaattggtcgttaaactttttgaatatggccttcctcttcacgctcgacaaccaggaccgtgctcacaacctgggaggtcgctgacacatataacagtagcggctcttgcggatgtggcgaggccaaaactggtggagtagtgagaagtttcttaaagtcttctaaggctttttgtgcttcgggtccccactggaaattgtcggttttcttcagcagcttgaaaaagggcatcccccgctcgccgagtcgtgagacgaaccggctgagcgccgccatgcaaccaatcagcttttggacgtctttctgggagcttggcggtttcatgttgaggatggcgttgattttctccgggttggcctgtatgcctctacgagacaccataaatccaagcagcttccctgacggtactccgaagatgcacttttcagggtttagtttcatcctgaaagcgcggatgctcgcaaaaatttcttctaagtccgcaatcagatcatccttctgcttggtcttgacgactacatcatcaacataagcttcaacattgcggccgatctgagttgaaaaacacctctgaatcatgcattggtaggttgctcctgcgttctttagtccaaagggcatggtgatgtagcagtaggccccaaaaggcgtaataaatgaggtcttcatgcagtcggattcttttagtcggatctgatgatatcccgagtagcagtccaaaaaactgagtagctcgcagccggccgttgagtcaactacctgctcaatgcgaggtaacccaaaaggatctttgggacaagacttgttgaggtcggtataatcgacacacatgcgccattgccccgtctttttccgaaccaggactgggttagccagccagtcgggatgaagaacttctttaatgaagcccgctgctaacagcttggttaattcctccttgatcgcatccttcctgtcctgtgcaaaatggcggagtcgttgcttgatgggtttggcgtcttccttaacatgtaaagagtgctcaatcacctctctaggaataccaggcatatcggatggtttccatgcaaagatatccttcctgtcctgggagatttgcgtccgaacttgtcgactaggtcctcgtggcgaatgcctttagtaaaggcggcgatgatgacatcgtcggttatgtcggagatcttgttgcgttgctcggagaagcatcggatgtaatctcgaagggattctccagacttctgaatgacgttgtagagatcaaactgtgtgtcggggcgttcaaaggtgccctggaagttggcgatgaagtgatcacgaagttctgcccatgatcatatcgtgccacggggtagtccatggagccaggatcgggcggaatctgctagggccacaggtagatagtttgccatggccttgctatctcctcctgctacacggattgcgagtccgtagacggtgagccaagactctggattagtggtgccgtcatacttcttgattccactcgacgcaggtcattagtgaaggcaactactccatccacgtcgtcgtcgtagcgatctggtgaatggcggtgacctcgtgctgcacggcgctggttgatcatgtcgcgaagatcgacgggacgctggcgaggtggagagcgaggctgttcaactcggcgttccctgtgacattcgggaggcgagtgaacagatcgttcgtcgtggcccctgctcctgcgactggatcctgtgccgatgatgctgaggcttggctgatgataatcatgagatcggagatggggaacccggctaccagtcggcatgcgaacgctgccggagttaaccagaactgaagcggcgatcatggtcttggtctggttcaagatgttgacgacgtgatcggcttgattgagtgcgtcttccttgaggagggtgtcgagaagggtgatcgcagcgacagcgttctgttggggggtgcggaagaccgctgtcccctcaacctctttttgcccgatgagttctctcgctcatcgcccggattccaaggcgcgttgccgtcgatcttcagcctcctttgcaatccgttcgcgatcttgttgctcacgctgtagtcgttctcgctcctgtcgttgtcgttcttcttccaatcggcgacgttcagtttcttgccgtgtgcgctcttcctccacttctcgggctcggcgctgttcctccgtttcgttgtcagccatgaatatgccgaaaaagagaggcgtgtagttatcttcgtagctgtcgtcgaagtcgtcgaagttgccgtggtcgtagtggtagccgaagtcgtcgtagtcgaggatctcggttggtcgtgaactgacgccaggggagctgaggtagccatccaattcttccgtcgagactgtcccaagaggttggagtataacgccaacctccctagagctagattggatcggggccgaagccggatctcgcctagatcgtcgggtggggagatgccttggtggtgaagacagcggccagatcatcaggaagtctcatcaggattaagggataggacccgtcttcttgatctggtcgcggaggagtagattggatctcgtccgagtggtttgaagccgacttgggagagatgatcttggagtaggcctcggcagagttcggaataccgaacagcgcggggacctggtctctccccgactggttcgaatccgagtcaaggagagagatcctgccgaggtcgttggtcatgaagttgaggctgccgaaccggaacgcctgcccgggagggaaggcgaaatcgtcgatgccggagacggaacccatcgcacttagtcggcaaaaacttgacgctgcccctacctggcgcgccaactgtcgaaacaagatttcggcaataataaaagggggtggctatcaagctaggaaagtggatgggtttggagacaaggaattttatacaggttcaggccttcttattcaagaagtaataccctactcctattcggggatgatcccgccgagtgtgttatttatcgtatgatctgggaaaaaagaaattgtcccgagaggaacccggacccctccttatataggggaagagatccgtattacaaaatacggtctatatccctaacggaatatgtgattacagataaaatacaatcgtaaccgactaagatctcaggtatttccttgacatacaagttagaaactaacccgagtcctcataaagatattctatctatatttggtaccgtatatccgactaaattataactgtcatgtagatatggggtatccataatctccacagttcgtgtgatatggcgtgttatgacgagcagaagggttttgtttgtatacccgaatccatagtggattacccttgtcgcgcgcggaaaagctagttaactttttgggagttaacgtagttagttacttagttaaggataatgacaaaattaagagaatacttccttttttttgagtttttttactaacaaattgaaaactttcaagttagatttgaaaatttttgacttaaaatttaaactttaaagtcaaattttgaaaactttcaactcaaactttgaaaatattcaactcaaaatttaaatttgtaagacattttgaaaattttcaactcaagatttgaaaactttcaacttgagatttgaaaacttttacctcagatttgaaaattttcaactcaagatttgaaaacttttgactccagatttaaaaactttcaacccaaagatttgaaaatacgtgggttgaagattaaaaaaaataaaaaaacgaaaaaagaaaaaatgacaaaaaaagaaaatcgcaaaaagaaaaaaaaacagcgctggaggtgctagctggcgtgcgcgacagcaacggaggtcacacgcaccaattagcaatccccgataacaatacgtatgttcggccgtttgttcagccttgccccgtccgggtaggaatatggctctgcttaatgctcatggctacttgat

SEQ ID NO: 28222 - DNA, 2682 bp, Oryza sativa
atcgtcgcctgcctatataactataggctttgatgacctcttcgaccttttcaggatccggaagttggacactggtcttctaaaatgctactccttgtaagtgcataccttctatacttgtgatatgactggactatatctcctaattaaattagttctaatacgtaaatattttaaggttgtgttggatcgagagtcgacgccatggtaatcaggttgggttccttgatccatccatggtgaatgaggttaatttacgacagagcttcactgaggtggttgactatgtcaaccggtgtttatgggcccatcaagacaaggagtacatcatgtgcgcacacaaccaagagtaagaggacaatacccttcgtgtatattgtttttgaagttaaggttcttagtactaacgctacataaccactgcgcaggcgacattggattctcctagtcatcgtacctaagtggagtagggttacctaccttaactccaataagtccaaagattatgatttcagtgaaatcaccaaggccttaaatatggcttggggtccatatgtggaaaagggtggtaggcacaaggagggcaagaatgaactttatcatgacaccaagtttgcatgcgcacaacagatcggagaccaatgtggtttccacgtgtgccacaacatgtcaacacttctaagagaggtgaaagatttcgaccctgaggttgttgctaatggcgaataagctcatttcaatatctacattgctattcaaaacgtgctaattaacctcttatttattaaacagaaaggtagagctggcttcaagatctcacccatcaacccccccgctatcagaggcgaattgtgcgcctttattcttgcagaaataatgaacaagaaaggacgttttcatgccaaatagactcatgaacttggctagataatttattgtgatgtaaaaaagatgtttttataatttctggcgatgtaaaaaattatgtttttatagagtgcaatgtaatttactttcatatgtgcaatatttatggtactttactaaattgtcatcacatttgatcaactacgatttatgttgtactattcatctgttttctcctttttttttcccttattgacaggttgtggaggttcacaacgaacagaatacaagaaattttggtaatcatttgaggactttcatggggtatgaattgtgtgctataataaattaaattgttgcatatgtgatgttgtaaattgttgctttgtgatggatctgtgatatgtgatgcatctgtgatgttgggcagttggggaatatgtgatatggagggggggtgactggcacctgtgatgtttctgtttttcagagggcatggctagcaattcctgaggctagccaatatttagcatttattttttttctggaattaactcatcagtgacggttcggaagaaacatccgtcacaggtaacttcacctgtgacggactcgcaaacgtcggaccgtcacaggtgacccacctggtaccggcttttactttcgggccggtcacagttgggtcaccctgtgacggctactatataccggagatcatcacctctgacgggcctttatttaggggctcgtcagagatgagacacctgtgacgggtcctaacaagccctagtctagcttagaccaacacctctgacggccttctattaacttgcccgtcagaggtggatgtcaccactgacggccggccacccgtcaaaggtgactggacttaccagtgaccactgatcactgaccaagcccaaaaccgtcaaaggtgagggtttgggcccgtcacaggtgaccttgaccagtgtagtgggaggcggcggcggcggccacgacgagcagccgcctcctcggcgcggagtcggacagaggcagcggcggcgggggacgcgtaagcggcggcgcgacgggcgggacggacgaacggcggcggtagcggcgaactacgcgagcccgcccccgctgctggcctcctccaggagctcaccgccgcgcgacgccttcacggcgagcgcctagacgaaccccaccatcgccagccgcctgttgatcggctccggcgccggcccgctgaacgccagcacgtcccacagccccgtgcttgccgccgacttcgccttgggcaccgccgccgcggggctcggagtcggggtcggggtcgacgatgtggtcgtctcctccttcgtcggctccacctccggctgtagatcgatcgaacgacgacgacgaagtcgccccaagttagcacacgaaacaaatcaccagaacacgcacagtgaaaccaatcaagaacgctcagctcacctcggcttgggccctagcgacgaacgcgacagcacgccggcgaggcgggaagccaaccgcggcgcggccggcgccgacgacaccacgccatggcgcgccaccagcggcggcagcggcgaaggaggagctcagcgccatggtagcagccgccattgttgctaataactcaaattacacagctgatgaactcaggcgagctagctagatcactcttttttctttttcttcttttgctgctgctgctgttgatgatgaggcgggtgacgagacgagtataaataggcgggggatcaaggaggaggtcacgagggcacgcggcgaggtggggagtggtggtggtggtgg

SEQ ID NO: 28223 - DNA, 16964 bp, Oryza sativa
ctccgtctccgtgtcccgcgccgccgcccacaccagcctccatccatcttcgcgccgaggggcggctgctcgtcatggcagtggccgccgccgcctcctcgtcccccgccgtcgtcgctgcgtcccccgcctgccgccgagtcgcgccgaccggcgagaaagcgagaggaagagtgtgagaggagagagaggagagagaggggagtatgacaggtgggtactatatttttttaataaataaaatgattactggactgccacgtgtacgccgcgtaggacaaaaccggtctgtattaggtcgaggggggtaatttgtccggtattaaaagttgagggtgaagaatgtctggttttccggatcagggggtaattcggacgaccgcgatagtttgggggtaattcgtactttttcctatatagaaatattttgctatttatcggtcatcagattttgatccaattcttttaaaaaataaaacggatagaaactatgcaaatatatcaccagtggatatatacagctaaatatcacaagtgcttagaccttggtttcacagaacatcaacaaaagaaaacgacaagaagaataaacattgattttttttctcgccgtgctatgctgccatataggtaatgatatttgctcccttgctatgcagcaacaaacagtttttttttttcagccggctaaaagttccactgcaattaaacgcatgtgaaaattatttttttcaggcagacacactaagcaaccctgatgtgtgaaaacctcttggatggaaaagcattggggttcggtgcttgctcatccgaacatactccaaactggtggtaagtcatgttgacaaatcttttgaggcaaaagaagaaggcatgaagaggaatctggaggctgttcgatctatggaaaagtgtttcgccggcataacggtcgaacatttacctagagaccggaatgaggaagcaggcgccctggcgaaatccgctgccagtggaggcccacattcgccaggcatattttttgaagttttgtacgcactaagtgtgcccacagagagcctggacatcatggcatttgaccaggcagaactgggcgaagacccagaggactggcgaacaccgttcgtgaagtacctcaagaatggtaagcagaagcaaagcgcctacagctcagagccacaagatcaagctgacttcggggcagttgtatcgctccggggtgctccaacccttgcttcgctgcatctcctttaccgaaggcgaggaaatagcgaaagaaatacaccaggggttgtgcggtgcgcatcaagccgcaagaacggttgcctccaaagtgtttcgctagggcgtatattggcccactgtgctgaaagtttgtgtggagcaagccaaggaatgcgaaagctgccagtggcatggccgaaaccagaaagcaccccagtacgagctgtaacctatcgcaccagtcaggcctttcgctagatgggggctggacatcattggccctttcccggtggcacgaaatgggtacaagtttgcaattgtagcaattgaatacttctcccattggatcgaagccgaatagctcggtacgatcactttggtagcagtacagaaatttgtatggaagaacattgtttgccgtttcggagtactgaaagaattcatcactgacaatggcaagcagttcgattctgacaagttcagagagatgtgcgaaggcctagacctgcaaatcaagtttgcttcggtcgcacacccacaatcgaacggggcggccgaatgagcaaattgcaagatccttgaggcgctcaagaagaggcttgaaggggcggcgaagggcaaatggctagacgaaatgttatctgttctctgggcctttcggacgacccccacaaggccaaccaagtttagctcgttcatgcttctttatagtgacgaagcaatgaccccaacagagctaggggctaactcatcaagggtaatgttctctggaggcgaagatgggcgcgaggtgtcgctcgaactcctcgaaggggtgagagtcgaagcactagaacacatgcacgaatacgccaagagcacttcggcaacttacaacaaaaaggttcgatcgacagagctgttgcctggccatctagtcctaaggaagaaggccaacctagtggcggttggaaagcttgaatcgaagtgggaagggccatacctcatcaagcataggtccaggactggctcttttcgcttggcgacgctggaaggcgaagagttcaaccactcctggaatgctgcttctcttaaccgtttctatgtctagaaggggtggcaccccattcgccatcttgtaaaaatgtacatactatcatataggcctttcggcatctcttattatgtaagcccttcggcacaaaaatacaaaaaaaaagaggaaaatgaaaaaaaaaactggatgtagggctattatccatcctggaggcccgaaccaatataaaatccttatgtctttcgccttttttacttgtgtgtgataattcgtggaaaaaccccaaggcaaacgtctgatcagcgaaagcgctagggggcaaaacgaatcggccgaaacatcgctcgccgaacgttgaaaccgcgacaacttgattcaggaaatgaataaccgagcaccgtcgtattcgatctatgtaaaaaacacgagcgtttctttaacgcggaatactacaggtcgaaaacggaagtcgaaagctgaaaagtcagcagacctatttcgctaatatacgcaagggggccgacatgtttcaacctaacaaaagcacgaaaggtggctatgcgtataatagcgaaaaggaaatataacacatctgtattaacttcaaaaaatatatgccatacaacatggtacaggtgaaagaaggtaactggctttatagcctaacttacaaaaaaaattacatcttcgcctccaaagcaccctccactccctaaggtgtgatttggcgaacttggttcgtcatcactactaatattatacactaccctaagaggagaaggaggcgaaacacaaactagaccataacggcgttgggcgatcgcttcctgacgatcagtcctccgatgatttcgccaaaagcgggccatgtcctcccgatgttccacatggatacggtcatagtcgtctagggttcgcccggggtgcgctcgcatccagccggcaactttcaaaaccttgtaactattaccatttattatcatctcgcgacatgaatacttaatttttggcaggcctttaaccgcgacgaatttctcatttttgttccaccgatcccaaaaaagaggccgatcacacaacttcggcgaaaaccctgctgagacagcataaaaatgacaaatggcaaagtgcaaggttaagagagggcggagcacataaagtgggcaaaaagcgtcgcccccttttcgtgtacaaaatgatgcaagcatacacatcaaagccatcaaaacgggacatttagctaaacccggttcatctatttcatatatcaaaagggccattttcggctacaatgcgaaagggggagggccatcggccaaatttacatcgttcgccttccgcagccaacgccaaaagaaatctaaaatctgaaaaacaggcggaggtcctcacacctctagatgatattggtcgacgtccgcccctgcacccgtatccgctccaccttcttcggtcgctggctccttgccctgctctgctgcctctaccttcgccaagtgctcgagcaggcgcgccttaacggtagatcggccctccttttgccagaactgcttgcgccaggcgcgtaaggcgggcgaaacgtcctgagagctgacttcccaatcccccttcgtaagcttggggaactcggcgatgtgctcgcactcattttgttgcagcaggcccatggtgaaggccactgacacacacgcgcaacaattggcgtacgcggtggcggaatcggagaccgcaccgccggcctgttgggtccactccgagaagtcgaaggcagaagcaccttcgccagggattactcgcaccttctcccccatttcagtaagggcgaggcaaagcgtgtggcacgtggtctttacggactcagtcgccttcgccatctcccgcgtgaacctttgtgcgtctttctcagcagttgcttttgccttgcgggcctccagacgaagagcctccatcttcggctcggtaaggttgtattattcagggtgcgctcattagtgtaggtttggctgtgctgcgcgtatagacatgcatcaggcgtggaggagggggcgctagtcagtaacatggacacagatgtaatggtgacggtggtgacgagagttaggtggccgtctgcctttccgtctggtccagacaccttattacccatcagttttcgcagtgagctaaactttccccaaaagcttgcgtgttgtgttttgccattcatcgttccttccagagcaccgcaccaccattgttgcatgtccaagctcaagctcacctattgcccaaaatatactgctgtgccctccccattgttcttcgcacagaggacatctcgaggtcgcctgcaggagtatgaagaccggcggtcgtcgaatctcgaatcgtggcagcaagcatagagggcagtcgtcgtctgcatcatcttcatcgtcgccagtccgggcaagcctggcagaccacgcgcatggcataggctgcttggcctaaaaaggaagcatccacaagcccactttggtgtggtgcatcggaggaggagaaaggtgccgttcgcaggggcatcggcgcttcgtgcagagggaaggcatcagctgcccgattccggaatcgctgtggccattgcagagaccggtcatctccgatctcgtgctgcacagttgaaggggatttggcgcccttgcatcgccattgcggaaaggggatccagctctatataagggcatggctgcggtaggcgtgaagcgcaaactcatcgtcgacaaatcccctacccatcacctcctccatttgcctccgtcgcccatcgctttgcttagaaggagggggctaccttcagatctggaatcctctgagggtttcttcacatctctccgttcggacgctgcttacaccgccaccaccgaagaagatgtgcaagctgtagctcgcgccgtcatctgcatcgccttgaacttccctgaagccatctgccagttggtgcgccagctcaccccggggaacgttgctgtggcgctcgattgggacctcctcgactccgatcaccttcggaaggtacagcccaacattttgtgatttattccccatttttttgcttgcatgactttggttcatagatggctgctgggcacaccacttggaacgaggcggagctgcaagctttcctcgaggcttacatggaagagatcgaggcacgaaccatcacgagcacctgcccaaaccgccaaggctacgccaaccttgaggtcaagatgtaccagaaggcccagaaggttgtgaaccacactcagttcagaaggcccagaaggttgtgaaccgcactcagttgaagaactttggggacacttatcgccgacgcttccaaacatggtgctggctggagtcgatggcaactggccttgggcgctgcccattcacgggaaacatccttgcaagccctgagtggtggacaaggatggaccaggtatgtgttcatttcattcctgttcttgtcatcaatataggttcatatacattttagtaattagcaaatcaaaatgtatgctgaacaggtgtagcattagagactactgttaatgtaagtactgcacaccgtttgattacatgtaatactagtatgctgagtttaacgaagctatttaattagttggaagtaattagatagaaatactttttgctctagtacttatctctgttgtcatgttcatgtaggctcatactcttcagttagtgttgtacagaggtagcgctattgttttatgactgagcatgcttctgtttaggagtactttcagaatcactattactagctttatgtgactttaaccaaggtatttaattagttaggactattggtagttatggttgtagctgtagtagtttactgtaatgtaaaggccatttactgtacaatgaatgagtagtaatggtagtattacaaattatttgtttgcaagtacataaggtagcattttcgaatttagttggaaccaaccatgcgatcggctaattagctatttaagtagttctagctgtagaagtgaactgaaatgtagagttcatttaggctgcatttatgtgtactaaaggtacatttatgaataatatgtttagaattacataacgtcgtttcctcttattatgttctaaccaaccatggcatcagtcagtaaggactgatcttataaaaacttgcaccactattatttgacataaaccaacctacttaattagttacgactaaattaagataaggttgtagctgtactagtttattgtaatgtatagctcatttagtctacttttaagagtactaaaggtagtattacatatcatttgattacaagtacatatgccttgcatactgtttagtatgatttttatgaataccgtactcattaatccttttgtgcttattcctgtgcagatgaggagaggtgcccgtgccttccgcaacggtccccttctcttcactccagagaaccacacggtgtttaggggtagggtatgtaccctaaaccgctctggggtccctgtgagcccatgcgccatctctgcagctcctcaacaggctgaaatcctcgacattgaggatttgactgagcaagcgcagcaagaacccgaggatcaaactccacggcgtggcaagagaacactcactggtggaacatcctctggcagcagctcgaagtggtcaaggggatcttatgccagtggcgcactgaaccgtttggcgaacctccgcattcagtcaaacgagagcagggccaggcgcgaagagctcaagcaagcaaagagtgctagggcctgcatggagctgttgaaggcagacggagtcagctccagggacccaatataccacatggccctccgggtatttcgtgatggcttcttgcgcgagtttttccttgatgactgccccacaccggaggggaggctctacttcatccagtcccagtatcaggacatggcccagtaccagccactacccccgcctggttttggaggatacctccagtcagctcctcccggtatgtatgttgcatgcagcttgtttaggttcatcatacaatttattttcattcatacttgctcttgttcatacctagactgttggtaccaaagtcattcctgctgttgttaagcattatgcaaagacataatttgcaatgatggcaacctactatttaaggtttattaccattactggaagtcacctctaggttctagttacataaagtgctacacaataacaaaacccctagttacataaagtgttgatcaatattgcgcaagttgttgtcacataaagttgttgttacatttacaatacataaccagttgttattacagttattgattgtcacctctaggtattgtggttggagagggttctggttatgctgccgaagctgaaagagttggagctggagatgatgaggacggtgctgatgatgacggcgagagagttggggacaacaagggaggacaaggtggtcatggtaaaggtggtgatgacgacggcgatgatggaaatggtggtgctgccggctatgggggatctggttatgggggtgctctctacgggggcgtccctggaagctatgatctttccggatatgcaatgttttaacattgcatgacactatctgataatcgatccgtctgggagttcctgtcgaacgatgagtgtgccagaccatgagcacttcttttttcgaacgtgttgtctgtctcgaataatttttgctcgacttcatctcgagcaacgtaactgtggtattatgttgagtgtgtaggtgaaaacaatatcggcacatttcgtttgatgtagcttttcaataagtttgcttagtccctagttatcttgttattctgcctattattgtgtgttgcattctatattgacatgcaggttggcgacatgcaggttgactgacatgcaggttgtactgcctggtgaaaagcgactgagcacttcattcaagtgctaattgatgatgctttctttgcaggaaccgaattaaatgaagtatttaatgaactacagtacatcagtgactacttgcagcatgcacttcccgtatttatgtttgacgtgcatatagggccattaattattgctcatgcgtatcactgtcgaatgttaggttgttaacttttgggttcacaattttcttcgctaatttaacttttagtatttttgtagcactaacagttctaacatggttgtgtcttcgctgtgcaggtgttagcttaatgcactaacaaaacttattgttaacttactgcactaatatgtacattgcatggagcattcatgtttactatatatgttgtccacttcgaaagtgcagtaaccactaagttatttgtatacgtattatgttcaagaccatgagcacttcttcagatatcacgagtgggtcatcggctggaaactacacagatgaggaagacaacataatcgatatgttggtagctgatttggaagcccaagtgcaaggtagagctgcaaggcgggcgccacaacaggcagggatgcagtggatgatggagacaatggccaatgctactcagtgccataatgtctttcgcatgagggctgaccaaattcatgctttgttcgcaattttaactaatcgttaccatcttaatggaagtaacgaggtttgccctatggaagcactagggctttttctatacatcatggcagctgggcagtcgcaaagggcaacaaataataggatggcccggtcgggatcaaccatatgcaagtacttccataaagtgcttgatgcagtttactccatggcagctgatatcaacaagcctgtggatccaagttttcgaagagtgcataaccgggtcgcacgagatgaaaatttcctgccttttgctagctgtagacgggacccacatcccagttcgtgttgcagttgaagaagctaatttgcaccgcaatcgtcatcatatcacatcaaggaatgtattagttgtaattggatgggatgatcatgttatatttgcacatgccggatggcctggagctgtgcacgaccagagggtgctaacagaagctgtccggaactatccccataattttccaaggctgccatggggtaagtacataatgttgaaggtttttttaatccagttagtacacatcaccatcatattactcccccatgcaattttcatctgaaatttctcatgttcactgtccaggtaaatatctactagtggattctgggtacgcatgccggtgcggtttcttgccaccgtacccgcatgtacgctaccatttgaatgaatttgctggtcaactgcaagggagggaagaaacattcaactatacacactcctccctgcgtacttcagttgagagagcttttggagttatgaagagtcagtggaggatttttagggagatacctcttttccctaggccaaacacccaaactaagatcatacactgcgtttttgctctccaaaacttcaggcttgacagtgcagacccccatttcatgacacagaactggttgtacaacgggtaccctcccatcccacaggcaccaccgctgcgcgacttggtacgacgcacctaacagtgctgctgggatgagagctgttcgtgacgccattgcaaatgaagtttacaacaactagtcctgcatcactttccatccttaataaatttgtactccttgctcatgtctttctcaatttatcctattttatgtgtgttatcggtatgagaaactactgtcctgttgttctactcgaatttgtgtgacgctattatattgctatctatgtgaacttcggtattgtcaatcacgcatttcacattcattacaattttatcgagcaattaattgtgtacattaatatgcaactaatcatcctgctgatcacatttattcttttttttgtgcgcctttcactgtcggctccatgcgcgcaggcctagctgagcaaggaggaaaaacccccaccctctcccaagtcacgccgacaccagcagctgtggctgcagcgcctttactgctgcctgcgcactgacagccctgcccgtcccgtcgcgtcgctttcatcactgctccgtcggcaatctcatggagctgctccagccggtgtcaaactccatccaacccttgctacctactattcagccaccaaccatatttactactaacagcctatagtaataattacactcagatttaattcgatactacaatatgcacaaacgagcgcaccctcagttaaggcggcggactggtcttgttcctttttaagctcggccttgagacgctcgatctcggccttcgcctcgctccccttctccagctcagcttggagccgcctgttctcagccttcgcctccttaagggtgttggcgaggctttccatttgtaggctcttgcggcccagttcgtcgtccttagctcgaagatggttcttgaagccgtcaaagcgagccctcacggttcgctcagtcgaacaatgagccacaagaatctgggtcaaaaaaaaaggggggagagggggcgaaagcgatcgtcgttaacataagtcgtggaaaaacaacaattaaagagaaagaaaaaaatgaataacatactcggatggctaagctcttgatggcggtacagccttcatcgaactcgttcaactcggtgaacaggctcggctcccagccggagaaacgagatgacttaccccctcgacgaaggggataagacccgcctgggtctctaaatccccaggggcgaagcgaggcgccgcaagcgaatactccgaagccgacgtctcaatggctgccttcttccccttctggatggcgggcagcgaagcaactggatcacgcggagggcttccgaagagcctggcagcggcgttcacaacccggtcagcagaagctgaagtaccggccgcagcgctccctcgcgcttcgcccacgtcggccgtagcaccgagagcggtcgaaagaccatggctccgcctagcgggcgaagtaggggtctcatccgaagactcgtcatcgctgaaaacacaagcgacatcgacgagccccttcttcttggaggttttcttaaccttccctcccttcgccaccttggccgccgcaatcgaaaccagtggctttgccccttccaaatccttccggccgaggggggaactgttcgactccaccccagtttcgacatggtctggacttggggttggggtgtagccgcgcatctcgatgcggttgtcggcgagctcgttcgcggccatttcgatcgcaacatccgtctccacctcatcctccccctcctcttcactgtcctagtcgtcgacggtgtcctcatcgttagcatcagagtcggtggaggcaggggcctttcgcttccgtggggccgatttgacttgcccacgtttgcgcttcttggaggtcccttcatcgccatcgacctcggagggcttcgcccgggaggggagatcgccatcgcacatgtgattcgcccgaccagccgcctgccgcgtaagcagctggctgtattctgtgatcgacacatcgccgatcaccttccgagcttcggcttcggcctgaacaagagttaacactacaaaaacaaaacatcttatcatatcaggcgccaagcagggaaaaagagcgaaatacaaatacatgtaggaagcagaagcctacttttcgcccccccctttggcatgacaagcttcgacaggccatcggcctcctcgtcccggtccacctcgatttgcaatgactgggagaggaggaagatctgaagcacgcaaaactcctctaccaagtcacgacagctaaggcggaggcagactttgcgaagcagggagaaacgggcctccatgatgccagcaaccttcggtttcctgatcggcgcgatcgctttgcgccgtcatcggagagctttcgttgcgtctgacctggcctcgaaggggatggagtggtagaaccacttcgacatccagtggcgatcccacttggacatagaagcattaactggccagagatcggaacgctcggggcgaacattgaagttcacgctcccgaacgctgtcttcttcgtcttcaagtttacggtggcatagaaaatggcaccgaaaagctcagcactcggttcgaacctaccagtccgacatgcccagtcaaagatggcgatccggacgagagccgatgggctcagttgggggagctccacgtaaaacaggcgaaggatctccggtagcaagacgttgcatggaaaccgaaggcctgcctcgaagaacacagcgaagaccatcgtccggttgtcggcgggctttggcaccacagcctttcccagggcagagacctgcttttccgtcagcacgccggagtcaaccagcttcgcaagctcatcttcgtcgacaagcgaagtccccagataagcagctgtttcttaatttccaacactctgatttgagcagaaactctatggagtgtgttcattgatataccaatacctcttcatttcttgatttaccagattggtggtgtcatcatcaatcttgccgggattagggcctgttacggaggccgggtctggcttgcgaggggctatgtcgaaaagtgagagacctgtcgaaggaatatggctgaaaagactagcggatcgaaagcgcacaaaagagagagagaaagagagagctcgcggtgaaaatgactggggggtggtggtaaaaaccgggtggggggtatatataacccacccaggcgacgatttacctccccgcccaatcataagccgccacgtgtcccagggccaggcgaaacggtaaattcccattggctcgggccgcacagcgctaggcccacagagagaagcccatctctgttcacagcagcccaccaaaaaagaaaaaagggcttcgacacgggcaaatggcgaaagctattcgaaacaatggtaaccataaaaatataaatgaatgcgttcaaaatttcttgcaggactccactatgggtttcggcaggaacgtcggaatgggggcacctcataccatagcacataatttgcacggtctcggctgaagctccttactcaccctcgcctgtgaggggcttgttggcggtatggcatgagacccttcgaccagacctaccgaaaccatgataccaacaaggattcaagccaaagacgtcaagtgtacctgggcgaagcctccatggcgaaggctgtggaacaaagacggctaaggccaaaaagccgtgtgggtacctcgcaggaccagtcatatggggcgaagggtgtagacttcgctttagcaggttcggcaccagggaagcccaatgggccatcccggcctcttagggttattcgctaatgggctaactgtaacgaacctaaaattttaatttgcttcgccgcgctgttggcaacctagttatagtatgctcagtgtgttgagctgaacgactagttgtgtcacacgattggcttggatttttttttttttttgcgttagaggatcgattcatatgcatatatcacagatgaaaacacaaattagacacataagtaaattctttatttcttcacatatacattatacagtgttgttgcatacatcaaataatgcatctcatacattattcatctaaaatagaaatagtgaaaattaaataaaaatattggtgtgatctgtgaccacacctaattgctttaggagatttcaaatataagatttaggcaaaagagaaaatttagagttgcttgatgtcacatattttgcaaccaaaccatttcggggcacaaaattagtaacattagccatctcttagtagcttccaaaactatttatttcttaggtaaactctgagtttttgggcaattgaaaatcagtccctaaactcaaagtaatctccatatttttaaagtctatggtactataatgcaaaagttacaaatattatatttttcactaggtttttatttaattgcaaatctgtgaaaaattatgctgagcctccaccgaataaaccatgcttaggtgtcaaacagggagaccaccagtaaaaccttagtaggtgagtcacctagtagtcaaccatgtccctgtcacaaaaaccatatcagtgtgaactccatcctgaccgagcctcattttcctcgtagagaccaaaaccagttagcaagaagaaccaccataaccagagagttagagaagaaaagaaaaatacaagagggcaaaatcacccaacatcaggtggagcaggggctccagctccatttggagcaggtaccccagctcaaggaggagacgctgattcagtagaatcaaccaaccaatagaagctgcagtagaagcaaaagaggagttcaactatatattttcacaaccactgaataatcaacaaagaggtaaactagattaagagcatcatccatggcatataatcatgattagaagtcagattatttacaaatcaagaatctagagaccatattatttgcattacaaggttacagtggcacacatctaacaaatacttctattgtgagacattatgagaaatagaacagagaaatagaagggggaaaagggatatggagttactggtgagggttgtggccggcagagttgccatttgaggcattggccgtctccacagcgaccatcacaggagttgggtaccaatagccatggaggacagcaatgctcaaattacttgagagaggagtggtggtagtagaggatggaggtgaagcaggacatgagtttgtgggaactagggggatcaaatcactgcaggggtagctgctagggagatcaccggagtggggcatggcagccggcctgagggagagcgtcggtgttggcggcgctgtttggggatggcggcacaggagagaaggcgtgagggagagaaggagatagggacagaagaagatgagaagaaagaaagtgggctggttgggctttggttttgtgggctggactaaattgatcatatatagtctccaggaaattagatttagatttagaacagaatgtgagcaagtttttatgtcatataaattgatgattctaaattcttgatatgagtgttaaaataaaatctgaacagagcaaaataaatttataaagcagcacctgatcattatatttgccattcataatacatcattcatatgcattgcatgcggtaaattatgcgttcggaatatgtccttattcggactttcgtattttttttttcagaagttcgagttcctgaggaatcattcatttcgattgaatttgagggtattcgtggtgttttttatccaggcaagtccatctcttgatcatattgcttagttatttcaaatatttgcaacctatataactctcaccattgcatagaaaaccagaaatttatttttgaatgttaatattgtgcatgtggatctgtggatcagttctttggtgatcttaataattgccagtctgaacttggttattgtgtagtcagctgtatatgcttaacatcataaggttaattaacaactgctgtaaggtatgcaagcgtcgtagcgatcgtgtcgaccatatgacttggaatgggacatgctagcttagtagttctttcttaatggctttatccaacgggcttaaggacttccgcgaatcctgtgagcgtggcctagcgatgagggttgctgttgttgcagaattcgattagatgatgtggatcgccattgttgcaggatccaatgattcgctgttgttgcgggaatcacccgcagagataattaatagatgggattgataaaaagcttgtgaccttagccttgccggcatacaccatgaagtgtgcttcaagcgccgacgggcgtgggcattaaaaggtttaaggcgtcagtgggtacagcgacacacctctgcagagtgtatgaattgtgatatgtcactccctgtttcgggtagaaactgcgaacgcggcaggaaagggatcaatcggagattctatcctgtggtacttgatatgcagtagtgttttataattaaaatttgaatttttgcaacaaatatttgtcaaaaacattatgaattctttgaagaatcttggattctagagatagttgcattcacacattttcttgctattgatgggcttgttgagtaccatttgtactcatcccctatgttaattccttgtatatagatgttgaatcattagaatctgttgaacaagaatatatggctggaagtgaaggaactcatgttatggatgacaaccaggaaggactctacgatgatgctgagattgactatgataattagtgtataatatgcatggttcatatagttgctgtagtggtgatggtagtagcagtggcagcggtagtatttgtactagtagcagtaacgttaatatgaatagaagcaatatctgtagcggtacttgtgaattttctagtgtgttgtatatttgctgagcttttggggtttgtatattattttgctgttatcgctcgaggcttgtcttgagctgtatctatggtactataataactggaaccaatgcgatgtttctgctatgcaactctgatgtgcatatctctgagtaaacgatgtttatgaagatatatgctatagacttatattctactcttgttgtggaaatatgtgggtcgtttcactaacgttcgccagtcggcccatagaaggcctatgtatccaaattacactg

SEQ ID NO: 28224 - DNA, 26449 bp, Oryza sativa
gattaacttataaccgagtcaaggtttatccagattcaagaatcatataaagaacccaagctttagagtgtctctctcctgctcatgatctaataatgaactgtgatctgctcaaggttacaaatcttttacattggtaagctgttactggattcatttgacccatccaggatttagtatcaaatgaaatctgaaattgagagaaacttttacagtaattaaagagttaccgaaacaaacaaacaaacaaggtgggcaactgaatctaaccattcatttaccgaggttagaattgtttttttataatcaacctaaaaaaatatgcactgttgcactctccctctcatggaagatcttatcaatggactaccttcactgcttggcaccgcaatgtatcatgattaagaaatcaccgcatcatcatctccatctcctttttattagcataaacacatatgacatatcacaaccatacgatggtgaaaagaaagaacattacctcctgacaacaaataaagcattcgttcatccaatgcagaattggaagtgatacaaatatcatcagatcagaggtttggaatatctgtcactatatgaaaagataactaaattctcgttcacagtaaaagaaatgttccatccatacagacccaaggtctcaccagacattgtgctaggtctttgttgccacctttattatgcctactattgcattgagtgcagagttatctttcataaggatctcctaaagtataagcctacaacaattgcttccatgcccctatatttttcgcactaatctcatctggtacttgtatgagtgttgctttaaggtcttttagggtgtcctaagaccttgagaattggatatattttgatggtttttacaaggtggtagtaaattaaattttttacaaggaccaaacagaaattataaattaaaatctcaagtaaacaaattgtggtagtacattcatgtctacataatcaaacacaagtaaatcaaccaaaaatgattttccaagtcactgcaactggcaagggatatatcacagaaactaggcagaagaggagcacagctggcacgctagagtagtataccaacaaatatggtgagagtagctcccgattgactgatgtggcgtggcaacatgataacatactgatgaggacaacaatgactaatagaagatattagtgatctgttacaaatatctttgggacatttggggacatacagatgaggacatgtggaggaaatttgatatgcatgatcatggaggatttagttgcaacattcttgttaagggcatccttaatcttgctcattaaatgaagtaaacaaaaatgtagcagaatcttggatagacatcttcatcttaaaactgaacatggaggatccaaacaggatgtacattatgactctgggtagagaccctttacatgtaattctaaattctaatttgcatgtctgcatgtccttggagtccaatcctagtagaatcggttgtcaagccaaatctgaatcttacaaatacactataatactctcttttcaaggaaatcccctatcattacgatttctaagggtttaataataggccaatgcatcagatactttgttaaaccagattggggcaacatttccatagctccataaatttgtttcttagtgtttgtggatgagcaaatcaaccaggtggcagatcacataaacataatgactactgtattcgctgaattgcaactatcagctatttctttattcctgtttgcctaagaagtaagatgagtcacactagcagagggcttagtatttaggtccacagcttcagtaactaaaaaggcttagtaatgatgctcatatatagtttctctaaaggacaacaatttctacttaatttacaagctattgcagtcacataatggctcacctggagtagtagtcgacacactaaccaccataatattttcaggaaaaaaagaaattcccatttcggtaaaaatttagcaatggtgtgtgaagattctctgacgaaaaggttttgactcttgggcgtcaaaaggaaaaggggtggtgacccatgcgaccttttctttcatcaggcaagaaaactgaagaacagtaaaagcagcaggaggaggagactgaggacaactcactgatggcgttgaggtcgtcggcgtagccgtggacgcgcaccgtctcctcgaaggcgagcatggcgtcgcgggggacgccgtaccaggtcttggccttgccgaagtggaggaagttgaggctgtggagctcgtggtcctccacgtgccaggcgaaccagctgtagagcatggccacgtacagcatcggggtggtgacgcccgccacgtcgcgggccatggcgcggagcagcgacccccgggcgcggggcgccacccgcatgttccactccgtctccccgacgtcggtggcattggcggcgtcggggagctcgtcgggggaggcgaagccggagccgggcatgtcgttgccgtactcgacgctgaagggcctggaggcgcaggcggcccagaagagggcctcgagctggaggtgggtggggttcctgggcggcgcggcgtgcctcgggggctcgaactcggccgccttggcgcggaacgcctccagggtgtagcgctccccgctctcccacacccggcggctggcggcgcggcggttcctggcggagaggccgacctgctggagccgcgtggggaaggtcggggaggggtcgccattggaggaggccgcggcggcgaaggcggcctggaggcggcggaaggtgtcgtcctcggggggccgcgggagcgggggcacgatcttgcagatgccgtagcgggacgcctccggctcgatcctgaggatgtaggcgatggggtcggcgaactccgccagcgtcgggtggtactccggcgccacgggcagcgtccgcagccactccggcggctccaccgccggcggctgcagcgacatggcggaggcggaggcggagggggagggtttcgtcaggggaggaggaggagtcgcatttgggaggaggcgatttgggggaattggcttggctgctgctgctgctgctgctggcttagcttgggtgctcgctgctgatgccgcttgctgctgctttgggggtagtgagaggagagaggagagagaaatggtggggaagacgaggtgatggggattttctttgggggtttttttatttgtttatttatttttctttccatgcgaacggtggtagtagaaatcaagagatggaatccgttatttgcccctttggaaactatatattcgaacaaaatttggggaaactgccggagatcggattttgttatggggtttgctcttcttgtttttggaaagatttttcagcccgaaattagggaaataataatataggtaagtactttttcagatctgagatactctgagataaggagatcgatggcggtcgtgaactcgtgatagtgatgatgatgaataaaagatctcttcaatactttgatttgataaagttcggtgccaaataatggtattataattagagtgagggttgggtagtaagaaggctaatatggagatcacacaaactaaaaataataatgtagttgttatacagatctaaagaaaaattatagagaaaatataatcgggatgagagagaattctatggattactttggctaggagattggaggagttagagctattatatagagataaagtaaccgcttttttaagtatacaattattaaattcactattattttccttgatcaaaagcaaatgcttttaaacgatacttcaaatttcaagagatatttgtggatgaaagatcatgacaaattaagaaaacaaagcaggctccatcattgatgatgagagaaagcatctctttctagtcaaacgtcggcatggacactatgcattaattgcacatatactcgatatccgttttcatttctaacattgacaattggtatactccagataacatgtctcatcatttttaaacggcacgatctactaatgatatggaattaattctatttttacattattactatgaggagccgtatgaggtgaaaacctcatgtacatcctccatactcgtaaaggaaatcgttttggacaacgatacggtctccaaaacacaactttgccttcttatttctataaaaatatttattgaaaaataatatatgtatacttttacgaaagtattttataatttttacattttcaaactcaacaacttgagagttattcatgatttatactctcaaggtttgacttaaacattatctttaaacgacttcctttacgagtacggagggagtatagttttggagcggagatttttattaaatagaatgaacgaccataatagatgttgtctcaatctgaaggaaattatgtggaagctttgcagaattattatgaagcattgcagaattattatgaagctatgcgactagaaattgatccctacgatcaaagttatatactctataacataggccttccacactggctctgcaaatattatttccgggcactagaacggaaccccttcttaccataatatggccatgatctgtcattacgtgcgactatctccactatgtagaatttgtaggatcatacaacaagaactaaaccaaccagaggggggtgaatggttgtagtacccaaaaaccaaaacttttagcggaattaaaagttgccctcgaattcgatatagattggtctgaccggagtagatgcaccggtctgacggctcgaagacctccgatctgaccggtagtgaagctcgatctgattgtgcattgccctgctaacgcctgttgctgccgccggtctgaccatcataaacccgtcggtttgaccgggctgatgctgtcaatttgaccaccagtgtccagtcgttttgaccgggccgatgccatcagtctaaccgccagtgtcccatcagctggatcaccgaatccgagcaaacacaaattgaagatctctcaaaataaattcagggcctgtttggcacaactccagctccagctccacctctcctggagctggagtcaaaccaaacaatttcaactccacctaaaatgggagcggagctgggtggagcactgtcacaaaatgaactagagaggaggagctgggtttaggctgctccacaactatactccagacccaactctaagctaaatttaggagttggagctctaccaaagaggccttgaaactttattacttctatttatatttacaaagtgcaacaacaactctcctcacaaaaatctcgactaaactcaaaaccctaacttttctctagactcaactcttacaaaattgaagctggaaggctctatttatacctgaggtagacagcctaaagccacaaaccaacttgtacaagaagtcttaatcccctaggaaatcttcccgtacaagaaacaaactttacaaactccaatcataccaaatttggacttcttccaaattcgactccgcatccatacgcacacaacatctccgtcgtatgccatataaaatcttcaccaactacgcgcatgataccttgatcgttcggatgtcatcttctcccaagttgactcatgatccatcaccgacaacgctctcatcaggcatcaagactcaccctgttgatgggggatacccgttgaccgtattcgaagggtattgaggtacattggtatgagaatctacacgataccgacaccaagcacataagaagacaaggattatactggttcagacccctcataaggtagtagccctaatccagtttatacgggggattatggaagaaaccacagagtacaatagagaacaactgaactccgagatcctcgttgaggggaggtcgacgagatctattggcgagtaggcttcaagttctccggattgcgtttgtggtggcagatgtcttgcactaagattcgatgccatgtacacctcaggggcttagtgtttataccgtggatcaccttagtttccatgtagaactcggagacaacggaccccgtacgactagatagtatcctaatcttctccgagtaggactatgttatttctacttttgcaaatactatttctttattttatacggttcctttccgtatatttgtggatataccgtatccgtatatctcatgattatgccttatccctaaccccgacacacctacacatgaaccaataaagaaaccatatccgagcacatgttctctccaacttgaatcaacattagcacacaacagtattatacacgtatagtatccatctagaagccataagcatgaattaatcacggatatccaaataaacaacttgaaaccgaaaccggcacaaagtcggtttggtcagaccgtcgggatggccggtctaaccgctcgctccactccggtctgaccaacggccatgcgcccggtctgaccgactccaaacaaccgaaacacatgttcatcatctgaaaacaattcataatatttgtcaggtctgaccggtacacaaaccctagtctgatcgaccctaaaaccacttcatctattatctacaaatatcaaaaccaattatcttacatggtacaaattaataatcaaccacactttaattttacagaattctcttagacagggcaatgataggttaccactgttatttattctcttagtgtaatttctgaggagaatggaatgatatttttatatttattgtagtcaaactattgggaggaaacatacaaaactgggaatattgagatatgatcttatttgtcgcctaattcatgcatgcaatgtacatgaaaagtcaaagtgcatgcaatgtacatgaaaagtcaaagtacgtgacatgaaatcaataattaacattttcaaaatagtttaaacgataaatacatatatcataaaaaggatatatacctaacatgtaaagttggattgtgttgagtatgaatcccatatgagattttttctttagctttggccatacacttctaagggtactatgggccttttttgacgcggtaagccggtaacgtagtgtatttgacgaaaagctaacgatgatggtaaaaatggaaggaaaacacttacgtaactgcgatggcattttgtacaaaacaagctcactgatgagaacttataggatcaatcttttgtcaatagcaaaacttcgagtttaggcaacataatggctcctttgaaacacacgattgaaaaagcagaaaaatagaaaatccctgttattttgacaggaatacatgtataaaatagatactaactccgtttcaggttataaaactttatagtattgcccacattcatatagatgttaatgaatctaagcacacatgtatgtctggattcattaacatatatatgaatgtatgcaatgttagaaagtcttataatataaaactgaggaagtaattgtaaagggaaaagtacgaattacccccttgaactattgaggtcgatcgaattacctccctgaactacaataccagacatttgacaccctaaacccttgaatatggataaattatccccctaacaaaaaccaaagtggttttcagcctacatggcatacacggggtgatacagtcagcaaaaacaaataaaaccagtgggacccgcttgtcagcgttggtttttctctctctccttctctcccttctctgcttctctattggtgagaggaagacagagccacagacatagcaccgacggtgagggccagtctgaggagggtgtcggagacaacaaggcagcggtgaggttggcttgaggcggtggagaggtgccctctgctagctcatggagggcatccaccgtatcctctggatctagcagagaggcagggagatgggaggtggtggagaggccgctgggcaaccgacgacgatagcagcacaacagtgaagcgggtacgggagcggaggaacttgaggagggttcaaccatggtcactggcactggctccgttgtcgcggtagagcttgccctagaagaggagatccatgctggcggccgcctcatcgagcgcaagctttgcaacttccctgcattgaaggccatggaggtcccggggacggagagaagcggctgcgggcgtcccctccgttgcctcgacgagccgcacgctgccggctgtgggtgcccctcctcccgccccgagctccgctgcccactcggccctaagttccgctcactgttgtcccctccaccgccccgagctccgctgccccatcaaggtgaggaggggagaagagaggattttggagagagatagagatgtgagggtaaaagagagggtgagagactaacatgtggggcccgctgatttaaaaagaaaagaattgatgattggactgccacgtaggccaaaaccgcttgtaaagctgctcgggaggaggggggagggtcatccggtatcgatagttgagggtgaaaaatggctggtttttaggtttggaggggggtaattcgtactgacacaatacttcagggggtaattcgtacttttccatatgtaatatatagaaaaaaatacataaatgattgtttgagtagaccgtaagtgaaacgtaagagtaggatgagagagatagagtcaaaataagattggagctcttactaaccactttccaaaacctttatagaattgtccatgacataggtatttcaaaggaaatgatatttgattcaaggaaaattttgctataggacactgatattgtgtggttttagccctacgacaccacacaaactaacatttaggggaaaacactccataatcattgtattttgctagtggataccgcgcctactaaaataataatttccggttgaagaggagagagaaatcatgtgaaatgtcaaatatgcccttgggcccacatggcagtgactcagcacgaggaggagcagaggcaatggaggtcggtgagcttgtcgccggtgccggtcgccgaccgccggcggtgaacggcggggtttcgcgaggtgtggccaaaagaggatttgtagagtggaggattgtgaagctaatggtgatggtatcgtgcacattggtgactggaatcagtgtcgacggcagcacgagcggcggtgagctttggcatgctagtgcatgttgagctctagctcgttttagtgcaaacccgtgcatgcatatgtgcctacatggtgcttggatactcacccgacatcatgcgcgggttggcgaagacaggacagtagtggcgacgggaggaatggctctggcattggcggaaatgacaggatgatgccgatagcgagaagtggcccacggtctaccaaggaagcatgcgcacaagattagttgagctactaggaagcttcacgcccaaggaatggggcggaatcggaatcggaaaggggaagcggtggccggaggtgaggaagacgatgttgatctcccacctcggtgcatgattcttggggattcttgggtggtcttcgagagaaggctgtggtggtcacgatggctcggtggctcggtctggtgtggttcacagtggccagaacggcgacgaaatcatggcggcagtgctcggtgcgtgctccagagccgacaatggcatggcgacattcccatcgctgcagtggatgaaatgagatggtatcgaaagaataattgtttggcatgatgaggagaatagggaacgcagaagagatggggatggagatggcttggcgatgaatgcggacatcatcttcttcgctgcctcttccgtcgctatcgtcgccgcgcgcacaaagtagccacgagagctcgccggcacggcagcgccccagtcagcacctgcagcgtgccctcagctcgaacaacaacggccgcggcgagcctgcaacatgacgctggcgtgcgccgcaatgcagcggagtagagtagggaggggatgaggtcccatgggcatttcggtcacaccgcgtaaaaaatcaggcccgctagcgcctcgtcagcacggaaattatattttagtcggtgcggtgtccactggcaaaataccatgattatggagtgtttttccccaaaagttagtttttgcggtgttttagagctaaaccacacaataacagtgtcctgtagtaaaatttcccttgattcaagtgtaggaatttttagtacaggattaaaatccttcaatttttttaacgttttttctataataaaaggggtctacaaatggagataataatgtgtacaattatatactcccaatctaaacaatattttcaaatactactttagtatatgagatgcagcttatctggactctgcagaaccgagcattgaaggatgggccaccacaagagttgtgtacttgtcacacaagtgccagttgcaggcagggtttaacttaccgccggtaaccgcacggttaccgcggttaccgggcttaccgcgggggtacggtaatataaataccgcggtaacctccttaaatacaaataaatttaaaaaataatttgaatttttgataaattttgcacggttttgtacggtttttcacggttaccgcggttaccgcgcggtaaccgtgcttactgccggggcgcggtaaccccggccccggcggtaaggtaaaccctggttgcaggtaggcgagtttaaggagtaaactatgccggagaagccacccgtactgttttcgtttttaattttacacagctccccttacctagatcgaatgggatttttcgtcctactccctccaaaaaaaaagaagaagaagctaacacattatctactaggttgacttttttttctttttatggagggagtgatcagacctaactaaattaaggatagcttattagagtgattaagtaaatagggatgtgctataagtgttattgaggaataaataatcaaatcatgtggttacatataggtacgctaagcgtgtacgtttagtggaagaaggggatggaaggagaatgaatctccactttaattaagtacttctatcatttacaagtacttctatcataaaatataacatacgattgaatgagtcaaaatataagaacatagaatcgatcggatggaacatttacaagaaatatgaatctgccacctatccaaattagtagtattaggaaatatctcattcgattctagttttttatattttgggatggaggtagtagtagagatgagagtagtttttttttggcaaaatttgctacaggacataaaaaaaatacgtaattagctggggacaccgtaagaacatgtttttgcaggagggcagcataaaaaactggtaattagttgctggacatccactgcgctattttattatttttgaaggaaatggagagagaaacatttgttttagacaggtttgcccatgggtccactagtcagtctcacatatctctttctctgttcctatcttctttctcatggtggttggccacccatcagcggaggaggaacaacggcggtggcggtagagtccatcaagcagcggcggcagccgtgtcaaccatggaaaaaacaacgccgacgagggtgcgagcagcagcaggagtggcggaatgagggtcggcgatgaagtgagcggcagcgctggtaacatcgactacagatctaggggcggtgcaagcagatccgacagtgacggcgaggtctcggagacgacagttcagaagcagctcgacatggcacaagaaaatccagcagcggtcgcaagcttgtcatgccggcgacgtcggtgagcgtagggatgtttcctcctcaccctgaatccatgttgctcctagcaagggtggcgtctgtcatctccttgtaaaatcaaagtgtttttgattgttattctgtgatgaacaattggcatcgaagattattggttttgatatttggaatttatttttgaagtggttttggagatgattggattttacgggtgatctacaagaactgttgtctgtgatttggtccaatcagaccgggctgtgtgtgccggttagaccggcgttgattgagcggtcagaccggccagcccgcggtctgactggccgactccatgtcagtttcgatttcgggttgtttgtttggatatccgtgattgtttcatgtttatggcttctagatggatactatacatatataatactgttgtttgttaacaatgagtcaagttggggatagcttggtcttggaatatggtttctttgtttaattcatgtctaggtgacttgatgcctcgggagagtattgccggtgatggatcgggagtcggcttggggataagacgatgtttgtgacggtcagatatcttgcgggatacttaggctagagttcaatgcacgtggttggtgaagattccatatggcatacaatggaggtattgtgtgcgtatgggatgaggactcgaatttgggaggagtccaaatttggtttgattggagtttgtaaagtttgtttcttgtacgggaaggtttcctatgtggattaggattggttcatggctttatgctgcctacctcatgtataaatagtgagggagcgtgaggcttcccggtatcgcttttgagagcattgagttgatagtttagttagggtttcgagtttagtcgagattttcataagaagtgctgttgttgcactttgtaaacacatagagaagtaataaagttgtcatctactctgagagttcttcgatttgtgtttgctacggttcggcggtctaaccggcgacacaccggcggtcagaccggcggcaaggcaatggtcagaccgacggcgtacctgcggtcagaccggcaacggtgacaggaggcagaggcaatcttcaggcggttggaccagcgatcaacttcggtcagaccgacggtatcaactcagtcagaccggcagatcaatctctgtcagaccgatctccgtcaaatttgagggtaactttttattccgcaaaaagtttgggtttttgggtataccaaccattcacccccctctggttggcttagttcttgtgtttcgatccaacaagtggtatcagagcattgttttcttctttggattttaactgatctagagttgttttgccatggctaataaatttacaactacgccccatgtcttcgatggaacggatttttcttcttggtgtagtaagatgcaatcttacattatggctgaggatcttgatatttggagaaaagtttctaatccttatgtgattcctgatcaaattaataatgctgctttaaaaattgaatttgaaaataattgcaaagctcgcaatattcttttgagtgggatttctcgttcggattatgatcgtgtttctcatcttcaaaccgctaatgagatttggattgttttgagtaattttcatcaaggaattaccaatattaaagaacttcatcgggatcttttaaaaaaggagtatataaaatttgagatgaaacctggagaagctttggatgactatctttctaggtttaacaaaattttgagttatcttagatctattgattgttcttatgatgttaattacacacaatctgaggtttctcgtcactttttgaatggtcttgacatgtctatttgggagatgaaacttacatcaattcaggagtatgttgtcacgcccgaaatttctatccaaaattccaaacgcttacatgtgtgtgaaccctcgtccaggaatcagccgaggcacacaataacaaattgataatagagtacaattattactctaattaataagcgaataaaatgtcattacagaggtagatagttcctctcaatcaataaagatctaagcagcggaaaataaaataaacggcgcagacggctccactccacagacagcttgaccaaggctacacctaatcctccacaccatcagcatcattgtagaactcttcctctgatgaatgattgcaaggtgagtatatgacatactcagcaagccacgcagcaaatatgcaagtgcacaggataacaaaggatggcataatagggttttatttgcaaaagcagcatttagcaaacatttctgaatttaataaaacagttaagtattaattaaacaatattaaatcaacgctatacaacataccctgttgtataggcccaaccattctgaacaaccatcccggctgcacagttctatctccaaaccaggaatgtaccattccaaaccaggagctaatcagattattaccagttatagcatcatttactatggtgagaagggtgagactaatcacgaaagacattgttagacccgcccataaccgcgggcacagctattcgaatagttttactctgatcagaggtgtaccactgtacccacaagacacaaccccacatcatgtcaccatgtgcctcaataccaccacggtacctcggaaaggagttgtgacaataccccttgcataacacaatccaccgcagcgcacctttcctggatcataatcacccccttataaacaaggcatggactccccagcgacccccgtgggcttatctccgccgcttctcagtctggtgccccgcaatgaaccatgctatacaaaaggtaaagccgttgcccatgctggcttgtggttggcacggttaatgtttcacaaccgaaactcgtgaaccggtccttaattgtcatgagcacgactctcaaaaccatgtgctcacaacccaccattatcaggttttagttggcacattaattaattaaccaatcacgattgaccatcgtgagctatcattaagccatcattaaataatagtgagtcataagttatcccaatagtgtgctaatgtttctaagcatggctaagcaattatatctaatatctagctgaaccaatatataaagctcaactagtcaagttataataacccaaggtatcaaggaataaagtaatcaatgcaaacaaactcattgtttataatcatgaatgtatttatttattacatgattgctgcaaactcccgattacacaatgataagtagcgaactgaaaaccacaaacatggctactcattctgattctggagaggtatagctggcattgttctagtgactgcatccttgattggttctgtgatgatgtgataggactgcatattgctatcattcacaggagaagcttccttctgattgctattcgaagcagagaacggtcttctgcttggtatcgccctcctgagattgattgccctttgctcggcctggagtaggtcggggagagacacaacttcttccatcgatgacaattctttgctgaggctgtcggtgcagagaatggttggtgctgaaggtattattgctatgatttattgcagagtcaggtgcagcaggaggagcattggtgctgtggatgatatcgtcgatgttgctgttggagctaactagctgatgagacaatcgtagggttgttcgttggatttctgcggtcttggtcaacaacacactgagttggcaatccttgggcacatggtttgtaccttcgcacagaaaacatgtgaccttgcgggtgggacattcacctggtggatggtcttccccacaatgagggcagagtgtgagacacatgctagcaatgtgtccaatttctccacaacggttgcatgcttttgattccatctcttcctcaccgagatgtcggggagactcatcttcataatccgaggagacttgatctgacccttcactatcatatactctgccaccatggcttaggaggtgctgggtcaactgtcgtgcacctcggaaggtatttcctctttgacgtctaggaatagttatccctgctggaggccattcggtgctggtaatagtcatcttacgtacttcttcttcagttcgcatcggcgcttttctcttctgattcttactcttcttgcctttggcttgcttagtgtgtgaccccacgtggtacgaaaggctagaaagaaagcatttcccgggattcaatggattctcttcattgggctctctgctttgcacactaggctgcaagcttgacttggtgcgaggaggctggcttagcgatgtctgccctgctaaaccaaaggaaggggcttctttagcatatacccatggacaattcagggcatagtgtccttgttctctacaatcatgacaaaaggggacatgctcttctggcatgggaagctcattggcctgggtggcaaatgctcgatcaaacacatacttattttggtcttgacttccaaccaatggtagctgtgaactaagccgcatacttggaatggaccaagggtgtgccctggttaactctcttgaggccagtggtggattgagttgaaaactggagttacttgaggcatacccgctgacattctttcctttttctctgttaaacatctgttacagggattgaggtgagagagaaaacaagccaggaaagaatagaccagaactagagacaggaccttaaaggaactaactcttcttgctgatgtgttgtttgtttcacttattctgcaagttgattaagcaaacaacctagcatggtcacatcacagcccaccgatgcaaaccacacactacacacacaagcaaggaaacacacgacaaacgaaacactagagggtggcttaggttctgcgacgagttcccaagatcttcactccttcacagctggcttcactgcttcctccacttcgctagcggaccctgcggtcttccggaccttcggcgaacaattggcgacatcttcttcttcgcaaaactaaccaactagtactagttgaaatctgaagaaggaagaagggagtaaaccttttgcaaatagcacaggggaaaggaggaaaaagggactttcggaaatagttttatgtataaaatatgtccttaggttttatccacttggcttatcctacagtcgagatggctctgataccagcttgtcgcgaccgagaaaattgcattttcccgaacgctagtgtattaatccccgtcccaggaaaagccggggtacaccatacaaacatgatataaaagacacatctttattatatcgataatatttacattattacaaaggcacttaaggcctgacaatcaaaaataaacagcagcggactagcgggcctacggctccatcttcacaggcgctcaactggggtataagccaagactccacctaagacatcttctccaaagcttctcttactgaaggggggagaaagattgagcaagaatgagtacaaccacagtactcagcgagccacaccggcggatgcacgattaatgcaagggggtacaaggggtaataatatataggggttaagttttgcagaaaacggcatttaaaaatcacttagttgcccaaagccattttaaaaagacgatcctagagctacacagtattattaatcaaggtcgtgaacccgcacgaacctgccttaacccaaggcctacgatgattcagaccgaactggcaacccgaccctgggtcccagctcgtcccaagccaacccaggccaaccattccacattttagctgttaagcaaattttaagaattaaaacactaacttgggtacattgctcggcttgcccataaccgagggcgcggctattcgaatagattatactctgatcagaggtgtacatctttacccacaagacacatcttcctcacgtgtaaccacgtgccacataccaccacggtatacggacggaagacgtgacatagttcccaacccatcctagccataaacaagagtaccgacccaaccccacctacggccggaacctccgggacaggtaggcaggattgagcccctagcagcaggacaccagccctgtaccatgacatctcgactaccgggccacagctcgtgtagccttcatttgtcctagagatgtccatcgacccccgacttcgtccatctccatccgtgtacttttgtttataaccagactgagccacaaactaagccttacccactagacatgtggaagtacggtagtgctttgcaacagaggcccgagcttaatccttatagtacccgaggtacgactagcaaaacccaaccacgcacctcgagcccagcctaaaaccattttgggggttttgaatagagggggaggtgtgtgtccaattccaacaaaagccaaccattccaaagtatccaagtgatatgaatattcccaaagtctaaagttataaaaccacctaatgttgcctaattaatcagcgaagcatctacctaaattcatactagtggaaccatgaatagagtacccactagttggggttttgtttaatctagggtgaacaaggtaataatatcaatagcaataatattaaggtcataacaaaggtaaataggcatggccaaataaaacagtgataacgcgggattttaaataaagcgataatgcaataatttaaatcaaaataattttataaactgggattcaatatgttcaaggatgatgtgacttgccttgctccgggagaacggccttccgaaccttcggcgacgaccacgaaccacgcttcgggaacctccggaacgacgaaagctacgcgaagcacacaagcaaagctacaagcctataaagaagcaataacaatacataaaaagaaagcacacggttctttaggttataacaaacattaggagacttgaacgggtcgattcagagttcgtatgaccaagatatgatcatccgaagtttaatgctgttacatggagatttgcggattattgtaattaggttttgcaactataaaacatgtggaagcgctagcctggaaaagacaggaaggctgcgttgttgacatgcggaccccacatgtcaacctaaaggaccacggtagaccgagtacacagagacggtccacgggtcgacggaagcggaccccatgtgtcaaccgaggcgagtggccaacaaacggactccactagacaccacacgggctgcacatgtggaaaccatgctgctactgagcggacacactaacacggacaccacacggtcaccacccgcacacgtgaacgactaccgacaccggtacacgggtaccggggtcgacaaccgcacaacgggtacggggcgacaccgaaaggacgagggcggggcagcaagaggagagaccttaccaccacgcgacgaggcgtgagaacgacaacgacgaacgggcgcggcggagacggacggcgagggaacgacttcggcggcgatccttgaacgaaggcgagacacggccggcacgaggcttgacgacgcggaggcgaggacgaagacgacgacggctacagcgaccttgacgaaacaccgaggacggacgagaacggcttgacagagggacgaacgccacgacgaccgggaacgacgggaggacgacgacgacgacgaccgggaccggcgaggagacgacgagggcagccggcagcggctgcacggaggcgaggacggcgtggaacacgccgcagcgatgcccacgacggaggcggcgccgcgagacgacgaaccgggcgaggatgaacggtgaagacgacgacggataccggcggtgttcggccgaaggggaagcgatgccgaggacgacgtcgcggctgcgatgccgaagatggtggaggtgtggccgaccggtgcacgggcgaggagggacgggcggccgaacaactccggcgaggcggatggagaggttcgcggcgatgtgcggcggcttccgggcgaaaccgaggggtggacgaggtggagggctacgtcaccgtgccgagggagggacggcagcgccggctgatgcacgggcgcggcggaagggggctgccggaggagacgtcgacgaggaggaaggagaggccggcgcgggcgacggcgttccggcgaaattcgggcgacgccgtggcctggccgggaaagaggacggcactccggtgccgggagaggtggtggcgacgtcggccggcgcacaggggacgcggcagaggcgggcggaggcggaatcgtggcggcaacaccacggttgccggcggggaggcacttccggaggtctccgcggaaaacagagggtaggccggcgaagaggaggcggctgcgatgctggaggaggcgacggcgcgaccggacggcgctccggcgaggagggagaggcggctggaggcggccggaggcacgggagagagaggaggactgcggggagaggtgatacgaccacggggagactcgggatgaggttaaaacgatagaacggaggatggggattccattttatgggatgggggagggagccggccacgggaggagcgggaacggcggcgggaaacacggccggcggcaatggaaggcggccgggaatggcgcggccgttcccggcgattgggggcgccattcaaggggaaattaagggggaaagagagatgagggaaaggggattaattccccccaattaattttggaatccaacgcttaaatcgcgcggattcgagggaggaacgaagctagggttcacgggagagagagagagaggagaccgggcgggaggaaggagacgaccggcctggcgcgtgggccccacgcggtcgggcgctcggtcagcgcacgcgcggcgtgcgtgcgcgggaggggagcggctcaggcaggggcacggcgtgggccgggcggccggcccaggaggagaggaggggaggggtggcccggggagagagggaggaggagggagtgggccggggaaggagggagggaaggagagggagagaaaaagagggaggagagagggacttcgggctgggcttggcccaaaggaggaagaggatttatttttaggtttttctttttaataaactttgataattgtttttgttgcttaataattatttccggtgttctgaaaattcaagtaaaatttgagggctcattttagaccaaggagaatttaacaaaaattctccgggccacatttgaatttttcttgtacgtattttagtgtttgccaatttcttttcgaattttaattaattctattattccttttggaaaatgatttttatttcgggatgaatttatcaggacgtgacattggggaatcaatatcctgaatgagaaaagaagggaaaagaaaactcttcagggaaaattggaggagctagataggaaagctttagaagatgacttatcccctgaagaatggaattagagatatgaggtggaaagggatctagaacacacttataagatggaagagttgtactagcataaaagatgtggagaacaatggatcttggagggggataggaacactgagttttttcatagggttgctaatggcaggaaaagaaagtgctcaataatctctttgatggatggagatacagagctgactagtaaagaagatataaaaaaaatcatattgtctcttattacaaaacccttttttagagctgatgttttaactatacccacttggctcgagatatctggagtggcggtctgaacctttctgctgacaacaaagagagtttgattagacccttcaagattgaggagttagataaggcgcttcaggaggcaaaattgaacactgctcctagtccagatggttttagcatccttttttgcagagcttttggcctcaagtgagaaatgatttgtttgagatgttgcttatgtttcataatgaggagttagatctcaagagactgaactttggggtgatttctttgattcccaaaaacaattagcccacagacattagacaatacaggcccatctgtgtgctgaatgattgcttcaaatttctcagtaaagtggtgaataacagactctcagaggtagctaatgatgtgatttctcctacccaaacaaccttcattcctaggagattcattcttgagggctgtgtgacaatccatgaggtgttacatgaaatgaggactaaaaatagagaagggattattttaaaaattgattttgaaaaagcatatgatagggtcaaatgggagttcttgatagaggttatggaaagaaaaggtttccctcccaaatggattaattggattaagtcttgtgtgataggggccgggggagggtctgcattaacattaatggggataggactgagttttttagaacctttagaggccttaggcaaggggatcccctttctcctctccttttcaatctggtcaatgatgctttagctgcaatgttggataatgctaagagaaatggagttattagtggcttggttcttgagattgttcaaggggattacccatttacaatatggtgatgatactgctcttttcattgctaatgatgtctctcagattactgccacaaagtttatcctttattgctttgaagagatggctggtctaaaaattaattaccacaagagtgaggttttcactatagggttagaggaatctgatactattggagcttctcaaatgcttaattgtcctataggtcactttcctatgaaatacttgggcttgccaattagccctgagaaggttttaaatcctgattttgatttcttaggtcagaaactagagaagagattgggaaattggggacctggtagtctttctcatgctgggagagctgtgcagattaatgcttgtatgtcctctattccttcttatgctatggggttctatcttcttcctgaaggggtgcatcagaggtttgacaagataagagggaggtattactgggctggtaacaaattgaaaggtaaatatcacatggtcaaatgggaagacatggcttttcctaaggactttggggggcttggttttactgaaacaaggaggatgaatgcagctctgctggccaagtggattattaagttggaatccaatgatcagagtttatgccttcaggtgctgaggggaaagtatatgtaggaaggtggtatgtttcagtgtaaatctgggaatggttctcaattttgaaagggtttgttgaatattagaaagtgagtgcagcttggtgctgaatgggttttgggatgtgggaatcatatctatttctaggaggatttctggttacacaattgtcccttgtgagttatgtatccaaatattttcaaaatttgtaatcaacagaaggtgctggttgcacaggtcattcagagaggtgtggagtgtctcactttaggaggtcctttggccctatagaaagtgtagaatgggacaacctgaaaaatgacatagagaatgtgaatttgagtaatgagcctgacaagccgatttggggtttagcctctaacagaagattctctaccagatcactatatagagctttaacttttagaggtattagagaggtgaactcagagttgtgggctgccccctgcccaatgaaaatcaagcacttcctctggcttgctctaaaagatagaattcaatctgcagagaacctgaaaaagaggggttaggagggttttgaattctgtcaactttgtgggcaaattgagactactagtcatattctttttaactgtggcatggctaggatggtttggtgcatttgtagagatgctttgggatggggttccatccctcgaaattttgatgagttctttctattatgccaatgtgactgtaacccatcttctatgcatctgtttatgagtttgcttgcggctgtttcctggaatctttggctaactagaaacaatatggttttcagagataagatcttgtactccccactaactgtcacagcctgatttttcgttttaggatttataaattatttaataaattattaatagaatttatattaaatgttctttaatttacaagtgaagttaaatgtgggaaataaaattttctaaatataaagcatggatggatttaatttttaaattctccatgattaattatactctctgaaattttctcagatttttcggagctcaattcctaaatgatacaaaggacagttcagtaattagttaatcaataatcattaatgatttaattataattatgttaagtgcttttcttgtttaaaaatccttaaattacaaattgttgtttaattggaattagtagaaatgatcttaaaagcttaaaagaaaagatctaattttaatttgttaaattctaagataaaagtgggctagataaaatttcattaaatactttacttgattctatagttcctaaatttttctgggatttatttgagccaaggaagtatttttaataaatggaattgcatttcatgaataatttaaattgaaaaaggttttaaaatctccctttttgttttgggccgaaagtcggcccaaaagccctctctctctccccggcccaagttagcccaccagccgagccgccgctcgcgcgcgcgctctcgctcgctgacaggtggggcccacctgtcaggaccttcttcctcctcgcgccgtcgcccggccgagctctagccgagccgcgccgccgtctccttccaaatttggtcgcacctttcctgctccggccaaatcatttgaggggaaataatccccttgatctcctctatcttttcctctatagaaacttcggataaaatcgtttggaaaccgatggatttgagctcgattcggattcgtctctctcctctaaccctaacctttccatcgccgtcgccggtcgctatgggcctccgtcgccgcctcctagcccctataaaagcatccccgggacctcctccgtccgccgccaccctcgccttagcccgccgccgtctgtagcgccgcctccgcgtgagatcttgcgccgccgtcgccgccgtttgtccagccgtgcgtcgccgtcgctccggtcgtcgtcgtcgctcgggaaggccgccgtcgtgatcgccaagtcgtcgccgtcctcgtccacccctccgtttccaccgaggatcgccggagcatcgccgtcgtcgtcaagccgatcgtcgccgccgcttcatcctcgtcgccgtcgtcgtccggttgtcgtccgccgccgttcgtttctcggtaaggttcgccgcgtcgcccactacccgttggtgtcctccgtttgcgccgctgcgccgtcgttcgccggcgagcatgcaaggctgagccgccgccggtgatgacgtcaccgctgacgtcatcgacgccgtccgccgtagaccacggtagaccgagttgatctcggccgtccgttttggataggatagatctcggccgcccgttccgtagaccatcgccgtgcactcggtccaccgtgagccgagcccactgacgcaataattcccttttccgtttcaaaaataattctttattgcgtcataattcaattaaaatccatataaatgttttaatccggtttaatctttaaaaattcataactaattcatattagctcggttttagttggttcaagtctctaaagttgtataaaataaagatctacatattaaaattatccataaattgaattaaatttatttaatcctttttaaataggctttaattagattaaatcttgtaaaattcgtaattatttcatatgaagtcagaatgagcccgttcaagtctcataattcatctaaaatcatgatctacacatttgtttactttatatgtattggttatttggagtttcttagtctttttccttggtttgcgttttagcttgtcgtttccgtcgtttcgaaggttcgcgagtgcgccggaagtattcaagaagattaattgaagacccgttattgcaaggcaagtcacacagatcccaaacacagttcctttgagcatgctgatcctatatttaaattctctatttatttcaactgtgcatttattttttaatgtcatcgggctctgtagacccccgtttttataacaggaatcaatcgtgtaaacagtaccatttccctggatcaagtagtctggtacacacgagttcatagccgagataccaaatgcacatacacgagagtctagtgcgaattattacaacataagtctgcaggcgtagtcttaaatcatcagaccgatgtcacatcctgattttttcgttttaggatttataaattatttaataaattattaatagaatttatattaaatgttctttaatttacaagaaaagttaaatgtgggaaataaaatttcctaaatataaagcatggatggatttaatttttattaaattctccatgattaagtcaactctctgaaattttctcggatttttcggagctcaattcctaaatgatacaaagaacagttcagtaattatttgatcattaatgatctaattatttttgttaagagcttttcttgtttaaaaatgcttaaattataaattgttgtttaaaaggaattgttagaaatgattttaaaagcctaaaagagaagatctaattttaatttgttaaatctcaatataaaattgggctagataa

SEQ ID NO: 28225 - DNA, 4601 bp, Oryza sativa
ccacgcggtcgggcgcgccgtcagcgcacgctcggcgtgcgtgcccggaagggaaccgtctcagacagggccgcggcgtggtccgtccgaccggcccagaaagagagaagggcaggggtggcccgggaataaaggaagaagaaggaagtggcccggggaagaagggagggaagcagagggagagaaaaagagggaggagagagggacttcgggctgggcttggcccaaaggaggaagaggatttatttttaggtttttctttttaataaactttgataattgtttttgttgcttaataattatttccggtgttctgaaaattcaagtaaaatttgagggctcattttagaccaaggagaatttaacaaaaattctccgggccacatttgaatttttcttgtacgtattttagtgtttgccaatttcttttcgaattttaattaattctattattccttttggaaaatgatttttatttcgggatgaatttatcaggacgtgacaaatccaccccccttacaagaatctcatccccgagattcgaggaggctagcatgaagataggttgggcggtattctcttcttgtctgacttcttccgtcgcgtcttttataacaaacttgcctagcaaaacttctccactctaggctgcttggctcgatcccttgttgtagatggaatcttctcttcacctgacttgtccctggttgaacctttagctgacttcgactgggttgcggcacttgaagatggggcttcagttccagaacttcgcatagttcatatctttggagtcaacctcatacaagttacccacttcatgtcatgcgtcgagatcagctcgtcattactaggataccatgcttgtcatcatgagaataccatgcttgtcatttacttctaacttgccaccaactgcctcatattagctttcctgctctccgggtgctagctacttctgctattcgatgcaagggtcggtaactttgcctttgaattatgtttctaaaaagaaccaacttatcccacttgacatgctttgacgtctccccaaatgactttactactggacctgttatggtatgatcgttatcctaccaaatctgaagcttcgttgttagatgtgattttaatctgacctctgtagactatcttcgaacatatcacttggttcataactgggaatagctcccacgaacaagcaactcggattcactttctttatgtttagtttactttccactattctcttcatgttgtcatcatttagcattcaacgtattcctttacaccttcgaccttgatgagttccttcccattggatcatctcccaagacatggcattgcctggtaaccggtgcctgcacttttcactccgtgtagcatctgataccgagttgaagatttcactccttgccttcatagaaacacttttacctaggtcatcttgcttactcacagatttatttttttttctctcaatgacaaggtgactgttgcagggcgattactgtcaggagtcttccttgtgtgatgcagagcatgtttctgattatcctttatcaatcacctttcggcctacgtctttcctgctagagaacatcttggccaacctcttttatcaatcatctttcggcctatctctaacaggtggtactctttaatgtgggttgcggacacttctggtggcgatggggtcctttggtctgctgcctttcagtgaaaccttgaagtgttttcgccaaaagctatactgactgtcattgcctttgatccgaaaaagacacgtgtgaaactcttagtccaaacaaatgtctctttggttaatcgcttgattttcttttccatcatcaggttggttattaactcgaggttagaacatagttcctctgaaatgagaccctaggtctcctttgacagtaaacaattatacacataatcccatatcagcatcttctgaaagagtcctcatagaacttgtttttattacacatttctcccatattacatgaatacgaggcactaccttaaacaaaaagggaaggtgcttaacatcggtacattgtatcctcaacatgaatcatccataaacatagtaaactcactgtttatagacatgaatatatttatttattacatgattgctgcaaactttcgattacacaatgataagtagcgaattgaaaaccacaaacgtggctgctcattttgattctggagagatatagctggcattgttctagtaactgcatcatccttgattggttctgtgatgatgtgataggactgcatattgctatcattcacgggagaaacttccttctgattgctgtttgaagcagataacggtcttctgcttggtatcgccctcctgaggttgattgcccttcgctcagcctagagtaggtcggggagagaaacaacttcttccatcgacgacaattctttgctgaggccgtaggtgcagagaatggttggtgctgaaggtattattgttatgatttattgcagagtcaggtgcagcaggaggagcattggtgctgtggatgatatcgtcgatgttgctgttggagctgactagctgatgagacaatcgtagggttgttcgttggatttctgcggtcttggtcaacaacacactgagttggcaatccgtgggcacatggtttgtaccttcgcacagaaaacatgtgaccttgtgggtgggacattcacctggcggatggtcttcttcaccatgagggcaaagtgtgagacacctgctagcaatgtgtccaattttctccacaacgggtgcatgcctttgattccatctcttcctcgccgagatgtcggggagactcttcttcatcatccgaggagacttgatctgacccttcactatcagatactctgccaccatggcttaggaggtgctgggtcaactatcgtgcacctcggaaggtatttcctctttgacgtctaggaataggtatccctgctggaggccattcggtgttggtaatagtcatcttacgtacttcttcttcagttcgcatcggcgcttttctcttctgattcttactcttcttgcctttggcttgcttagtacgtgaccccacgtggtacgaaaggctaggaggaaagcatttcccgggattccatggattgtctccattgggctctttactttgcactctagcccgcaagctaaaataagtgtgagaaggcaggtttaacgatgtctgccctgctaaaccaaaggaaggggcttctttggcatatacccatggacaattcagggcatagtgtccttgttctatacaatcgtgacaaaaggggacatcctcttctggcattggaagctcattgacctgggtggcaaatgctcgatcaaacacatagtgattttggtcttgacttccatccaatggtagctgcgaactaagcagcatgcttggaatggaccaagggtgtgccctggttaactctcttgaggccagtggtggattgagttgaaaacttgagttacttgaggcatacccgctgacattctttcctttttctctgttaaacatctgttacagggattgaggtgagagaggaaacaagccaggaaagaatagaccagaactagagacaggaccttaaaggaactaactcttcttgctgatgtgttgtttgtttcacttattctgcaagttgattaagcaaacaacctagcatggttacatcacaccccactgatgcaaaccaagcgctacacacacaagcaaggaaacacacaactaacgactctaccctagagggtggcttaggttctgcgacgggttctccaagatcttcactccttcacagctggcttcactgcttcctccacttcgctagcggatcctacagtcttctggagcttcggcaaacaactgacgatgtcttcttcttcactgacctgaccatccagtactagttgaaatccgaagaaggaagaagggagtaaacattttgaaaatagcattagggaaaggaggaaaaggaactttcgcaaatagtttcatttataaaatatgtccttaggttttatccacttggcttatcctacagtcgagacggctctgataccatcttgtcgcgaccgagaaaattgcattttcccgaacgctagtgtattaatccccgtcccaggaaaagccggggtacaccatacaaacatgatataaaatacacatctttattatatcgataatatttacattattacaaaggcacttaaggcctgacaatcaaaaataaacagcagcggattagcgggcctatggctccatcttcacaggcgctcaactggggtgtaagccaagactccacctaagacatcttctccaaagcttctcttactgaaggggggagaaagatagagcaagaatgagtacaaccacagtactcagcaaagccacaccggcggatgcacgaataatgcaagggggtacaaggggtaatgatataagggttaagttttgcagaaaaccgcattaaaaatcacttaatttgcccaaagccatttttaaaagacgaatcctagagcttcacagtattaataatcaaggtcgtgaaccccgcacgaacct

SEQ ID NO: 28226 - DNA, 552 bp, Oryza sativa
tcgccgccgcccgaaaccctagcgcaagccgccgccgtctccttccaaattcggccgcgcctttccttctccggccgaattgattgagggcaattgatccttgagatctcctcttccttttctcttttggaaacatcggctaattttctttggaaaccggtggatttgagttggattcggattcatctctctcctctaaccccgacctttccttctcgtcgccggcagccgtgggccttcactgccgcctccttgcccctttaaaaggacccccggtgtctccgctacccgccgcctctctcgccttcgcccgccgtcgtgtgtagcgccctagcctcgtgagcttttgcgccgccgtcgccgccgttcgtccagccgtgcgccgccgtcgctacggtcgtcgtcgtcactcgggaaggccaccgtcgggatcgccaagtcgtcgccgtccccgtccgccgcttcgccgtcgccgaagatcgccggagcaccgtcgccgccgtcgacccgatctccgccgccgcttcttcctcgtcgccgtcgccgtccgtt

SEQ ID NO: 28227 - DNA, 761 bp, Oryza sativa
tgagatctcctcttccttttctcttttggaatcatcggctaaaatcgcttggaaattcgcggattcgagttcgattcggatcagcctctttcctccgaatccccgatctttccatcccaccgccggtcgccgtgggccttcgccgtcgccttctaacccctttaaaaggacccccggtgtctcctctacccgccgcctctcttgccttcgcccgccgtcgtgtgtagcgccctagcctcgtgagcttttgcgccgccgtcgtcgccgccactccagccgtgtgccgctgccgtttcagctgtcgccgtcgctcgggaaggtcgtcatcgtggtcgccgtcgggatcgccaagtcgtcgccgtcctcgtccgccccttcgccgccgccggacaccgctggagcaccgtcgccgccgtcgacccgatcttctccgccgctttgaccacatcgccgtcgccgtccgttggtcttccgccgctcctttggtcaccggtgagttcgccgtgccgtcgttcgccggcgagcgtgcgccgtccgagctgccgagccgctcgagccgccgccgccggtggtgacgtcatcgctgacgtcatcgtcgccgtctcccgtgagccgccgtggacccgatcgatctcggccgtccgttttggatagggttgatcttggccgtccgttcccgtgaactgtcgtcgtgcacccggtccaccgcaaaccctagccgctgacgcaataatcctccttttccttttcaaaaataattc

SEQ ID NO: 28228 - DNA, 2468 bp, Oryza sativa
agacaagttgcgaaggagaagacgtttggcttataccccagttgagctgcctgtgggagtggagccggagcttcgctagattttattttccgctgcagttttcttcttggtgaggactaagtgcctcttaagtaagtacttatcgttttagttaatttgatgaatctgtatattaaattgtcagtttgtgtacctcggctgattcctggacgaggattttatgcacaaataagtttggaaattacttgtgaatttccgagcgtgacaaccgagcagtccggaatacatcccacagcagaaatagataaagcagcggcatgccattgccacaggcaacgaccgtaactaagacctattgagcgccatcgtctgcatcaccctcctggtaataggcatagggatcctccgaagcttcatctccggcctctgattaagtttatatttgcaagggtgagtaccaaccgtactcagcaagccaccacatcaacaatgcacatgataggggtatttcaaaggatggctatggttcttttgcgcaaagcaagttttctaattcttttcacaagcctaagacctagcattgactgatcaaattttagtactagtgtttatatttaaacaacgatggttctgtccatcatccattgtgatcccaaggatagcttcccgccattgagtcgtcatagttttctgagaacgtccaccttcccccttctcaggaagtggctccaacagcataaaattcatcatgcaataacccttcccacacaagttaagaatttagagtctagccaagtataatacatgtcccggtgctcaataaccgcgagcacggctaatcgaatagatttgttttactcacactgcagtggatgtacactttacccacactccgcgactgcccaacacatgagcctcgtcccaacacatgagacgtatcacggcaaagcttttcgataacctcgcattggcagtacccgctccatgaacttttcatcctcatgcactctaggtgtacacagtttctagcagtgagaggagttctggcgcaccgggaagggaagactcacacacatgcattaagttataattatgtttaaattatcacatggcagtcctaccaatggtgacaccactgtagagcccctgccttacacatcaagaaaccactatgcatggatactgcctccgctcagctatttactctgctaggtctatccccatacgagaagtgtggttgtacggggtcgtttcatgcttaactttatggctcggtcctcaattgaccggggacggtactagcctttcccagataccacccaatcttaccgtcggccccagtctaaaacaagtgtttaatttcatttctattttcacaattcatgtcatcatatcatggcaatgtggcgctcatgtttccacatgccgcatctcaattaccttcccaaaggtaattgcccaagcatatagtatttgataaaatatgagcatgcatgaatctaaaatagcatttctaagcaattgtcatagttgactaggggctcgtacgtatctatggttacaaagatttaaaggtgaacaataatcaaggcatggcatatttcacaagtgggatgttcatcattgcatgcaatcttatttgtaaacaaaataaattttgcaatcgggatcgacatgctcaaagaatagtgatgacttgccttgctcaaagtcttgcgggtcttgaccttcgctcggatccgcaactccctcgggctctacaagtacgtgcgaagaattgatttgaattccattagaattcaaataaaatccaataaagaccaaattgaaaaacgagcgcgagaggcgaattctatatcaactatattattcgtgaaataggactattcctcaacctatgatattttgtgtctcctaagtaaattcctaagaattcaacgtatttatttagcgcttaaataaatctaatttcttacctaaaattaattactcatagagattaccaaaatataatttaattttgcaattttacgactataattaatctatacttaaataattaattattttaaattttctatttttattaacctccctatcctatttctctttttttttctttctttttctctcctctctttctttttctttctttttctctcctctctttttccttccccttttcttttctttcttcctcctctccctaccggcttctccctttctctctctctcggctttttgcccacccgggcggcggcggcattggacgcgaggggggggggggaaagacggctcaccggcggcggcggcgcaaggcggcaacgctcggcaccacacctggcgcggcgcggtggcttcgaggcgacggcgcggcgcatgaaggcggcggcgcggcggcaccactgcggcggcgcatggagaaggaggagagagggggaaaatggagaggatgggtgtggggtgga

SEQ ID NO: 28229 - DNA, 7371 bp, Oryza sativa
acgtgacgacggcgcggggctcgagacgatggaacgccagcgcggggctcggggcggccacgcgcggggcagagtggggggggggttagggctagtgacctcaatcgaacacctttggggcaatgaacagtgacttttcctatttttccaacttggttgtttttcctattcaaatcttgtcccaatatttctaatttttgctcaaatcaagtttacacaatatttgtgttgctctaacctagattatcactacccatattttatttttatttttatttttaatttattcgaatttaattagggttaattcttattccatcgcacctaaatttaattgttaccaatatggccgcgataatattttatttatttccaacctcacctaatctatattttaattagttattttgccaatttaattttagtgtttattcctaattaattattccttattcgcgatcggtaaactttgaaaccaaattccaataaaataggcaaataaaatcagcatgatgcaatttattaaaaagtttttgaaggcccatatttttagagttttgattttcgttggttgaattttcaggatgttacaaacctaccccccttaaataaatctcgttccgagatttcttaccggtcttcgaacagatgcgggtattctgtcttcaagaattcttcactttcccaagtggctttatcctcagtgtgattactcaattgtaccttgtacatatgccacactttggccctagtcctcttttctacttcatccagtatccgaactggatgctctgggtacgtgagatcattgctaatatgaatttcctccaacggagcttgctcctccggcactcgcaagcacttctttaattgggacacatggaagactggatgcacatcggcgatgttttctggtagctgtagctgatatgcaacttctcctcgtctagccgtgatttgaaagggtcccacatatcttggcgctagttttcctttgaccttaaaccttttcgttcccctcatcggagaaacctttagataaacataatctccttctttaaattccaggtttcttcttcaggtgtcggcgtaactcttctgtcgtgattgagccacttttagacggtctcgaatcaggcgaaccttctcttcggcctctttgataatgtcgggtccaaataccgcacgttcacctgtctcggaccacattagtggagttcgacatcgttgaccaaacaatgcctcattgggtgacatctttaggcttgcttgaaagctgttgttgtaggagaattcggcgtagggcaaacatctctcccattctttgctaaaatccaatgcacaagctctcagcatgtcttccaggacctggtttgtcctttccgtttggccatccatctgcggatgataagctgtgctaaaagcaagataacttcctagggcttcatgtactttttcccagaaatgcgaggtaaactgtgtgcctcgatcagatataatccttttaggcacaccatgaagacacactatcctggtcatgtacaactcggcgagtttagcactattatagtttgtcttgacgggaatgaatcttgccgtcttggtgagtcgatccacaatcacccagatggaatcataccctgttgtggtcttgggcaacccaactatgaaatccatacctatctcatcccatttccattcgggaatcctaaggggttgcaacaaacctgccggcctctggtgctcagccttcaccatctggcatacgtcgcagagcgctacgtattcggtcacatctctcttcatgttgggccaccagtaaccctccttcagatcctggtacattttggtacttccggggtgtaatgaatatgccgattcgtgagcctcctttaggattaatcctctcagtccaccctgttcgggtacatagatcctctttttgtaccatagaacacctttttcatcggttgaaaattcctttgcacatcctgcagctaggcgtcccttcacctctcggatttcctcgttgtccttctgggcttcttctatttgggttctcaaaagaggttgaacgtccagggtgtttatctatccatgaggtactatatgtaggtttagttgagccatctcctccttaagctcaggaaccatcccttccgtcctcagatgatggcaatggctcttccgactcaaagcatcggccacaacgtttgccttgccggggtgatagtgaacctctagatcgtagtccttgattaattccagccatcgccttagcctcaagttgagatctgactgggtgaaaatatacttcagactcttgtggtcagtgtagatatcgcaatggtttccaatcagatagtgtctccaaatctttagcgcatgaaccacagctgcgagttctaggtcatgggtggggtagttttcctcgtgtggtcgcaattgtcgtgacgcataggccacaacctttctgtcctgcatcagtactcctcctagtccttgccttgatgcatcacaatatataacaaagtctttcctgatgtcgggaagaactagaataggcgccgaggtcagcttttctttgagctgctcaaagctttcctgacactgttctgaccacacaaacttcttttccttcttgagtagttgtgtcatcggtcgggctatcttagagaacccctcaatgaaccttcggtagtatccggccaagcctagaaaactccgaatttcagtcacagacttgggtgctttccatttcgtaacagcctccactttagcaggatccactgctactccaccggctgagatcacgtggcctagaaaagcaacttccttcaaccagaactcacatttgctaaattttgcatataacttatgctttcgaagtttctcgagtaccaatcgcaagtgctccacatgctcttcctcatccttggagtagattaaaatatcatcgatgaatactaccacaaatttgtccaagtaatccatgaacactttgttcataagattcataaagtatgccggggcgttggttaatccaaatgacattactgtgaactcatacaatccatagcgcgttgagaacgtggtcttgggtatatccccggtcctaattttcagttggtgatatcctgatcggaggtcgatcttagagaacaccttagctcctttaagttgatcgaagagatcatcaatccgtggtagtggatacttattcttgatagttacttcgttcagtgaacggtagtctacacacatcctaatgcaaccatctttcttcttaacgaatagcactggggctccccaaggtgacgaactggggcgtacaaatcctttttcttgcaactctctgatttgcttcttaagttcctccaactcattgactggcatccgatatggtctcttggatatgggagcagttccgggtatcaggtcaataataaactctatgtcacgatctggtggcatcccaggtaaatcctctggaaacacatcaggaaatcgttgcactacaggcattcctttcatgggtagcatggtgaatatgcctccggcatgttcggccagtctaggatcttgatccatagttgttctcatatccgatccccaggggtggtcaaggtaacttttctacgcctacagtcgattacccctctgttctttgttaaccaatccatacccaatatgacatccagggtctgaggtatcaaaaccataaggttggagggaaacacaacatccctaaggcgaatatgtacgtctatgcaagcatgactcacagttatctcgccctcaggtgagtgtaatatcataggctttctaagtcccactagggttaagttgtgcttttgactagccttcagagatatgaatgaatgcgatgcaccagaatcgaagagaactttaaccggggtagaattgatagaaaacatacccattagtatgccctgatcttcctgggcctcttcagctcggacatggttcacttgtccgcgcccaaatctggtagcggtcctgttagtttgcggagtcttgaatagacctcgtccggcaatagggatagtagtcccacgaacagtcattgcattagcgctagtacggacaggagttttgcgtggatgagggcagttgttggcgtagtgcccatactcctcgcaattgaagcagtccacattcttcttggctccaggggcagccagagttggtgtaggggtgcggttctgaattgcaaccggcctgttgaaattgctaggtgcggcggggcggttggtcgccacaatagggggtttccacccagacgaagtggctcccttgagtcgctgaggcactccctgaggtgggcgattcatagcaagcctcctcttgcggttgtgctctacagtcctttggtcattctccagcctaacgactttgttgatcaggctctggaagctctcatggtcttgcccaatcataggtccacgcaattcatcattcagcccttctatgaacttgtcgatcttttcctcttcatttgcaaggtctccaattgcatagcgggccagctgagtgaaccggttcagatattcctgcaccgttgtgttcccttgtcgcagccttctgaactcgttcttcttcatacgcattaccgcagcaggcacgaagttctcgcgaaatgctgcagtgaactcttcccaagtgggttctccagcatcctcttcccgagcttccttgtaagtatcccaccaatcaccagcgggtccctccagttggtttactgcgaagatcactttgtcggcttcgcgcacccggataagggtcagtttcttctctatgatacgtagccaatcttctgcctccataggctcgtctgtcgtagtgaacgtgggtggcttggtgctcataaactctccaaagcttgatccttcgtggttgccttgattgtttgcaatggcttgcagaagttgggtttgagtggccataactccggccagggtggttaggtcaggtgtctgggtttcatcattgctggttgacgcccgacgtcggcttgccatctgtgtaggtcgattgagtaagtatcctaatctcctaactggctcttatggttttatctctttaagggaattgtcttgatgtgaactttgttttgcaagcatggtggaataaactcatttacaacacaacagcaataatatcataaataacatcacagagttccacaaatagtacataaatcgtgatgcaatcgactgcacacatacgcagtccaaataaggttcatccaaaagatacattgaactaatcatcaaactactcgtcgatctaggtaagggggggtgtctcgcatgctatccaaaaaccatatgaagcgagatcgaagctgcaaatagtcctccagtctagtcatccaaccatccgcaggatcctggggcaggtagagggtggttgctggcacgggcaaacctgagtccccacggcttggaggtagtggcctctggatctggcttgggcttcttgcccggggatcgggtgctcttgcgggcaatgctgagggtgtgagggcctccgatgaaggtgatgcggggaacaggggtctcatcctctgaaggatcagtgatgtctggctcgatctctggctcggtgtcggtcccctctgtctcggagtcgacctggatcggagtctccatactggaacccagctgtggtgacggggtagggaccagtggggtgtgcacaatctctggtgcaggtggctgtgtcactgtcgtgtccactaggtagggtgctgacttagtagctagcatgccaatctctcccagaagagtgtggaatgcgggtggatatggcggggtgaggaagaagtagcggtcacgccctactgctgtggaagtagaagctcctggggtgctgaccgtggctgctcgaagctgctcctccagctggctgacgtgctcctgactctctctcagctgctcctcaagtgtattcatcatcccgcggcgattgttgtactgatgagataactgctggaactggtcgccgtggacctggagctgtgccttcagtgagtctatctcactgccccaagcctggtgcacctcccctagctgaagctgttgcactgtgaggtcagtcacctcggtctccaactctcccacaggcctctgctagtcgtcgatctctaacagagcctcctcgtagaagtcgtctactgcctcagcccatcgtgacagtcgagtcactatcgggttgtagcagcaaggtgtgtcctgaactgtgcagacggagttactctcctctcgaaacgggtggtgagcaaactcagtactcgccaactcagctcggtggatagagctaagtcggagaaaggcctcccgggctgcatcctacatcgcggtctctggtaagtcacgacggtggcatgtcggaaagctatagtctgactctgaaggaactcgtgtgtgaacctcgactcgggcctcccaaacggatccacactgtctcactcggtagatcggaaatctggggtaccgtagacgcctcatcaaccgatgcagctcaatgacgtatccctctgagcggggtacgcccatcatccaggtagcgggtgaatcctgatctgccatctaagtttaagaaaaacccaaagtcagctgagagtaaaacttgttttgtgaagaaaatagttaagagtaagatgaaaatcgtatagagttttgtgaacatagcatttttatttttgaaagtattactaaatgggaatttctcccttggccaacttagaaaagggggtggggcgccttttggtcttttcctacagtcgtatggctctgataccagctctgtagacccccgtttttataacaggaatcaatcgtgtaaacagtaccatttccttggatcaagtagtctggtacacacgagttcatagccgagataccaaacgcacatacacgagagtctagtgcaaattattacaacataagcccgcaggcgtagtcttaaatcatcggaccgagcggtccggaatacatcccaaaagcagaaatagataaggcagcggaattaaggcagcggcatgccattgccataggcaatgaccgtaactaagacctattgagcgtcatcgtcttcatcaccctcctggtaataggcatagggatcctccgaagcttcatctccggcctctgattaagtttatatttgcaagggtgagtaccaaccgtactcagcaagccaccacatcaacaatgcacatgataggggtatttcaaaggatggctatggttcttttgcgcaaagcaagttttgtaatttttttcacaagccttagacctagcattgactgatcaaattttagtaccagtgtttatatttaaacaa

SEQ ID NO: 28230 - DNA, 18582 bp, Oryza sativa
aagatgtcttaggtggagtcttggcttacaccccagttgagcgcctgtgaagatggagccgtaggcccgctcgtccgctgctgtttatttttgattgtgaggccttaagtgcctttgtaataatgtaaatattatcgatataataaagatgtgtcttttatatcatgtttgtatggtgtaccccggcttttcctgggacggggattaatacactagcgttcgggaaaatgcaattttctcggtcgcgacacccaacctgtcaaaaattttctcatctctgattgctttctagtccagaactctaaaatataggaactatctctttctaacatcttatgacaaaccatctccttaaacccattttcagcaagccaggctgactcgaacttaaagtaactacagcttctttccctttcctcatcagtgtcaagaagaagaggagtatggtcagaacctactctagggagggaagagagcagagcagaggggaacttaatatcccaactatcattcattagaactctatctaggacttcctgagcagggcactcttgcttattagtccaagtatacttaggtccattcctaaaagtctctctcaaatctaaatcagcaataaaagagttaaacaacaacatattcctagagtcaacattagcattggatttttcccaagcaaatctatacaacttaaagtctccacctaatataaaggggtaatcattaccctgaatatgccatttcaactcatctaaaaacccacccttcaagtgattgtccacaggaccacacacacctatgatttcctagagatagtcatctttcttatttttcaaaacacaacataggaaataagctccggcatgagtagagataacctcaaacatctcagaattcacacctacaagaatgccaccagaagtccccctggatgctttcagcaccacacaaaagacctccctccttggaaggaattcaactctctatctaagaacacctctttcttagtttcttgtaaacagataatgtacaccctcttttctttgatcagctctttcagttgtccacctctagctacactacctaaccctctaatattctagaacaagataatcatttttttttcctttgtttgaacacaccacctctctttatcagctcagggctcttttcagcagccacctcctctaatggcatcttacttttttagccacaacctcttttcctaacttttgattcacctcctcagatttttctacattaccttcctaacttttcaattttccatctcttttttccagtttagttcagctagtttagcatgggctatctcttttgatttcaaggattctaaattagtatcaatctcagtagaagtactacccaaatctatcttagcagcaatagcaattttatttaactcaactgaatctagcagctgaaaaatagcaaaagggtttgaagcattaccttccatgttcttcttctgagtgagaattctagccctcctggtgacaggaacatcagccaactccctattccttaagctcatcctggatgtaattgtaggttcagtttttctcgcccaacttttcttcttatgagacacctcttgaaagctctattcatcatctctattttcttcctccctcaacctttctatgtcagaatcagtgggaatttgacacctctccatctcatcatccaacaagtttttttcacccattgtcagccaatcattctgagttccctctaaatcttcctgggtcagcatctcaatgggatttatcagctcttgggactcttgttccaccaccgtgtcacctttctctcccaaaccaccagagaagtgcaagaatcattcacctcctcaaatatttttcagaagagaggttttcttagaggatatttttttcccacccccactctgaagtaactgtgttttccctttgtacacaggaggtgcagaagaggctccaaatatgccgccctggttgtttccttcacctctaagctgtctacctctctgattgtcctgagacttgaactcgtcatctaagtttatatcatctctttcctttcgtcatccttgtcatccttatcatcaccatcctcaggtgggtcatgtctgttgtcataaggaatatgtccttttggttcccatctaatcatataacccactttgttaatgtagatgtgaactgagaaatgcaactaaatagggcccttacaagcaagcctcaccctcacagaggccatcccttctaagactagtcatatctagcatctcattttttttaactaggtcaacaatgaccttgatagaatcttctattctagctagcttcggaataccatagatctttacccatacagcaaccagctcatcaaccgcctcttctgtcataccagtttccactacacttgccttgatcagtgaggtctcaaaatcaaaactcttgtatgttgatatcttgcttctcacctcatcagaagggaaattgattaaaaactctttagcatttagttgtttcaccttccactccccatttagcccaacaaatagatgcttcagctctgcaaccacttttcccacagaagcttcaccaagaatcacagttagtatacctttcacaggagctctagccaactctatatcagaaatctcaacttgcaagctgtaaaaaccttgcccagggaacccaaacccacacagcttaatacccttctttcccaaaagcaatggacagtgagaagagatatggccagtattgtgacaggagtagtagaggtgagggttagggcacgttgcctgatggtgaccttcacgcccacactcgaagcattttatcctcacctcgatccgccgctctcgcaccacgatctgcctcgccaccttgacgcccttgagatcttgcacctagattccccgttggattttgagcgagaagttggcgtcgaagctcatcctattcgcgcgcatcacggttcccctaatctccacctctaatcggatccgtcacccttcgcttgttgacttgccactccggccgaatttggagggcgcttgtccatcaccacctctgtgtatgaacgatggtcgcgcttgcgctctggaactctccagatccggcgagcaccactaccaaatcaccggacttcctcacctctcgcagggaaccctagctttggttgcacctctccttgcttcacccaaatccactgctctaccgaggggataaacttggggaaaagtcaggtttcccaatagctctcgaactctccgcatgggctccaacagtattaggctgtactgtagatgttgggctgccgccattgatgacgtcatgcatgtgtgctgggctagcccaaaccatcccagctagaaccccatgtgtcgaaggcctagccatctcttcagaaggaaacctcccgccggagcactccgacgacctccgaagtcggcgatcgccggaaaacgaaggcgatgacgtcccctccccatcacgaacccgagactcctccatcggttccttcccctcacggcgaactgtgctccccaccgtatcaccggagggggctctatcaccagagggagctctcgccaccggcgtaagcacatcggcgtgcgtgtacctcgccggccaaccatgcgaggggatcgcctccctcgtcgccttcctcatcacctcactcgtcgcctctctcattgcctccgccacaggtcaatccaacggcctcccaacatcaaatgagctcagtgtgctggccgggccgaggtatgtctttctctagataggcatcaccttcatctctccgtcatgctcaacgtctggagcttcatctacgaatggcgttggccctagatgcctgggcatgtgcttcgggctatttgattcgttgtttgctcagattcaactcggtgattgattcttgtgcaacttgcagagaaccaaaaaagggagattttggatcaaggaaagggaaagtgatcttcttagcatcaaccaagttcatttcgtaagatttcagagcttctgcacttctaacaatggatgaccggcgagaagctagtaactagcaactagcaagacactgttttctgctccctgccgcatggcatgacaccggtgcggcccagtcctgtaacccttagaattcctcaatgcgcggtttgccccagtacttgatgcgaggtcttattattatgcagattaggtaatccctgcgtatgcatgactgttgagattgaaggtatctaatcatgcgggtcaatgtgatgaatctaattatagacagtgcccacatatttttatttattagctagttatgtagacttaatgatccatcagtattttaatgtattgacctgatgaatcagtgagttattattttcagcatgtagtctgaattcttcttaggcaatcttgcaagtagcataatgtggattgaagcaaactgcaccccacactcttacctgcttgaagactgcaaatccctctatttcactgcacgtccattagtattgctaacaaagattttcttgtgtttgtctgtctcgttggaaatcagttatattaaacaagctgccatggggtatgtgttttggtatctgcaatgggcaactgggtatcatcgtatatttcatgttacaggctattaatcacttattcttatacatgttatgtatgtcgaattcttgatgcattctattctgataacaaatgactggcctgcatgcgggtaaagcaagaaaagttttattttctaactatgtgctcacaaatggtgagattacatctttccttatgcacttgaatttctgaactatgcggattgtagttctgctatcgctattccaatagcacaattgttctatttgcgtggaaagtgacgtggactagggttcgatctttcggaaggttctgataatcaatgatttgggtggagtcgcgacacaaatcgattcggcttcttgaacgaacacgctcttgagccctgcaatcgcagcaccatgtctcctctggttatcacccgtgttgaaacgcggacgaccttgccgagaaggctaatccctatttgcgaatcaaagaacacaaataggaacaaagaagaatacaaccaaaattgcagatgaatgattaagctcacaagttcgggccttacaaaccgatctagcggcgaaactgttcttgacagaataagcaaaacccaaaccctaaaggtgacggccagtggcgattctagcaggtaggctccatcaggctctagcctatcctccaatttttgcaaaaaaaatatcaactaggtatcctcaagcatcagccggcgtcttggagttcatggcgacatgtgctcggcgctgggaagaagatgaacaggacacatgggagaaagaagaagcgaagcggtatgcagatgaactaggttgtgttggaaatatagtcattattcggcatattttaatccaagaaattgaaacaatgatcatggcataagcagtgtagggtgatcttaacataaccagtagcatactatgcgcatcatgaatgtcagaaacaggaacataccagtaacgcgataacatgctagaggcatcatgtagaacaggaacaagaacatagcgcacacagtatagcgctaacaatgggaacaggaatagcgctaacagcagtagcaggaggagaagattataccccgagaatggccctccgctggatggtgaggcagaattgcctccgttgttgtagtcgttcacggcacctcctcctggcgcaccagctcctgtcggcggcggcgcaccagctcctgtcggcggcggcgtaccacctccaccggtagcggcggcagcagcaactccagacatggcgatgagcagtcgtgcaggaggcactccccaaaaacctgatctcccgcctacccggtgcagatctcaggcaaaggtgtggtttcggaggcactcttctttcaatctctcgtgcgcgcaagagatcaaaagcggggaagcgagagcaactcaggcgcggagaaggagaaactaacaccgggaaaaaagctaagaagtcggatcggactcgcggcctccttatctatcaggagaaagaacgtggacgcgctgttgcggagggaatcgtgggaacgtgggttagtggctgcaaaaggattgtgacgtgacgcacgcacaccgccagccagccacgccacgcctcgccttgccctggccctcgcccacgcccacggcccggcccggcgcgcgcgcgcgcgtttagcattccgacccctacctcaactggtcaacagggagcctctaataactccctatttaggttgagatatttctcgcttaaatcctgaggtggtattattatcctcaacatttattatgggcctttgagatttaattattataaattgggcctagcccaattattctaacaatccccaccaaatttcaaggctcataagaaatgttctcaatgttgtgcctgtttgatataccagggttttggtggagactgttaagttgaacttccacctaggaaatgagctacatcagaccacaactgaacaatggactatgccttgaattgtaagttttgtgtgatcaggtttcactcagaaccttgactggtactgggctgccgttcgcatcccctctgtttggagcatataagtcaaactccaggcctttcatgagtatctagagattgcccaaacctcatagactgtgactagcagtcaaactcatataggtgtgttccttctgagatgttctgcaggtcaacatctctgcttggaaaagccactcggatcacattaagacataagccatcctaccatgcaggaaagaagagaagcacatcatggaaatgagcccttttcaagggtctcttctctcagtcacacaatagtttgtttcaccatccaaattcacgggatctccgatcacaatggacaggtttccactattatgcaaccttaggtgggtatcaagcccatttccctcgatgcactgtctatcacattacgtggtagccccttggtaaactggtctgccagatttctagccgtttggacatagtccaatgctatcactccggagtttttctgctttctgacagatttcagtcttctcttgatgtgtctagatgacttcatgttgtcctttgaactgttcactttaataatcactgtttgattatcgcagttcattaggatagctggcactggtttttcaaccaccggcaaatccatcaggagttcacgaagccactcggcctcaactgtcgcagtatctagtgctgtaagttctgcttccattgttgacctcgttaagatggtctgcttgcaagacttccaggaaacagcgccacctccaagtgtgaacacatatccacttgtggcttttatctcatcagcatcagatatccagtttgagtcactatacccttctagtacttttggatacccggtatagtgaattccatagctcatagtgccctttagatagcgcattactctttccagagcctgccaatgatcatctcccggatttgagacaaaccagctcagcttgcttacagcaaatgagatgtcaggcctcgttgcgctagccaagtacatcaatgaaccaatgatttgagagtatctcagttgatcccttgctattcttcgatttttccttaatagcacgctgggatcataaggagtaggagctggcttgcagtcactatatccaaagcgactcaaaaccttgtccacgtagtgggattgcacaagtgtaatcccaccctcatctcctctttgtaatttgatgttaagaataacatcagcctctcccaaatccttcatttcaaaactcttggacagatagtctttgacctcctcaatcacattaagactggtcccaaagatcagtatgtcatcgacatacaagcacaagatcaccccttctcccccaccatagcgatagtatacacatttgtcagcttcgttcacaacaaagcctgcagctgtaagcgtggtgtcaaacttctcatgccattgcttaggtgcttgcttgaggccatacaaggatttcaatagtttacacaccattccctcctgaccttctagtacatacccgtctggttgatccatatagatctcctcctccagctctccgtttaggaaagctgtcttaacgtccatctgatggacgagaagaccatgagaggctgccagagcaagtagtactcgaatcgtagtcaagcgagcaactggtgaatatgtgtcgaagaaatcctcgccttccttttgggtataacccttggccacaagccttgccttgtacttttcgattgtaccatcaggcctaagctttttcttgaaaacccatttgcatcctacaggcttgcacccatatggacgctcaacgacttcccaagtaccattagatataatcgagtcaatttcactgcgtactgcttccttccagtagtcagcgtcaggagatgaatatgcctcttctatggttcttggggtgtcatccacgaggtatacaatgtagtcatctccaaaggattttgcaaccctttgtctcttactcttgcgagtatctacaatgttgtcctcctcaggattttcctcaggcgtttcatcattgtgttctatcggtgcaaagtgctcatggagcatgacagtttctttactagaagtgctaggtgtatatttcataagaaattcattctcaaagaatgtagcatctctggactcaaaaattgtagcagcatgcatgtcgggtactccaaagtttactattaagaatctataacccacactgtggatagcataaccaagaaacacacaatcaacagtttttggtccaagtttccgctttttgactataggtacatttaccttggccaaacagccccatgttcgtaggtatgagagatttaatttcttcctttcccattcctcgaatggtgttacttccttatgcttcattggaattttattcaggacatgacacgcagtcaaaactgcctcaccccaccattccttggaaagccccgcagtgtctaacatggcattcaccatctcagttagaatacggttctttctttcggccaccccatttgattggggtgaatagggaggcgtcatctcatgaataattccaaactcttcgcaaaaggatgcaaactcattagaaaaatactccccacctctatcagacctcaaccgtttgattttcctttcaagttggttttctacctcagctttatagattttaaagtaatgcaatgcctcatcctttgttttcaatagatacacatagcaaaatctagtgcaatcatctatcagtgtcatgaaatatttctttccccctttagtcaacatgccgttcatttcgcacaaatcggaatgaacaagttctagaggtgccaaattcctcgcctcagatgccttgtgaggcttgcgaggttgtttcgattgaacacaagtatggcacttggaacctttgaccaaagtgaattttggaattaaactcatgttagctaagcgcgtcatacaaccgaaattcacatgacagagtcgcgaatgccacacattagactcatcattcttgctaatatggttcacagcattatgattattacacatgtcattcaaagaaaagcggaacaagcctccgctgtcataacctttaccaacaaaagtcccatatttagatacgacacatttattggactcaaacacaagtctaaaaccttctctacacaatagagagccgctaactagattcttctttattgaagggacatgctgcacgttcttcagctgcacggtctttcccgaagtaaacttcagatcgaccgtaccaacaccatgaacagccgcaagcgacccgtttcccatcaacaaggaggaacctctctcgacctgataagaagaaaacagagaaatgtcagcacatacatgaatattagcaccagtatccacccaccaatcaggtgaatgaaaaacagagagaactgtaggtaatattttaccgtaccccgatgttcctccgccctcgctaatgatcatgttggcagacttcctgtctttgcgctcaggacagtccttggcccaatgcccagacttgccacacacaaagcagtctccctttgcctttcccttgcctttcttcttaaaattggttgcagccttgggtttgacatcaggcttgactttcttgttgttgtgggatgcatgagggttcttcttctgtaccatattggcactagaacctccctcaacctttttgccccggacgtcctttgccctcgccttctcctcaacacccaaagagccaatgagatcaggaacactgaactcttgtctcttgtgctttagagaagtggcaaagtccgaccaagaaggtggtagtttggcaataatgccacccgccacaaacttgtccggcaactcacagttgttgttctcaagttccttagccagcatctgaatctcatgagcttgttctactacagaacggtcatcgaccatcttgtagtcatagaactgctccatgatatacagctcactgccggcgtcagaaactccgaacttggcctcaagtgcatcccacatgtccttcccagaaggcatgtgcatgtacacgtccactatgttgtcagcgagtacactgatcaatgctccacggaacaggcaatccgaagcctcgaacttagcctcttcctcaggagaaagaggtggttcacttcgtttgccccgtgaaacatagaagcactgcatcgctgtcaaccacaatagtgcacgtgctttccatctcttatagtttgaaccatcaaaagcatgtggtttcagtgcagcagcaaagccaactaccgaaaatgacctatcaggtttttggattgttggaaatatagtcattattcggcatattttaatccaagaaattgaaacaatgatcatggcataagcagtgtagggtaatcttaacataaccagtagcatactatgcgcatcatgaatgtcagaaacaggaacataccagtaacgcgataacatgctagaggcatcacgtagaataggaacaagaacatagcgcacacagtatagcgctaacaatgggaacaggaatagcgctaacagcagtagcaggaggagaagattataccccgagaatggccctccgctggatggtgaggcagaattgcctccgttgttgtagtcgttcacggcacctcctcctggcgcaccagctcctgtcggcggcggcgcaccagctcctgtcggcggcggcgtaccacctccgccggtagcggcggcagcagcaactccagacatggcgatgagcagtcgtgcaggaggcactccccaaaaacctgatctcccgcctacccggtgcagatctcaggcaaaggtgtggtttcggagccactgcttcttccaatctctcgtgcgcgcaagagatcagaagcggggaagcgagagcaactcaggcgcggagaaggagaaactaacaccgggaaaaaagctaagaagtcggatcggactcgcggcctccttatctatcaggagaaagaacgtggacgcgctgttgcggagggaatcgtgagaacgtgggttagtggctgcaaaaggattgcgtcgtgactatcaggagaaagaacgtggaagcgcggttgtggagggaatcgtgggaacgtgggttagtggctgcaaaaggattgtgacgtgacgcacgccgccagccacgccacgcctcgcccacggcccggcgcgcgcgcgcgtggcattccgacccccacctcaactggtcaacagggagcctctaataactccctatttaggttgagatatttctcgcttaaattctgaggtggtattattatcctcaacatttattatgggtctttgagatttaattattataaattgggcctagcccaattattctaacaggttgtcccaattcgatagtaatggcccagtccagtggcccacttcccacacttcacactcacacaggtcaggtggggatagggttgggggtgtttagggtgggagctgtcgctggcaactggtggcggctggagcagccgacgccgacgcaagtcgcaagagctcgaggcctcgagctgcagcgccgtagctagctgtctggtggcgagtaagagcaaacaaaggcggccgcaggcgcggaagccggcaggctgcaggcggagcggctgcgcgaagccgtcagtaggcgccatggcggcgcgcggagcagcaccacagtagccgctagcactagcagagcagcagttatactatgtttacggagtatatgcatataggtgtttgttattctcatatgactgatgtagtaatcaattacttcgtattggcaaggtatttttctttatttctttcttttctattcaatcatgtatcatgtatgtgttgaataactaccgtaagtactgcaatttactactccaaaatataagcaattttagctataaatctggacaatcatgtgtccaaattcatagccaaaatttgttagggacagaggtagtaacttaatacttggagatcaagcctaccctctttttctatcctggattcgccactggtgacggcgggtactgatatatagagtttagggtcatgcaaccaacccttgacacaaccctaataggttccaatacgatacacagcccaaaggcctaaatacggtgacgcagcactggcacagattgtagacgtcaacttgttcggtcgattcccgttgactcggaaagaatttggacgtgggaccagaaccattggaaaggttatcttcttagcttccatccatataaagaacgccccaatccgagcacgtatgcgacctggacgcccgttttagtgtagactggttctggactccgaattgcactcaaagttggcttgctttggccctccaccttgacttggacgtccttgatgatcctccataactctaagtccttctccaagtgtctctttgtcctctccattgttcctaatcacaatataatcattaggtagcaatctattctcaaattcatacaaagaagaacataggaacgagcttacctctaaattcaattgtcgcacgcgagctcttgttatcggttcttgaatgaccggtggaggattgttgtgtgtatccgaaggagtgatgtccgcatcagaaagattggttgacgagttgatgacacagttatatatattgtggagtctaggttcatgccattgaacatgtatcgcgttggtatgcctcgtggtggaagatggtctcccctccgagtgtagcagcaactgccttgagcagctgcaacctgtggagcactgcgtgcagaaaaccacatgtaggatcatgatggagagcaagattcaaagttacttctcaatgtggcagaacagtactagatgcgttttttcaggactgttatcaattgagcagtgacatatcaacagaggacatctttatgaagactatgtagataaattgatactgtgcagcacctctcaactgtatttgactacatatctgccactcattttatcagttactgtagaatttcacccacattcctatttcagaaattgcctgatgcttcatagccgtgtctgcttacaaagacatcagctttcttcgtttcaaaagaggagcagtttccctcccactggatctggcggaaaggaggacgccgccgctgcgccgctacctcccgggcaggcgccacgagaggggagggaaagagagaggggagcgaacgaccgagagagagcgatagagcgatctagaatatttctggatggatcgaggtgtctagccgctggccttatctctcatggtgggccccaccagctcggcttaatttgtaggtgtcggtttttaattaatcggcacctataatatattatatgtgtcggttctttttaaaaaaatcaataccaattgtattggtgccagtttttctttagaactggcacctataattgttcaaaggtgtcggttctttattttttatcccgcggaaggtgagaaaagatcaatatgtaccggttttaaataagccggtccctatgaggattttttaagtagtgtctagtgcctaacacggtaacaccccttaccttaattaagggtaaatcaataatttactaatattatgattagaaggtttagtcactgctaaatgataattatacccctctgtaactattttttaataataatgtcccttcatgtttctcctaccacaaactggggtgacagtacaagtagattttaaaccattcgattaaattatatcaatggtttagattactttttaccactagtaaagagcactgtagtggggtttcttaattacatgttaaggtcccgaccgcaaaataacaactactagctgttccacttcatcgcgcaaagacagtaagaaagttcttatgaacccaggaagtaaggagaagcagtgtgcatttgaatcttcgaacggagagacctggtgtgacgccccacactcgaggccgggccctgttacatctggcagctttaataggacacagactagcacccgggaagaattaagaaagttcttatgaacccaggaagtaaccttagagttctttcgagatcggcttccggaaaagaagttgcaacttgttggtatgagtattctattaatcctctttaagccctgagccgggatgtcacattctctcccccttaagacaccgacgtcctcgtcggtcaacccaggccgggaacgtctcctattagcaccacgtatatacagacaattttcggcgcacatacgtcatgccatacgaccacatcgtggatcatcccgtgtgcaccgtatgcccgcgtacatattcatatatacgtatagctgcaagggtcggcactgataccatctgtaacgctgcaagggtcagctctgataccatctgtaacgccccacactctccgaggccgggccctctctacatctggcagctttcctaggatatagactgccctcatagcacactttgtcctcactcgtgcgcacccgggaagaatttcccggtgaccgccaggccctctctatatctggcagttttcttaggatatagaatgctctcacagagcaacacaagtcttttctgcacactttgtcctcactcgtgcgcacccagaagcggcttccggaaaagaagttgtaacttgttggtatgagtattctattaatcctattaagtcctgagccgggatgtcacacctggctccttggatcatgtcaatcttctgcccagccttgacgaaggtgaaggtgggtactactccgttgacatcatacgagtctgcaatttcctccagctcatcgatatcgaacttcaggaaaactactccagcgaactccttggcgtactcagcgaaaactggagcgatcctgcgtgaaggttcacaccaggatgcaccgaactcgatgaccacgagcttgccacacaccatggcctgttcgatgagatactagaactcatccatggtgtggcactcggtcaacatcccttccacgccgaagggcatttcctcttctcccctctgccggctgcaaaaagttaagagatctgtttcaatcttttgcatatattatctacgtaatattgaatggttttaatctattgtaataagactttaatatttcacatctgcctcaaaattgtgaccatagtgaactttacaaaattttaagcggttgattaacaaaaataatcaggggatgaagtgagcgtagctcaactagctaagtttctcatggtagaacctttgttcacctgaaatttaagtctcagacttgacacgggtgatcaaatttacagctaattattcttttagtgttagacgatatatatatatccatcgataacgatgtgtctatggtgacttcgttaacctcaagatgtattggctcagtttttccaaggtgtttataaaggtagaatgtgcgtgtatatgttcttaggggtgagagtgtgagcgtttgcgtttatattgtgtttctaaaaaaaatcaggggaatatatatattgaaattcccttatttgccactcaatatccgttaaaccctaatatgtcagtatacaaatttttggtattttacaatgcactttcatcacttctgttaggtcaatttaatccgagttttgtatttaggctaattattctctcagtggtagacgatgtatacgtcgacagtgaggcgcccgtggccgtggtgacttcattaattttatgatataccgactaagtccttcgtagatgtttataggagtaagttgtgtgtctattcataagggtgagtgtattcaaaaaataataattttgagcttgttattttttctgaaaatgataaaatcactaaaccgatgccaccggatattttgtcggcggtgtctttcattgtcgataataaccttatattcttttattgagatcaacaaattgactaatgtctgattgaatcattgaaccattcgttgagttttgatcaagaagattattggttgtgggtcatcacgctccaaggacttgctaaacgtgtcattgccacagggacatactcaactgaaaacacaagcaaggataattagtccaacgaattgcaaagttgaaaccctagatcggaatcgagtaccggacctcctcacatccgatcaacctgccatggccgccgccgcccgtcatgtggcttcgtacatgggccgctttgctcctcggtgtggctacgccggcgacaccacctgcaccgccgccgcctggacgcggcctcagctgccacacgccccgtcgggcccactcgtcatcctccggcgcggcatcgcgatgatccccggcgaccactcccccggacccgccgacctctcccccgattgctttgaccctgaagctccaggtaacctaatcgaccgccattttttttttttattttgcctccacttcaaggatactgtcgtcatgatgattatctgttatgacccgaactcgtgagagaccgattgctcgtactcttttcgtattttaatgtatgacatcgttgactttttgactaacgtttaaccattcgttttattcaaaatttttgtgaaaatataaaaatatttatgtcatgcttaaagaatatttgatgatgaatcaagtcacaataaaataaataataattacataaattttttaaataagacgaatggtcaaatgttagacaaaaagtcaacagcgtcatacattaaaatatggaggtagtaattgttatgacccgagctggtgactagtagcagtattatggataactcgttgtaatttggggtgaattattagcagtattattgatatcttgttctattttggggagaaggagaattttggtataggaaacagagaaggaaaagggaacaagaaaaacacactgaagaagaaactcagtgaagaaattcagtttatttcatttgcagccttattgtgtacatggcctagctaaccccattacatgagtcacacggacaagtggaacaatggcccttgatctgagctagcgaacgcactaaagcacacacactctatccctgcactatctttatttgtacttgctctgtcctaacatataagtaatcctgggattgtgctaagtcaaattctaagctgatcaaatttcttagcaaattctaagctgatcaaatttcttagagaaaatattaacatctaccacatcagagaagtaactttgaaaattttagcctcagtactattgcgaacttgtgatgtgggtctctgttaccataaaaaaaatatatatgtacaattatgtttgttcagagttgtaccataaaaagtttactcaccacaaagtaaggttcacactcttgttgtcttgttgaccctatatactggattgtgattgtttattgacgtggtaataataactacccctccgtcccaaaaaaaaaaagttcaatccttgctacgaatctcgacacatatatgtccaggtagtatgatgcaggccatggcaggatctgagtagtatgtaatcttctatgtaaacctaagctcagtgcaatctttttccttcaatgtaaatatgtgatcttgttatctcaaattatacactgatccaaccggtacaaccgtacacgagaatacactcaatcttaactggttccttttcattttctaaacattcattgagggaatggatccatgtgtagttaaaatcatatgtaaatatttgtttttttcccgcaaatcatctttggtcattactgttgtgttccttttccatgttgggacgttcctaacagcagtattagtatttgttgttgttgttgatggtggttagtagttttaattgtgtgatataaatttatgtcaattattattttcactttgccttttacattaagtccaagtaaatactatactaaatattaaaaaacaaattaggctgcaacatacgtccaacatatttggtttgattttatttcctaatgtgcgttgcacatgcactattacttagtactccctcc

SEQ ID NO: 28231 - DNA, 4909 bp, Oryza sativa
aaacgaaacggagggagtatttcataatgaatctattgttattcttttctataaattcagtcaaacttagtttcacttgtgacaaacagagaattccctgtattttcggatggaaggagtcaaagagtacatggcattatcatccaaccgaaacttaattaacgccttgttagttaccccttgttatttaccgatagacgaaacaaccacctgctttgaacttaaataacgccttgttattttaccgatagatgatccagccacctgcttcgcttacgacgagaaggacctcgagtcagaggaagccgtttgggcgctgtaccagcggtggtgcagcttccatgacatagagcgcgatcgtgatgacatggttcggcgcttcgtgtatttcaaggacagagcgcacaaaatcattgagttcaacaagtctggcaagtcttatacctggggtctcaatatatttggtgatatgacgccacaggagcaatctgaattggagcgtccaccgctccatcgaaggatttgaagctcagaaccaccctttctaatttaccaacaaagcactttcgagaacggtgataattcaatcctatactatttgatcatccgctagctgctttgtccagcctgagtaatgtatgtgtatggatgaaatgtgtagaatgctttgtatgcacaaacataatatttttttaaaaaaaaactagtttatctatacaattctcctttgaattgtaccctccacataatatatcacatgtgtttggtaattggttcgtgggagttaataaaaatatcaaggatcttatttttgttggagcttccgctatatgttgtgctctatggcttaatagaaatgaaatggatttggatagatcaccttaaaaatcatatttgcaggttcttttcagggtaacatattggctccgggaattatctcaattacaaaggcatgatcatatcaagcaaataagagaggcgtgtcctaaacttgcgtcttctttgccaactttgggtggagattcaccaatagaattcactagttctgggatgtttaccttgtttggttttattagttttatttgcttttggttttgttactctggtttgcttttgtgtgagccttataataattggctgtaactcgttgagcaaaccctactacaaaaacactcatagggatcggccttataggtgccggttcctttaaaaccgcacctataggccttttcctacctccacacgctcaaaaaaataagaaccagtacctttaagaaactataggtgtcggttcattagtaaaaaccggtaccaatactaaggtattcgttttttaaagaaccgacacctataataacgacccgaaccgatgagccgagcgccacgcctccttatctactcccacccacgtcttgtccttatctactcccacgctctctcgctctcgcgtctctctccctcccctctgtcgcctcgcgtctctccctcccctctctctagtggtagctgcccggcggtggcggcgggctcgcgaggctggcggttgccgcgccctccctcctccagattcggcgggagggcggcgtcggtctcccgcggccagtggctgcccgacgaaggcggcagcgaccgcgccctcccctcacgtgcaagtcgtccacaaccgccatcctagcgacgctcaaggggaagaaggaggcaacccaagggccccgtcaccgccgcatcatcctcaatgccgctgtggttcgagtgtgttctttttatcccgttcttgttctctttgtttaatttctctcaagttctcttattcatatgtgtaccgagaacatggggatttggatcagatgagcattataattaaatggatgtagaaattgttgttgttattgatgtgttctttggattttgattttggatgtagggatattgttctggatctaaggatgtggaggggatcacggtttgattctgaatgtggggatattgttctggatgtggaggccttcggcttgatttgagccagagttttttttttctcgtgcagacaaaaaggtaccggttctattttaccattagttgccggtaccagcaataggtgccggacgggaaaacggcacctattgccatttcccaaccgacaccaatagggctttctgtactagtgaaaggctgtaatatttcattccattattgaaaaaaatttggataagatcgactactcttcaaaatttcccaatctatgatatcagcagcttttatagacgttatagaagtacacgctgcgctgaaacaaaggtttagcagtatggttaaaagtaagttagctatttcgtttctcttcggtttgatttaaaagagaaccctataagcataccaaaagaatttgaaaatatattgttgaagttttttttcttaaaaaatatacgagattcgaacagatttacacgaatagaccgtcatcgcggtttggcagtgcgaaatcaatagaccgttatcgccgtttggcagtgcgaaatcgcaatgaaatcacgagatcagagtgcgatagcaatgacggcaagttggtaattaacaatcttaaattcttaataagtgattaattaattgctaataatgctaattaaataaataatagttaattaattaattcttgatgatgctgattgatccattaatctcgcgactcatgcggtctcgcatacttaccgtgcaaggtcacacggtctctcatacccttgtcgtgcgagaccgcggtatcgtgtacccatcgcacgacaccgcacgatctcgcgcttttgttaattaaaaaaacacacactgatataagagatttgctttattctagtgcaggtccaaagcttgccttcagggttcagggcatgttagttggtttgatcctacaaccaacgagaaataaagatagagagttaaatccataaacgatagccgatcggtcgtagagccgatgacatatcgtctgtgacctagccaatgcaatgttagtcggattggccgtaaggtatatgataaagaaagtaaataaagatagaaagttaaatccataaacgatagcctatcggtcgtagagccgatgacatatcgtctgtgacctaggcgatgcaatgttagtcggattggctataagggatatgataaagaaagtaactaaacttactctatcggttggagaaatcagcactatataatctatgaatcaatataactttaaacgaaatgattgggatagattggacagccgccgagacagtataaatcatttatatctaaagttatatcaagctataaattatacaagctcatgtcatagccgataggcaaatttagaagtatatcggctatagctccgatataactctatactaggatatcactttgaagtaaatatgttaaataagtatcaatttgacgttagattaacctaactagatcgatgacaaacttaatatatttaaatctattgagagcctaatataaagggcagatataacttgttaagtaaaacaaaatagatatatcatgtaagatcagctgcaactccgatactatatctattagcaatcatgaagcaagctaaatattaggtttctagatacgacttagttgatcaaacttaactgatgcagcactaagtataaagagaaacttatgatttaggtaaacaagccaatgaaagcctctccaagatggtagatacattgcataatctaagccgacgaactattctagtcaatgtcgatagaaccctaaacagagatcggccgataaggactggattaaaatatcaactttgattagtcaatatatattataactcgacgaattacataaacaagattatagtgtcataaagatgtaaccactgatcccgagaacgcaagcccccataacaagctttacctcttgtcggagatcgaagtcgatgcagcccaactcgaaagcaagaactcattgaaataaaataatagaaaggtttggcgatgtgccgaaagtgtattgaaatggtgttaattatttagagggtgtcgggtacatatttatacccaaaatagataatatgtctgttgacggtcgttatcgatcagtttcgcccatcaatattaccaaaatagaggagaactagtgatgcttacaatgcatatatatgttagaataataatattccactagtattaggtttactaaccttttgtagagaataagcataaaatggaggagaatcgacatcaactcagacgttaaatcaatcggacgatgtcgagaatcagacttatgcatgaatgggataaaaactcagaattaacacgatgaattgggccaaaattcacaagtctactataacaccctaaaaattagaccgacaaaaatctaaactccaaaaatataggccttcaaaaactttttaaataaattgcatcatgccgattttgtttcactattttattttattttgacttcggagttcataaatcacgaataatgaataattaattaggaataaaccctaaaagtaaattgacaaagtaaataattaaagttcaatttaaaataagatttggtgaggatagaaataagtaaaatattattacgaccatatttgtaacaattaaatttaaatgtgatggaataagaattaaccctaattaaattcaagaaaattatataaaaataaaatatgggtaaaattagtcaaggatggatccattggttggaataacacaaataccgagtgaacttcatttatacaaaatttaggtttatagaatcaaatttaaataaataaataggcttaaatcgggttaaatagaaaatggcactattcattgcgctctaagtgctcgatcgcgttctctagccctaaccctccccctgccccgcgcgcacgccg

SEQ ID NO: 28232 - DNA, 18765 bp, Oryza sativa
  unsure (1)..(18765): unsure at all n locations
ccgcccgggtgggcaagggagccgagagagagagggagaaaggagccgggagggagagaagagggagagaaaagaaaggaaaaagaaaaaagagaagagaaaagaaaggaaaaagaaaaaagaggagagaaaagaaaggaaaaggaaaaaacgaagagaaaagaaagaaaggaaaaaggggggaaaataaataggaaaaattagggggagatttaggaatatttaaaatattagaatttaattatggggttaactaaaatctagtatttgcaaagtaatactataatcatagatgtatttaagaactaaacaattagatgaattcctatagattattatagattattttaataatctctataaatgatcaattcgcggtagtaatttagatggaattgagaactaaataattagatgaagtcttaagacgtaatttcgaatcacaaaatatcttaggaggaagaataatcccacttcgcgaataatatagttgatataggattcgcctctcgcgctcgtttttcaattcgatttttattggattttatttgaattctaatggaattcaaatcgattctttgcacgcacttgtagagcccgaggaagccgcggatccgagtgaaggccaagacccgcaagaccttgagcaaggcaagtcatcactattctttgatcacgttgatcccaattgcgaaattaatttttgtttacaaataagattgcatgcgatgatgaacatcctatttatgattatgccatgccttgattatcgttcacctttaaatccttgtaaccatgattacgtaagagtccctagtcgattatgatgcttgcttagaaatgctacactagaatattgcatactcatatttgtcaaatattatatgcttgggcaattacctttgggaaggtaattgagatgcggcatgtggagacatgagcgccacattgccatgataatgatgacatgatttgtgaaaataggaaagaaaactaaacacttgttttagaccggggcagacggtgaatttgggtggtatccgggaaaggctagtaccgtccccggtcaattaaggaccgagccatgaagttaagcatgaaacgaccccgtacaaccacacttctcgaatggggatagacctagcggagtaaatagccgagcggaggcagtatccatgcatagtggtttctcgatgtgtaaggcaggggctctacaatggtgtcgccattgttaggactgccatgtgatgagttgaacataattataacttaatacatgtgtgtgaattttccctccccgggtgcgccagaactcctctcactgctagaaactgtgtacgcctagagtacatgaggatgaaaagttcatggagcgggtactgccaatgcaaggttatcgaaaagctttgccgtgacgcgtctcatgtgttgagacaaggctcatgtgttgggcagtcgcagaatgtgggtaaagtgtacatccactgcagtgtgagtaaaccaaatctattcgaatagccgtgctcgcggttattgagcaccgggacatgtattacacttggctagactctaaattcttatctagtgtgggatgggttattgcatgatgaatttttatgctgttggagccacttcctgagaagggggaaggtgggcgtcctcagaaaaccatgacgactcaatggcgggaagctatccttgggatcacaatggatggtggacagaaccgtcgttgttcaaatacaaacactggtactaaaatttgatcagtcaatgctaggtcttaggcttgtgaaaagaattacaaaatttgctttgcgcaaaagaaccctagccatcctttgaaatacccctatcatatgcattgttgatgtggtggcttgctgagtacggttggtactcacccttgcaaatataaacttaatcagaagcgggagatgaagcttcggaggatccctatgcctattaccaggagggtgatgaagacgatggcgctcagtaggtcttagtacggtcgttgcctgtggcaatggcgtgccgctgccttatttccgctgccttatctatttctgcttttgggatgtattccggaccgcccggtccgatgatttaagacaatgcctgcgggcttatgttgtaataattcgcactagactctcgtgtgtgtgcatttggtatttcagctatgaactcgtgtgtaccagactacttgatccagggaaatggtactgtttacacgattgatccctgttataaaaacgggggtccacatctacgaagtggagcaacggaggaggccgccagccaaaacttgggctggttgggccggcccctggttcggccgaaccagggggtttggccgaacctccctcgccgccgttggatgcagggcttcttctggatggttgggattgatccccaatgacggtcggagggtattaccgaccattccaaccgtcacaaccgtcattacctgcctataaaaggacctcctcacttcacttcactcacacacctcaagcaagagctttctcatattctctcaagttagtttagtattctcaagctagtggaataggaatagagtagaaaccaggagtccagaagtcttcggaggagttcaggtatggctctagtagctttcctttcctcttttgtaagctttgtactattattagaatactcttctttatacatttgtggtattaaaatactttccgagtatatgaataccaactttacattatgtttatgttatactgaatatgctgctagcttatctgggagatgctttggtgtgggtataatatttgcatatgcagttactctatgtcatgacgatgatattagagtagtatttggtagtttagatgtggtgtctagattaagggatatcattatttggggttatatgctgcggatgagaggtgggctgctaatggtgacagctcagtacggatattcctccgcgcgtgtatattgtcctaagttaattccctagggagggtactcctccgtttttagccccgcttgtatggtcatgacatgctgtcgtaaggaactcggcagtcaggggtggcttctcgaagtaccaggagggcatcggatagagggtattagctagtatatcaaataactagaatgtatgtatactatgtatactagaagtataggaatagattatcttcctctttttcttaccatttagcttagataatttagtatgagaacgagtagcttaatgcttgtgtgtcactctacccttggattatcttaacccctgcgtagactatgattatcacaagtaatatataaattattagtcaagttctctctacatgatcttcccacgggataaaataaataagatacccttggaatactctcgggtgaaatgctacaatgatttatccgtacgcttgcggatgaactctgtaaccataatataccaaaagtatttctgcgccattactgtgaattatatttatagtaatgtcgttaagaaataccaacaatttccatatggacacgactcaaacttctattatagctctaacagacaaacaagtcacttaggcacactcttaccaaagatatctataaggaaactactaaaatatcctaattaatagatacaattgccattctttgaacataatccttgcctggcaatactcctgtagcccttcaatcaaatccgacaatgactttgtaacccatcttgtcgatatcggctgtatcggctatccctatccgactagtgttagccgatacggtctccagccgatgtgtaatatgttttcaaccgtcaccacaatcccctccaaatctgcttcgtctttacctccaaatacgatccatgcattaccaaatttggtcattaacacatgccccccaagtgtttatccgccattggccgttaaccgcgcgcttttaaatagtaaccaccgcttaaaatttccacgccatccacttccgttttcaccacctaagcaaaatcactttccccatctctccggcgattcccacgttctccggtgaccgcacatgcgctctcagtggcgattcccaatgcaacttcaatggcatcctccccgagctcgtcaagcccgccaactgcagagtttccagaggtaagccccatcagctcaaactctttccaattcttgcgtcttcttgcaattcaatctccctctcttgcaatctgtagcatttagcgccctaggtagcagtcccaagtctgaaagaatcaaatcactttttcatgggcccaattggagatacagatcccactatattcatcaactcagaaacaaatagaatcccttttaggtagaccaatccaaacctagcccatttgtctacgacctttagatcatggccatcccaagccgataaatgggttgagtggtataacagagtagctacaagcaagcagagtcactgggaagaaataggaatatctcaatgcctttctctatctctagccgataagaagaaagatgaaccaatgttatcagctgcagcctattttggtcagacaccttaaacgctttcttgttcaaccataggccgatgactgctcttggatataatcatgatcacagggctagacatcactacatcggccaaccccatcagtttgaagaccaagtgcactcacctattcaagaccaagaatgttggtggctggtcaggatttgtttctataaacatgggtgaaaggaccttgatgtcgcctagaggggggtgaatagtcgtttctaaaaattatcacaactttatagcatattagaatgatgagaacttccggttcaaatcggaatttccggtaggggattggaagtttctgtctcaaccaaaaggttcggcggataatggaataaaacactagctatgaacttgtagctcaaacaaacaaaatgtatatgaatcaaaaggtgacaaacaaggtatctaagcaagatataaggtcatcaactatattaattaagcatgcaagtagatcgggtaaaaacaagctcaatcacaatatgaaagatggcaagaacgagcaaaccaggccgcctggagcacccttggcaccgacctcccaccgccattgccgcctcccgtggatgagctctctggccgtgggccatcaccccagcggcgaggtcctgaggaagataggagagaggtggtgaagagaggggcgagaggtgaaaatccacttgcacgtgggccccacatgtgtgttttaggccctgtttagcacagctccagcttcagctcaaccaaacagttttacctccacctaaaataggagtggaactaagtggatctctctcacaaagtgcctgtttggtagggctccaactcctaactcctagctccaaactccagctccaatgggaggtacctctgaaagtgtttggctggcctactcagctccagaaatcccgaaagagatgatatagtggagatggacaatgaactagagatgtggagctgagtttaggcaactccacaacttcactccagacccaactagctctaccaaacaggctcttaatttatcttaactgacaagaatgccacatcatccaaaacaccatccatactgttaaggaactcacttgaacggtttagcaaagatggagggcgaagatttctggtattgcggcttagggatgctagttaaactaaacgtaaagttgagggacgtccggtgaacttatttccttttgaaaaagaaaaaaagaaagcccaagaacttgacgaggttggacagactcggcccattacgtgagcttttaactacgcggcctaacgggcctgggcggactaacgttttcgctaatccccgtacgacgccggcgcagccccgcacgcagaaagacgcgacgcgaggagcggccgccgccggcagctgttgcgatgaagcgcttcttccagcccgtgcccaaggatggctccccggcgaagaagaggcccgccgccgccgccgccgcctccgcctccgactccgactccctcggcggcgacgcccccgccgcggccgcctgcgccgtcggggagggggattctcctcccgctccccgcgaggaggaaccgcggaggttcgtgacgtggaacgccaacagcctgctcctccggatgaagagcgactggccggccttctgccagttcgtctcccgcgtcgaccccgacgtcatctgcgtccaggtgagcggcgcgggggcgggggttttcggttttgggcgcgatcttttgcctcttctttttatccggcttttgctccctctagggtttaatctgcagtgctgtgcggatgtggggatatgggagtgggttttaggcgattgtgcagcaatgtggcatatgccagatttgcggtcgctcacgggcggtttcgtcgagcacgttgggagcgtacgttttcgttattcacccatgggagattaaacaagggaggtgcgatcttaatagagattgaggtttttcctcccagggttctgtccttccagatgttcacagagcttgcattgcgttgtattcacatgcaatttgaagatagttgtgtcattgcttgcgagtggagttgctaggaactcgttgtcagtgttcatagcccagtttttttttttttttgttagccacttgtgatgctagcacaagtactccatctaggcaaggactgtgacaaactgtagaccatatggtatgtgaagtgttctcttcaagttaaatcttcaattcatgatatgggaaaactcgtgatatattgaatgattgagcttttctttggtaccactatgcccactgtataaggtgttaaccacaacaaaattgaggttcacatactattctactgtttcatgggaaccagttcggcagctcctcttctttaatcacactgcctcttctttagtcacattgcaacttatttctcttatgcttgtgatcccaatatatcctatagttttattggatttatattaggcacatccttttggaatctacctcaggggcttgacgctcaagtacataggacatgaggacgtctttttgtctttccaaacctcataatgtttcattctttgtccttataatgttcagttgcctgcttattcttttgtatccagctggtcacaactattttgcttttgtctgatttttttatcagtacttacaacttcattttaagtatacatgtcataaatgtcttactaggatagtatctaaacttctttgttaggaagtgcggatgccagcagctggttccaaaggggcaccaaaaaatcctggtcaactgaaagatgacacaagctcatcacgagatgaaaagcaggtaatacaagcattaaaagattaatgaaattttctgtgacttttatgcagaagttaatattagatttgtcgtgcttttcataatactaggcagatcaagatcaaattaagaattctaaacttgattcgtatcttcatgcgatgctatcttttccaagattgacccctgtaaaactagaagatttgatatatgtgtaatgaatgtagtacacttcgcaagcaaccaagtttctatgtatactgactgatattttcaagaatggcaagctacagtcttttttttggtcccttcatgactgtttagtatattgcatttgttgtgctccaagaaattgttctaagatcacatctcgatgccatgcaggtagtgctgcgtgctttgtcgagtccaccttttaaagactatcgtgtgtggtggtctctttcagactccaaatatgcaggcacagctatgattataaagaagaagtttgaaccaaaggaagtgtcattcaacttggatagaacatgtatgttcagagttgcatgcatgacttcatattttcatttcataggcaatctcccgttatcggtgtgttttgtagtgtccatgtgcttcgctctggtgtgaataactcaatacaagatcgactttaatatgcgcaccatggtgccattatcagtctcattccaacgtgagtgtgtctctcatcataagccggcaaaatcacacggcacataagatttcacctgcaagcatagatggaaacgatttctcttgactaatatagagttgcccaagatgatgaattatttacttaccgtggtggcttttattcctgattagcttaagtgttgtgacgcttgagaatgtttttcttttgttgataaccacatcagctgctagattgttctagaacttctgagttgttcttcctgatatgttggatatttgtgtacatactctcagtataatttatattattatgttcctatatgctccctccgcttcatattataagtcgctttgatttttttcctagtcaaacttctttatgtttgaccatgtttatagaaaaatttagcaacatctacaacatgaaattagtttcatcaaatattacattgaatatattttgataatatgtttgttttgtgttgaaaatattgctatatttttttataaagttggttaaacttaaaaatgtttgactagaaaataagtcaaaaatgaaggaggtagtattgttttagtatggctgctcccaactactgttcagggaagaaaatgcacatcaaaactttaatgaaaaagaaagttccaggtcaacaaacttgttgcactgcaactttgaattaacatttggtttcatcattactttctcgcatattgctactctttcttaggaatccacttttgtattgttttcagcttccaagcatgaaccagatgggcgtgttattattgcagaattcgaatcgttcctcttgctgaacacttatgctccaaacaatggatggaaagaagaggaaaattcatttcaaagaagacggaaatgggataaaagaatgttggagtttgttcaacaggtagacaaacccttaatctggtgtggagacttgaatgtcaggtaattaataatattatttataacaggtagtactagttactgattatcttgttttccttggacatatagctacatcttcatactattttttagatttgattcaggcatactgtaacagaaaaccgatacatgacaaaatctttacacttttgacaaaaaagctagtaggcaacagaactgataacagtttttcttttcttttcttgcaaggctgatttgagcatattattatccataaatacatataatgagctgtgatatgtttttttgtattctggagctttgatcagtgcaggacgaataattcatattatattcttcttttatttacaaattgcaattatgttaccctgcagtcctgcactcctgtctgctatcatgatttcaagattagttgaacaagagcaaacttagtggcatggaatatatttttatattttccaatgcaaccacaggatagtcctgacatgttgtgatttcagtgcaacatgttagaaattccaatgcaaccacaggaaatataattattttattgaagtctagtatatttagctcacatcatctataaaatagttaaaatgtctcgtaaaatccactggtccgacaatgtgtgaaaactatggatttacttttcattaggtttaccaaaattccatgtttaggagatggacttcaggtaattgttgatatagaatttttttggaactggtcatgtactgaaatttccattagatctcaaagtgagtaagctgtcaaattatatatggacttgctaaggaactcatatttgctacaccatgaatagtaataatccactacttgacaccttccataaaccagccttagctctaatactttgcttgtatttgaaatatttcagtcatgaagaaatcgatgttagccatcctgatttttttagcagtgctaaactcaatggatacatccctccaaataaagaggtaacattactctactgattcaagtcttctatttacaagtgactaggagtgatttattacttttcatggctttttacaactcaggaactgtatgtagtcaccacattgaaatgatccttaaacagtttgtgcttttcatttctagttgcatgttagggttgttccttaatgtaattgtcccatctcgtaaactgtgcatttagttgactaaaaaagatagtgtcagcctgcgttagctgttatatcctattagcacatccctactattcctaagaacattgggtgcactcccattattgaaaacctgtaaatcgttctttttcttttctagcacttcattctccaactcagaggcagactttcttttattagtggttgttttggttctactaggacttcagggggtcagaatgggaatactcgagcagcgggttaagatgaccagtggcattcaattaagtcaagaaaaacccctgaacacgctgcgcgaccaggcatgctcaacctcacgagaggagcacacgtctgccagcgccagcaagtggggctggagccacttcaaccaattcaatattgggaagggctgggaatatgcaaatttcagttacaagaacatcaatgcatgtgaaggaatccgtttctgtcctctatcagtgccacaatattatagtagtatgttttacttgaatcatcactgttctaaaaaggtcgctgcctagcctacctaggcaaccattagaatactgatatgcctaggctcttgagaatgtgatatatatttaaatgtgcctttcacgtgctattgtaccagctggcatactgcctgttacaaaatagaagtcctattggatcactattgagccttttgatgcaattaaatctcttgcatcctactctgcaggattgtggacagccaggattcaccctgtcagagaggcggcgcttcggcaatatattgtcccagtacgtgaaagctgatacatttctacattggcaacttttcttatactatcttttgaaacttgatgtcaaaaacatattagcactacatgaattaatttcatttttataacgttttagaccataaaagatgatatgttctgatccaacccatcttgttaaaatggatttaaatctgtaatgtagtttacagtgcactggcaaccattatggatttgagtcaaaaatatataatatattggctactagctagtagtcatcacagatatggttcatgctctcgttgaatatgtctcacactcaccttgagctaactttagagaatcttcagtgatagttttattcacatcctcatcctacctaagccatcccttaagatctggctatgagagaggcttattgcagcgttggcagctctgcattatggcctcatgggctcacacttacatgtatgctcaacctgccgatggggtcacaatgttgcacatactgtgacttcagaacatgtgataatttttatgagatgggattatgggaaggttgaagttcattgatgtttgggggccagggacctgctataggccttgacaattgtggactactcgaattatcaagccacgctgagctattcaagctcagagcttgttatgctgtacaaaccttggctggccatgctcaaatcaagcatggagcgatccaagtttgaattgctcataagccttgagactttttttactactgcctgcatgggtagaggtcatctatgccagtatgcctgttctgtttacagatcatatccccaatatgcctttgcagtttacagatcatgtatcatttggcccactgactaaattactggtgggtatgggtaggaacatgccaacctcttattatttcgccatgtgtaactgggtaatcaagcaagattgtcaccctcaagttataatcttttgaaaaaaaaatatcttcagctcttaccttagatttaaacttgtcctctaactccaaaaccatgtaaaagttgccctaaacgttcagaaagtaaactggacaggacttatttggggtatatgattaacattcattatctctccctttaacaaacgtgctcaccacaccttggttaaggaatgagttttcaactgattttggagttgacaacttttttcctatccttatttaagctgaaaaccactaggaaccagttcaggcagcataatgtgaacccttttctaacaatattctgtgaacttaatatgaagcaaataaagcctcacatggcatacggttccttcgacatggaggaaagaaaataagttaaggaaaattcaagccatgttcgcagtgatgcccccagtggatcatgtcaccagcagcttacagtaagaagctatctgtgacttgatcaaggaattagttgcatgtataacatacggccataatggcaaatatcttcttccgtatctttgtgcacatgacaggtatgtcatgcaccaaggaagcaatgcttggatctaggatccccttagttcattgcaacaagacatacttctaggcttgaaattttttaatacctcatggagtaattatttgaatttacagaggaaagctggtagatgcttacagatatctgcacaaagagaaggacatggattgtggcttttcttggtctggacatccaattggcaagtaagaaagatttcaattattatgctagtcttcgtttgtttcgtagattttattgctgcattatcaaagcatgtccatatctgacattgatatgtcatcttattacattccttcattggtatgcattttaccaaaggttatcttgaacaaatattctttatctgaacagtttgagtttacaatttatcaattcaaatgggcttacaggcttaaagataatcctgtatgtttggcagatatataaatgttcttctagaaagtttagtttgcactatgacctgaactgtgaaaattatctaaaagttatcctacttccagttaaaattgtgtcagctgattctcttttttttttctctggtaatctaaacttgatccttacacaagatgataaatatgatcttcgttaaatcttttctagttaatatcttagctaatgggctaacttttgattcattacaactggaatcccatgaagactaactgatttaaaaatgcctacaggtaccgagggaagagaatgcgaattgactatttccttgtttcagaaaaactgaaggaccaaatagtttcatgtgacattcatggtcgtggaatagagctagaaggtatggggttaaaacattgcttatcatgctttccattgtgatacgcaagtatataaaagcgtcatttttacatttggcccttttaaaaaactttgttcaaatagaccagaatgaaatttgttctaagaatagacccaagtgttgatccatggatagggcaaaaagggtctgaatagtgggaggcaacacagctctcacactactatctctacgttcttaacatactgatactgtatctcttagtacttcctaagtatttcgtaagtaactcctaatctcctatcctaggaaactagtgatttagtgagagctgttatactctgccatcataactccaaggcacggtatgttgccacatcacttggcaccatctgagctgccgcattagacaaccatggaggggacttactagcatgtcacagctcagtgccatgtagtgtggtgtcatgctctcaaacatggtaataaaggttgaggtacattgttaatgtggtgcataaattttgtttactccaaatcattttgaaaatcttgttcctgaaaatagattggcgcatatgttatattatcccatcagcttgcttaacttcagctggttgcaactaatattatgcattttgtttctttttttgaggaacataacttgtcgagcctgattagctaaaatgttgttttactgtattagacatcgaactgcaaatacatgctggactattactacaatacaaattgcatgttgtcggaacttgtgacccatgttgtgacttgtgagcacactacactggttttttggaatttaaagtgcaaatggaatacgacaggtacctcaaccccatgaaaattagttacatgaacccaggtgaacaggacagagctggttgtcgcagtagtggtagtaattgcaccttgcgctttgatgctagttctgggggtagagtagaccttttctgtaattttgtgttggtgagttccatgttgtaggcaaatagactgtaggagatatggcagacaatagaaaaaatctgcaagtttagaagctccctttggaatcctcttttgctcttggttcagtgataaacatttgacctgtaactgaaattttatgcatgcctgccagtaataaacaccagcaccttgaagctattacatggtaacttccatgatcttctctacaagcaatgaatcgaacaaatttccttgtttccccctagtaaatggtaatgccaatatgctgtttaatgtcatggtacaattcattgacgtccatttttgcaggattttatgnaagtgatcactgccccgtttcacttgagctctcggaagaagtagaagcaccaaaacccaagtcctccaactaatttctatatttcgcacttaaccagacatggtggagattttagattagctgaagcatatctgctttgtatctcttgagtcattatccattattcaaatattgtctcagtctagcagtatttctgatgatgaattggatgatctagctaggatcctgattgtaattataattagtatgttactatggtctgcaatgctatctttagatcctataagatcaaaaacttctaccatttgttccattgtttttaatccgaagaaaaacaatatatgcaagctaattctggtccgcaggtagaccgcgtttgagaacatgtggagttaacctttataaactactaactactccagtaataaagttgcgtgcataacctacatgataatagcatctgtagatttttgtctagtatgattctcccgggaaaactgcagaaattacaaaatgacatcccggtgcattacatttgtgcctaggttccatgttcgtctgacacaatggaagctacggctctggttgtttaggtatgctgtagaaaaaataaagaaacaattaaaaataatttataaaataaaaactttatatttgtgatatcagcagtttaaaagtcaattttagaaaataaactacgatgaaattctttaagggcccctttgaaacattggattgaaaaaatacaggaataagaaaaacataggaataggatagaaattcacatgtaaaatagaggattgtcctctcaaaaaaaaaaaagaggattgtaaagccataggaaatgtataggaatatgtgtttgaatggagtataggaaaaacataggaatatttgcttaagaacttgggaccattttccatttctaataaatatattgcagctaaaacaaattaccattcattgcttgttcttctgtagtgaagaaagtcattaggagcttgattgcttcgatcctacgtaaagcaagtgaaaaatgagctcagactcctgtgtttctcccattgaatcagcgacgaatgaatatttccttcggttttcctatgaccaattcctacaaatcaaaggctgctacaatgaatgaatccataggaactcacatactccgtttttcctttgtttcaaaggagccctaaatcatcttagggcacctttgaatcgtagaatgaaaaaacggaagaatagaaaaggcataggattctgacaggaatgtaagcgtataatagaggattgtaaaacacaggaaaaacataggaatgatcgtttgattggaccacataataaacacaggaatcggatgaaagagatagactcaaaggatttttttttccaagaggttggacctcttgctaagtttcctccaaaacctatatactatgagccattccataggaattttgttggatttagaaaacttcaatcctttgaatcaaagggctacataggaattcctataggatttcaatcctgtaaaattccttcgtaattcctttgattcaaaggggctcttaagatttatattttcgttgtggttgataaggaatgtattttgtatttgtagcggtgtatgttttacggttatcagtggcccttatcccctctccactaaaaaaggcaaaatttgctacacgacatccaaaaaagtataattagttgtgggacaccataagaacgcgtatctactgaaaaaaaaccggtaattagctatagtacactcgtggcattattttattatatcccaaagaaatggagagagaaaaagctcaggaagtacaaatctgcccctttctccaccaccacacacctcgctctcccaacaatcgcttcctgttattgcttgctcctgtgcccaggacaaaaggggaaggccgacggacccaagccccactgcgccaccagagctaggaatgtaggatcgaaacacaagaactaagccaaccagagggggtgaatggttggtatacccaaaaacccaaacttttttgtggaataaaaagttaccctcaaattcgatggagatcggtctgaccgagattgatctgctggtctgaccaagttgataccgtcggtctgaccggagttgatcgcccggtccaaccgcctaaagattgcctctgcctcctgtcaccgttgccggtctgaccgcaggtatgccgccggtttgaccgttgccttgctgccagtctgaccgccggtgtgtcgccggttagactgctgaaccctagcaaacacaaatcgaagaaatctcaaagtagatgacaactttattacttatctatgtatttacaaagtgcaacaacaccactccttacgaaaatctcgactaaactcgaaaccctaactaaactattaactcaatgctctcaaaagcgataccgggaagcctcacgctccctcactatttatacatgaggtaggcagcctaaagccacaaaccaaactcatactagaagtcctaatccacataggaaaccttcccgtacaagaaacaaactttacaaactccaatcataccaaatttggactccttccaaattcgactccgcatcccatacgcacacaatacctccattgtatgacatatcgaatattcaccaaccacgtgcattgaactctagcctaagtatcccacatgatatctgaccgtcacggacatcgtcttatccccaagccgactcccgatccatcaccggcaatactctcccgagacatcaagtcacctacatatgaatcaaacaaagaaaccatatttcaagaccaagctatccccaacttgactcattgttagcaaacaacagtattacatacatataatatccatctagaagccataaatatgaaacaatcatggatatccaaataaataacccgaaaccgaaactaacacagagtcggccggtcagaccacgggttggccggtctgaccgctcgatcaccgctggtctgaccggcacacacagcccggtctgaccggaccaaatcacagacagcagttcctgtagatcacctgtaaaatccaatcatctccaaaaccacttcgaaaataaattccaaatatcaaaaccaataatctccaatgccaattgttcatcacaaaataacaattaaaaacacttttattttacaatctccttattcatgaacacattggcaaacccatcaaaaatgttttggtgtttggaaaaataaaaacaaaaagtggtaaaaagcacacttcgtacaaatgtacacatcgtgctcaaaatccgaaagaaaacttctctcacttttgaaaagaaagaaattccccttgaaccaaaaaacatgctcttctcaaacaactctccaacaaaaattcttctcttctcccaaaaactctcatttgcttctcccccttttgacaatgatttcatcaagcataagaattatgttcgtcaatgttcaagagcttagcatacatatagcatatcaagtcatgagttgcaataaaaagaagatgaacccatctataatatagcaagcatgcattaaagtataatcatgaatcaaagattttacaattaagttcaaatcaacaatcaaaattcatgatttcataagatttataatgcaacatcttaacaagcacataggttgaaaaataaacactaaacatatagacctattgcatttatcactatttctcaaattagctttagcacaaaacaaccaagagaatttttatcttttattttactttagcctttttgctcatattttttttctcaattttttccgggtacgtccttgtcgtcaagactgtttccaaggattcggcacccattatttttgctcatatcgaatacgtccttgtcgtcaagactgtttccaaggattcgttattcatttttttctcactcataaatatttttatcttacacaatgagcaattacaaagctatttgaggaataccaattcaataaagcatatatatataaagcatttataaatcaaaccatatgctagcatcaatattgcatattttcttaattcaaatatagaatttaagtgtcatgcatcatctcctttaaaagcaatatctaagcctcctaaaaagactagaatacatacaagctatgctagagacaaataaaccttcatattattgctagcatacacaagaaaatatcatatgtataaacaaagatccaatcatacttctgtactccttctgatcagcagcttcaccatcttcattaggatccaacacagctgtagaaccagttggtgttgatattggcttgca

SEQ ID NO: 28233 - DNA, 18452 bp, Oryza sativa
aatctttaaaaattcataactaattcatttgaactcagtttaatgtggttcaagttgcaaaaattatataaaataaagatctacatattaaaattgtccataaattgaattaaatttatttaattctttttaaatgggctttaaatagatttaatcttgtaaaattcgtaataaattcatttgaagtcagaatgaggccgttcaagtctcataattcatctaaaattatgatctacatgtttgtttattttttatgtattgtttaattggtttttattagtctttttcctcgttttgcgtgatagcttgtcgtttccgttgttgcgaaggttcgtgagtgcgccggaagtattcaagaagattaattgaagaccgattattgcaaggcaagtcacacagatcctaaacacaatcctttgagcatgttgatcctatatttaaattctctatttatttcaactgtgcatttattttcgaatgtcactgggtggtgtgaacctattcctttgttatggcctgttttcattgattactttattccttgataccttgggtgattataattggactagttgagctttatatatattggttcaactagatattagatataattgcttagccatgcttagaaacattagcacactattgggataacttatgactcattatttaatgatggcttaatgatagttcacgatggtcaatcgtgattggttaattaattacttgccaactaaaacttgataatggtgggttgtgagcacatggttttgagagtcgtgctcatgacaattaaggaccggttcgcgagctactattgtgaaacattaatcgtgccaaccacaagccagcgtgggcaacggctttaccttttgtatagcatgattcattgcggagcaccagactgagaagtggcggagataagcccacgggggtcgctggggagtccatgccttgttttataagggggtgattatgatccaggaatggtgcactgtggtgagttgtgttgtacaaagggtattgtcacagcctctattcgggtactttccagtatcgcgacgcatggtagacatgatgttgaggctgtgtcttgtgggtacagtggtacacctccggccagagtaaaaactattcgaatagccgtgcccgcggttatgggcgagttgagcaatgtttttcgtgattagtctcacacctctcacaataatttatggatattataactggtaataatttgcttagctcctggtttggagttagatctgtacagccgggtatggttgttcaggatggttgggcctgtgcagcatgggtgtgctgttcagtgttgattaaaatttctgattaattactccactgttttacttctcttaaatgttttgttaaatgctgcttttgcaaatgagcctatattatgccatcctttggtatccttgtgcacttgcatatttgctgtgtggcttgttgagtatgtcatatgctcattcttgtaataatcaatcaacctcagttgaagacaagttgcgaaggagaagacgtttggcttataccccagttgagctgcctgtgggagtggagccggagctgcgctagattttattttccgctgcagttttcttcttggtgaggactaagtgcctcttaagtaagtacttatcgttttagttaatttgatgaatctgtatattaaattgtcagtttgtgtacctcggctgattcctggacgaggattttatgcacaaataagtttggaaattacttgtgaatttccgggcgtgacaagttggtatcagagccatctcgactgtaggataagccaaatggtcaaaccttaaggactaattttccgaaaacatgatttgtgaaagtttctcctttcttccttatctagaattctttgcaaattgtttcattgtctacttccctctctctttcaacttgagtagttctgaaactagttgttgaaacttgaagacgccaatgtggtctacttatggaggttaagtcaagtggatcgatgaataagaaggtgatggtcgatctgaagtgcccagatgtcaagatggaatgaagtttggatcctaccttagaacctatgccgccaatctatccttgaagaatagttagtagggaagagcgtttgttgtttgctttgtttgtaggtatggttgcattcccatcattggagtagttcattgatgagtgtgtaactatactaggttgcttgcttaatcaacttgaacaatataatggtctacgcacaccagatcagtggtaacctggttaaggtcttgtctttagtgtaacctctctccttctatcttctctaatatgcaatagatggtgaacactcgcgccagtggaagtggaaacaataacaatgaagggaacccaactcttgctcaagtcctggctcaacagactcagttaatgaacatgatgatacagcagatgcagaaccagctcaaccaagggaacaacaatgctccaccgccgcagaacaagttaactgattttcttcgtgtaaggccacctaccttttctagcactaccaacccagtagaagcaggtgattggctacacgctgttgagaagaagttggaactgctccagtgtacggatcaggagaaagttgttttcgcttcacatcagttgcaaggacctgcatcagaatggtgggatcatttccggatgaacagagcagaaggacaaccaatcacttgggaagagtttactgaaggattcaagaagacacacatacctgtaggagttgttgctttgaagaagcgtgagtttagggccttgaagcaaaaggatcataccgtggcagagtatcttcatgaattcaatggcacgttatgctccagaagatgtgcgtactgacgaggaaaggcaggagaagttcttggaaggcttaaaggatgaactgtcagttacgttaatctcccatgactatgttgattttcagcagctggttgacaaagcaattcgacttgaagacaagaagaacaggatggataaccgtaaaaggaaaatgattgtattccaggaggcacaaggtagtagccagaggcagcgtatcaagccactccaaattggtgaatcttcttccgctggtcaaggacagtcgcaacagttgaatatcgctggtgagatcaaatcagagactaatgaaagcaatgaagttaacatcgagcaaataaatcagccgatgccagttcagcaggatcagtctcgggagaataacagtagtagaagggagcagcaggtatgtttcaactgttacaagccaggccactttgcaagagagtgtccgaagccgaagcatcagcagccgcaaggtcaggtcaacaacattgtcgtcacaggagccaatgcagtaccagttgtgtcttcaagagttgcatcttcaagtgttacagctcagccactagtttcaaagcggcagtagttttctataaagccttagaataattatcggagttatggaataagatagactgcagtttacctatgcctttttctttctagccgttccgaatctcgggacgagattctttgtaaggggggtagatctgtcacatcctgattttttcgttttaggatttataaattatttaataaattattaatagaatttatattaaatgttctttaatttacaagaaaagttaaatgtgggaaataaaatttcctaaatataaagcatggatggatttaatttttattaaattctccatgattaagtcaactctctgaaattttctcggatttttcggagctcaattcctaaatgatacaaagaacagttcagtaattatttgatcattaatgatctaattatttttgttaagagcttttcttgtttaaaaatccttaaattataaattgttgtttaaaaggaattgttagaaatgattttaaaagcctaaaagagaagatctaattttaatttgttgaatctcaatataaaattgggctagataaaattttgttaaatactttgcttaattctataattcctagatttttctgggatttatttgagctaaggaagtatttttaataaatggaattgcatttcatgaataatttaaattgaaaaaggtttttaaaagtctcttttggctttgggccgaaagtcggcccaagtcggcccagtccgccgagccgccgctctcctctctctctcagccgctgacaggtgggtcccacttgtcagggtcgtcgtcctcctcgcgccgccgccgccgcccgaaaccctagcgcgagccgccgccgtctccttccaaattcggccgatcctttccttctccggccgaatctttagagggaaaatgatccttgagatctcctcttccttttctcttttggaatcatcggctaaaatcgtttggaaattcgtggattcgagttcgattcggatcggcctctttcctccgaatccccgatctttccatcccgccgccggtcgccgtgggccttcgccgtcgccttccaacccctttaaaaggacccccggtgtctcctctacccgccgcctctctcgccttcgcctaccgtcgtgtgtagcaccctagcctcgtgagcttttgcgccgccgtcgtcgccgctgctccagccgtgtgccgccgccgtttcagctatcgccgtcgctcgggaaggtcgtcatcgtggtcgccgtcgggatcgccaagtcgtcgccgtcctcgtccgcccctttgccgccgccggagaccgctggagcaccgtcgccgccgtcgacccgatcttctccgccgctttgacctcgtcgccgtcgccgtccgttggtcttccgccgctcctttggtcaccggtgagttcgtcgtgccgtccgcttcgtcccggtgccttccgttcacgccgtcgcgccgtcgttcgccggcgagcgtgcgccgtccgagctgccgagccgcccgagccgccgccgccggtggtgacgtcatcgctgacgtcatcgtcgctgtctcccgtgagccgccgtggacccgatcgatctcggccgtccgttttggatagggttgatctcggccgtccgttcccgtgaaccgtcgtcgtgcacccggtccaccgcaaaccctagccgctgacgcaataatcctccttttccttttcaaaaataattcattattgcgtcataattcaattaaaatccatataagtgttttaatccgatttaatctttaaaaattcataactaattcatttgaactcagtttaatgtggttcaagttgcaaaaattatataaaataaagatctacatattaaaattatccataaattgaattaaatttatttaattctttttaaatgggctttaattagatttaattttgtaaaattcataataaattcatttgaagtcagaatgaggccgttcaagtctcataattcatctaaaattatgatctacatgtttgtttactttttatgtattatttctttggtttttattagtctttttcttcgttttgcgtgatagttagtcgtttccgtcgttgtgaaggttcgcgagtgcgccggaagtattcaagaagattaattgaaggccgattattgcaaggcaagtcacacagatcctaaacacaatcctttgagcatgttgatcctatgtttaaattctctatttatttcaactgtgcatttattttcgaatgtcattgggtggaattaacctattctttgttatggcccttttgttcttgattactttattccttgataccttgggatattataacttgactagttgagctttatatattggttcagctagatattagctatgattgcttagccatgcttagaaacattagcacactattgggataacttatgactcattatttaatgatggcttaatgatagttcacgatggtcaatcgtgattggttaattaattacttgccaactaaaacttgataatggtgggttgtgagcacatggttttgagagtcgtgctcatgacaattaaggaccggttcgcgagctactattgtgaaacattaatcgtgccaaccacaagccagcgtgggcaacggctttaccttttgtatagcatgattcattgcggagcaccagactgagaagtggcggagataagcccacgggggtcgctggggagtccatgccttgttttataagggggtgattatgatccaggaatggtgcactgtggtgagttgtgttgtacaaagggtattgtcacagcctctattcgggtactttccagtatcgcgacgcatggtagacatgatgttgaggctgtgtcttgtgggtacagtggtacacctctggccagagtaaaactattcgaatagccgtgcccgcggttatggacgagttgagcaatgtttttcgtgattagtctcacacctctcacaataattatggatgttataactggtaataatttgcttagctccggtttggaatggataattcctggtttggagattagatctgtacagccgggtatggttgtttcagaatggttgggcctgagcagcataggcatgttgttcagtgttgattaaaatttttgattaattactccactgttttacttctcttaaatgttttgttaaatgctgcttttgcaaatgagcctatattatgccatcctttggtatccttgtgcacttgcatatttgctgtgtggcttgttgagtatgtcatatgctcattcttgcaataatcaatcaacctcagttgaagacaagttgcgaaggagaagacgtttggctcataccccagttgagctgcctgtgggagtggagccggagcttcgctagattttattttccgctgcagttttcttcttggtgaggacttagtgcctcttaagtaagtacttatcgttttagttaatttgatgaatctgtatattaaattgtcagtttgtgtacctcggctgattcctggacgaggattttatgcacaaataagtttggaaatcacttgtgaatttccgggcgtgacatgtaccccggctggtcctggacggggaatttaatgcacattctgcttgaaattctattcgggaatttctgggcgtgacaagttggtattagagccgaccttgaccgtaggacaagccaaatggaaaaacctaaaagccctctgaatccttttcattgcatatgttcttggcaattggatttgttccgggaaaattgggatccgttcttgtggttcaagggaaaaatcttggtcgctcgtttaagtgagatttgtcaaaacgagtcaatctagagttttagtaaaactcttgagatttattcgttagtcagttgggatttgatgggtgaaatgcattaggtcctagctcaggaacatgggttgcaaggtatttcagctcttattgttattattagtatgtatctaatttccccattattttatcgttatgtgagtctgtcttatttattcgcactcatgcaaaatgatctatgcataaaatttcgctcttattcgattctcttatttgagtcttttattgctttatttaaatttggatttgagcatgcattgatcctactcctttgtcttctctagatggccggacacccacccaaccaccgcggagaaggcatgattgattttgtggcagagttggcacgcatgacgctggtggtgggctaccccaacgcgccagagtagacgacggttccaccgctcagtggcgagcttcctcaccgtgttcgcttggaggtccatggctacgtgggtacctgcctagctaacatggtggttgaggcgtccggaggcacagcagatcacgcctgtcaggaggcagcatacctgatgatggccagactacgggagcgccacaactacatcttccatgacatggcataccgttttcaccctcgtcgagccagtggtgatgatgtcagcaccttccgtccgacaaccggccagaacgacaccacctttggtcacatgtgtgctgtgatgagtggattggataggatgcactcggacctgcacaaggcgaccaaggccttgaacgatgggaagctcatgaggatcgtcgctctgatggacgagatagcgcgcctgaagagggagaatgctcagttaaagggtcttcccgcgccaggaggagtccggatccgcaccacaccccgcaagacgacgacggcacccgtgcgcatccagcttgcgcccaggaacccacctccatcagcagctcccgcagcacctccagttccgcccgcagttcctgcagctccagctccagctcccgcgtccgctctctccttcgctccagcatcagccgccaggggtccagccagtggcaacggaggttggttgtctgctactcccagtggcagccgcgatctcagcagcagcagctccagtggctcagagtcgggcagcggcgagacttatctgccaggctccaggagtcgctcagagggacctggtgacgagcaggaggacgccttcgactccaccgaccgcaggagccgttccgagcattaggctcgttttccattagttaatcgactgtctagcttctgcttgttagtttgtgtgtttaggttgcttgcttggggtcagtcgacggtcgatatcatgtgcctatgatatggctgtcttaataaggattttcgcttgttttttttaagtgttttaattcagatcagaacaattgcagtttaaattcctttgtaataaagcttagtttctgagcttctgtttttcttcttttccccgtctgcttctccctccagatggtctacaccaggaatggtagccgcgcaacaggcgagggcagcaacggcgaagagcgcactgatggggcgcatccccacagcgattccggcaatggtccgccaccacttcccgagaatccgacgctagtccaagtaatggcacatcagacccagatgatggcagccatgatgcagcaccagcaccagcagatgcaccagcggatgctgcagcacgccgaacagcagcatcaacagtttggtccccctccccctcagtccaagttgccagagtttctacgtgtcaggccacccaccttctccagcaccaccaaccctatggaggcgaatgactggctccatgccatagagaagaagctgaatctcctgcaatgcaatgatcaggagaaggttgctttcgccacacaccagcttcaaggtcccgcgtcagcttggtgggacaatcacatggccacccgcccaccaggtactgaagtcacttgggtagagttctgccgtagcttcaggaaggcgcaggtgccagatggggttgtggcacaaaagaagagggaattccgggcactccatcagggcaacaggactgtgacagagtacctccacgagttcaatcgcctcgcgcgatatgcaccagaggatgtccgcaccgacgccgagaagcaggaaaagttcatggcgggtctggatgacgagctgaccaaccaactgatatctggggactacgctgacgttgagaggctggttgacaaggcaatccgtcaggaggatcaacgcaacaagatggacaggaagaggaaagccgcacagttcagggcacctcagggaagtcaccagaggccgcgcttcgctcccaggcagcagggtggacctaccaccatgatcgttcgtcagcaccgcccgttcaaccctagcaactttccccagggcgccagtggcagtcagaaccaccatggaggtcagtccaaccgcggtgcagctccacgcccaccaatggcaccggcacagtcaggcccgcccgcgcaagccaagaaggagactggagcaaaaccagggtcctgcttcaactgtggtgagcttggccacttcgctgacaaatgcccgaagcctaggcgtgccgggccaaggtttatccaggctcgtgtcaaccacgcatctgcggaggaggcacaagcagcaccagaggttgtactgggtacgttttctattaactcaatccctgcaacagtactttttgattctggtgcaacgcattcgttcatttcaaagaagtttgttgggatgcatgggttaataagagaggaacttagcacaccgatgcgggttcataccccagggaatagctccacttcggttcaattcagcccttctataacaatagaaattcaaagatcaccatttctagccaacctcattcttctcgaatccaaagacctagatgtcattcttgggatggattggctgaccaagtttaagggggtcatcgattgtgcgaatcgcacagtcaccttgaccaacgagaagggagaaaccgtggtgtacaaatcactagtctcaccaaagcaaggggtctctttgaatcagattgaagcagaaatcccagtggacaccgtggagaagaatttgaggaaattggaagatatacccatagtctgcgagtatccggaagtgttcctcgaagacctcactaccatgccacccaagagagagattgattccggattgacttggcaccgggaaccgccccaatttacaagagaccgtacagaatggcggccaacgaattagccgaggtcaagaagcaggttgatgagcagctgcagaaagggtacattcgaccaagtacttcaccttggggtgctccggtcatttttgtagagaaaaaggataagacgaagaggatgtgcgttgattatcgcgcactcaacgaggtcaccatcaagaacaaatatcctttgccgcgaatcgatgatttgtttgatcaactgaaaggagctaaagtgttttctaagatagacctgcgatcaggctaccaccagttgagaattcgggaggaggatattccgaagacggccttcaccactcggtacgggctatatgagtgcacggttatgtcgttcggacttaccaacgcacccgcattcttcatgaatctgatgaacaaagtgttaatggaatttctggacaagtttgttgtggtgttcatcgacgacattcttatctattcaacgtccgaagaagaacatgaacaacatctccgtctagtactcgagaagttaaaggagcaccagctatacgccaagttcagcaagtgtgacttctggttgacggaagtcaaatttctgggccatgtcattacagctcagggtgtggcagttgatccatcaaacgtggagtcagttaccaaatggaccccgccgaagaccgtgtcgcagattcgaagttttcttggacttgcaggttattaccgccgattcatcgaaaacttctccagaatcgcccgacccatgactcagttgcttaagaaagatgagaagtttaaatggacaactgagtgcgataagagttttgaggagctcaaaaagaaattagtatccgcaccagttttgattctgcccgaccagatgaaagacttccaagtctattgcgatgcatcccgtcacggacttggatgtgtcctaatgcaagagggcatagtggttgcgtatgcctcgcggcagttacgtccacacgaagggaattatccaactcatgacctggaattggcagcagtggttcatgctttgaagatctggaggcactatctgattggcaaccgctgcgaagtatatacggaccataagagtctgaaatacatcttcacccaaccggacctaaatctccgacaacgaagatggttggaactaatcaaagactatgacatgagtattcactaccacccgggtaaagccaatgtggtggcagacgcattaagccggaaaagttactgcactgccctatgcatcgagggcatgtgtgaggaattgtggcaggagtttgagcatctcaacgtgggaattgttgaacacgggtttgtagccgctctggaggcacggcctacgctcgtggatcaagtcagagcagctcaagtaaatgattctgaaatagcagagctgaaaaagaacatgagggtcggaaaagcccgggatttccacgaagatgagcatggcacaatctggttgggagaaagattgtgtgtacctgacgacaaggaactgaaggatctgatactcaccgaggctcatcagacccagtactccattcatccaggcagcactaaaatgtatcaagacctcaaagaaaagttttggtgggtcagcatgaggagagaaatagctgaattcgtcgcactctgcgatgtttgccaacgagtgaaggcagagcaccaaagaccagcaggtttactccaacctcttcaaatcctggaatggaaatgggaggagattgggatggactttataacgggactgccccggacatcgtcgggtcacgactcgatctgggtagtcgtggatcgactcactaaggttgctcacttcataccagtacataccacgtatacgggcaaaaggttggcggagctttacctttcgagaatcatgtgcctacatggagtacccaaaaagattgtatctgaccgagggagtcagttcacctcaaaattctggcagaagctgcaggaagaattggggacccgtttaaatttcagcacggcctatcacccgcaaactgatggtcagaccgagcgagtcaatcaaatcttggaagatatgttgagagcttgcgctctcgattttggtggagcttgggacaaaagcttgccatatgcggaattctcgtacaacaacagctaccaggccagtctacagatggcaccgtttgaagctttatacggccggaagtgccgcacacctctcttctgggatcagacaggcgagcgtcaactgttcgggacagaggtattagcggaagcagaagagaaagtcagaatcatcagggaaaggttgaggattgcccagtctcgacagaagagctacgcggataaccgccgaagggagctcacttttgaggcaggagattacgtgtatcttcgtgtcactccgctccggggagtacaccgttttcagacgaaaggcaagttggcaccacgcttcgtgggaccatacaaaatcttggaacgaaggggagaagttgcttatcagttagaacttccatccaatatgatcggtatccatgacgtgttccacgtgtcccaattaaagaagtgcttaagggtacctgaagaacaggctgattcgaaacacattgatatccaggaggacctaacatacgtggagaagccgattcgtatacttgataccagcgaaagaagaaccagaaacaaggtcaacaggttttgccgagttcagtggagtcatcattcagaagaggaagcaacctgggaaagggaggatgagttgaaagccgcccatccgcacctcttcaccagctcctccgaatctcggggccgagattccgtttaaggggggtaggtttgtcacaccccgaagttctcctcccaggcctaaaatttaatttataaacgaccccccaagaaaatgcaggtgcaaatcaagagaaaaccctaagaaagtaatgcaaataataatcggatttgacatgtggaatttttcttgagttctacatgtcgaaattcattaacaggatttttagtggaattttcagagctctagaaataattttaaccaattaaaattgagcaagcaatattttaattccagggaaaatcctttttccttcttctttttctttttcctccctttttttttcctccttttttcgaatgggccgccggcccattctctccttcctccccctcctccctgctgggccggccgcaggccgaggcccagccaggccggccgcctccctcctctccccggggtcgccgacaggtggggcccacctgtcgggcccttccccaacctccggccactcgcccacgtcgcccatccgaccgccaccccgcctcctccggtccacatcggccacgcccgtgcgtgcgccgcgcctcccgcacccactccccctctctctctcgccgggccctcaaccgagatggccgggattcaaatttgaatcccgccgctctctctctctctctctcccccaccttcaacctcccacgtcgccgacgaaatcgggagcgccttggccacatccgtctctcccgagcccctataaagcatgcccgcactcccctccacatattttctttttccaccgctctctcccgtgccctccattgctcccgcgccgtgcgcccatccgccgccgcctctcccgctactccggccgcctctagccgccgctacacttgccgccgcaccgcgccgtcggcgccgttgggttcgcgcggccgaggtccaccccgttcacccctcctccgtcgaggttcgtcgccggagccctcaccccctcgcactctggtgagcaccatctctaccgccgccttcggccatggtttccgcccgccgtggaccacccctctccctctaatctctctcttttcctttcttagggcatctcggagctcgtccgcccgccgacgtcgtcctcccgtggctcatcgtcgacggtcgccgccgtcccattcggtgaggactcccacccctttcctttccttcccccgatcccccgtgcgtcgccgtcgcccgcgctcgccgtcgccttcggtcgctgccgccatccgttgccgccgtttccgcgtcgttttgcgccgtcgccccgccgccggatgcgccgccggcaacgcattcgcgcgcgcgccgtcgccgcggccggtcggccggccttgagccaagccgagccgggtgccgccgccccttttctttccccccccccgccgctgaccagtgggccccgcgtgccggcgcccttcctctctctcccgagccgctgactggtgggccccgcatgtcggcgccgcttccccgtgctgatgtcagccctggaaaatattgcgcaataaattatttaagaatttttgttatagtaataaacacagtgaatcttctaaaattcataactaattcatccgagctccgtttaagcccattcaagtctcagtaaatcaagagtaatgtgtagaatccattaaaaatggttttgttccctgtttcagtagtcttatagcctgtttgcattgtttgctttgtatgtcgctagattccgactcctccgacgctccggtgtacttcgaaatagtcgccgaggttcctccagcagcagagcaaggcaagtcatgcttgtcacttgaacatgttgatcctatattgcaaatgctctattgttttctttcaaatattgcattgttttataatattactatgggatggttacctattgttacagctatgctttttggataccatgctcctttgttagcttggggttacaacatgattagagtttggactaggaattgcttagccatgcttagttcaactagttcacaatggggaaaatcctattaatgtttagactgttggttctaatggttttgttggattagtgccaccgctttggtgttggttaattaaaataaatcacatggtgggctgtgggtgcatggttttgctggtcgcacccatggcagttaaggaccggttcgcgggatgccctgaaagaacttatcgtacttaccacaagccagcgtgggcaacggctgggcttgtagtgtagctctcatctagtcgacgcatccaggcaagggtgggcgtgatggagcggggcgggccctgcgacggcctctgtcgtttccggattcacctaggcacgagaggggactgcccgttgcccgctggggacgggggtgaaacctgaggtgtggtgtgcttggctagagggggttatgcgaagggtcctgtcacggcctctttctgatatgtcgtggtggcatgtcggcgcatggaaacgtgtcgtggggctgtgtcttgtgggtacagttgtacacctctgatcagagtaaaactattcgaatagccgtgcccgcggttatgggcggtcaaccagattcaccgtgattagtctcaccctagtgtaatcttttgaaattggatagtttaggtggatggttgggcctgtcgcaacgtgggttagcgttgggcagtggatagttgatattaattaattattacaacggtttaatctttcaacttctgtttataaatgctcgctttatgcaaatgaaccgctctagctcttctttgataattccctgcatcatacccctattccggtatgacttgctgagtacagtgggtagtactcagtcttgctctacttttcccaacccagagttcgagtttgggtcagataaaggtttctctgaggagtaggcttcgtccgtgccgtcgaggatgcctgtggagtggtgttcccgctgcagtttagtcaaggcttagctcctgttgtctttcttttcttccgctgcatttatgtaagacttttatgatgtttgtaagacgtggatctgaatgtcaacattgtcgtttgtgtactgtcacatcctgatttttgtttcaggatttataaattatttaataaattattaatagaatttatattaaatgatctttaatttacaagggaagttaaatgtgggaaataaaatttcctaaatataaagcatggatggatttaatttttattaaattctccatgattaagtcaactctctgaaattttctcggatttttcagagctcaattcctaaatgatacaaagaacagttcagtaattatttgatcattaatgatctaattataattgttaagagcttttctggtttaaaaatccttaaattataaattgttgtttaaaaggaattattagaaatgattttaaaagcctaaaagagaagatctaattttaatttgctaaatctcaatataaaattgggctagataaaattttattaaatactttgcttaattctataattcctagatttttctgggatttatttgagctaaggaagtatttttaataaatggaattgcatttcatgaataatttaaattgaaaaaggtttttaaaagtcttattttggctttgggccgaaagtcggcccaaaacccctctctctttctctctccctccccggcccagtcggcccagtcagcccgcgctccttccttttctctctcggtgtcgctgacaggtgggtcccacctgtcaggttcgtcttcctcgcgccgtcgccgccgcccgaaaccctagcgcaagccgccgccgtctcttccaaattcggccgcgcctttccttctccggccgaattgattgagggcaattgatccttgagatctcctcttccttttctcttttggaaacatcggctaattttctttggaaaccggtggatttgagttggattcggattcatctctctcctctaaccccgacctttccttctcgtcgccggcagccgtgggccttcactgccgcctccttgcccctttaaaaggacccccggtgtctccgctacccgccgcctctttcgccttcgcccgccgtcgtgtgtagcgccctagcctcgtgagcttttgcgccgccgtcgccgccgttcgtccagccgtgcgccgccgtcgctacggtcgtcgtcgtcactcggaaaggccaccgtcgggatcgccaagtcgtcgccgtccccgtccgccgcttcgccgtcgccgaagatcgccggagcaccgtcgccgccgtcgacccgatctccgccgccgcttcttcctcgtcgccgtcgccgtccgttgttcctccgccgcttctttggtcaccggtaagttcgccgcgccgcgctctacgtcctggtgccctccgttctcgttgtcgcgccgtcgttcgccggcgagcttgcgctcccgagccgccgccggtgctgacgtcatcgttgccgttccccgtgagccggtcgtggaccgtttgatctcggccttccgttttggatagggttgatctcggccgtccgttcccgtgaaccgtcgccgtgcacccggtccaccgcaaaccctagccgctgatgcaataaatcctttttccttttcaaaaataattcattattgcgtcataattcaattaaaatccatataagtgttttaatccgatttaatctttaaaaattcataactaattcatttgaactcagtttaatgtggttcaagttgcaaaaattatataaaataaagatctacatattaaaattgtccataaattgaattaaatttatttaattctttttaaatgggctttaaatagatttaatcttgtaaaattcgtaataaattcatttgaagtcagaatgaggccgttcaagtctcataattcatctaaaattatgatctacatgtttgtttactttttatgtattatttatttggtttttattagtctttttcttcgttttgcgtgatagttagtcgtttccatcgttgcgaaggttcgcgagtgcgccggaagtattcaagaagattaattgaagaccgattattgcaaggcaagtcacacagatcctaaacacaatcctttgagcatgttgatcctatatttaaattctctatttatttcaactgtgcatttattttcgaatgtca

SEQ ID NO: 28234 - DNA, 1242 bp, Oryza sativa
ctctttccgatatgtcgtggtggcatgtcggcgtacggaaacgtatcgtggggctgtgtcttgtgggtacagttgtacacctctgatcagagtaaaactattcgaatagccgtgcccgcggttatgggcggtcaaccagattcaccgtgattagtctcaccctagtgtaatcttttgaaattggatagtttaggtggatggttgggcctgtcgcaacgtgggttagcgttgggcagtggatagttgatattaattaattattacaacggtttaatctttcaacttctgtttataaatgctcgctttatgcaaatgaactgctctagctcttctttgataattccctgcatcatacccctattccggtatgacttgctgagtacagtgggtagtactcagtcttgctctacttttcccaaccccagagttcgagttcgggtcagatgaaggtttctctgaggagtaggcttcgtgcgtgccgtcgaggatgcctgtggagtggtgttcccgctgcagtttagtcaaggcttagctcctgttgtctttcttttcttccgttgcatttatgtaagacttttatgatgtttgtaagacatggatctgaatgtcaacattgtcgtttgtgtaccccggctggtcctggacggggaatttaatgcacattctgcttgaaattctattcgggaatttctaggcgtgacaccgtatgcccgttgggtacaggttttgacctaataaaaaacccatgggtactaaatggagaataaacctaattctattagggtttttacccatgggtaaataggcaaacatgtcaaattgccatccctaattgcattggctacaatgcgtagggcaatttggtggatacctggctacaaacctcacccgagcagcccttatccagatgagcgacaagtggttgaggaagggatcctatggtgcgactgcacggctccaattgcgtgaagagacggacagctagccgcatgcacgatctccacgcgtggaagcgcggctcggctccgctttgctcgttgctggggatgcggactacgcggctagaagcagaagcgacgcatgtcatcaccgcgtctgtttagggtgcttaagattacgggaagtagttggttggtggtcaatttctgagaatgtgaaaaagctaagtttcccagcgtttgattaatttctagtttattttctatattaaataactacagttttttagaatcaaagctatat

SEQ ID NO: 28235 - DNA, 2809 bp, Oryza sativa
atgcataattaatgcaacggggtacaaggggtaataagatataggggttaagttctcaagaaagcagcatttaaaagtcacttagttgcccaaagccattttaaaaagacgatcctagagttacacagtattattaatcagggtcgtgaacccgcacgagcctgccttaacccaaggcctacgatgattcagaccgaactggcaacccgaccttgggtcccagctcgtcccaagccaacccaggccaaccattccacattttagttgttgagcaaattttaagaattaaaacactaacttgggtacattgctcggcttgcccataaccgagggcgcggctattcgaatagattatactctgatcagaggtgtacatctttacccacaagacacatcttcctcacgtgtaaccacgtgccacataccaccacggtatacggacggaagacgtgacatagttcccaacccatcctagccataaacaagagtaccgacccaaccccacctacggccggaacccccgggacaggcaggcaggattgagccccctagcagcaggacaccggccctgtgccatgacatctcgactaccgggccgcagctcgtgtagccttcatttgtcctagagatgtccatcgacccccgacttcgtccatctccatccgtgtacttttgtttataaccagactgagccacaaactaagccttacccactagacatgtggaagtacggtagtgctttgcaacagaggcccgagcttaatccttatagtggccggggtgctacttcccacaactagcatgcacccaaaccccaccgaaaaacaggttttaggggctttgaaagaggaagagaggggtatgtccaattccacaataagccaaccattccatagtatccaagtgatatgagaattccccaagtctaaagttataaaaccacctaatgttgcctaattaaacagcgaagcatctacctaaattcatactagtggaaccatgaatagagtgtccactagttggggttttgtttattctagggtgaacaaggtaataataacaatagcaataataataaggtcataacaaaggtaaataggcatggctaaataaaacagtgataacgcaggaatttaaataaagcgataatgcattaatttaaatcaaaataattttataaactgggattcaatatgctcaaggatgatgtgacttgccttgctcgctttcccaaacgtcggcttcaacttccacgaagagcggatcttccgaagctgcagcgtctacacgaccaacggaaaagaaaaggcttttactctactaaactccatataacaagcagaaacaaagcacaaaaatgggttcttggcttcttaaggaaaaattagagacttgaacggtccaattccgagttcaaatggccaagttatggccatttgaagtttatatgctctttaaatggatatttacgaatttctttatttaaattttaatttaaaatcggatttattgcgtcagccgaggggaggggcgcgcggaccgggtccacgggagtggggcccacgcggcagcctctcggtccacgatggaccgggtgcacgcggcttacgccggccggcgccgtgggtcccacgcgtcagccgcacccgagggcgcgggcggctgacggccgggccccacatggcagccgcggggcgcgcccgaaggcggcctcgccggcacagccgacgggaggcggcgcgcccgcgccccgatggtcgccgccggcgaccaccggcgcggcggagcggcgcccgagagaggggagggaagggggaaacgaaatgggcggtccacggctcaccccgggtcgacggcgacgacgggaacggcgaccggagcggaggaaggcggcggcgcggctcgggttgacgaggacggcggcgttccggcggtcggcgggcgaaacggaagggtggacgaggtcggcgaggacgcggcgaagccgaaggaggcgacgccgaggcgggaggcggtccggggtgacgatggcggtggaccggagctcggcggcgacggcggagagagagagagcgacgtcgcgagctgaaatccggcaaggaggaaggtcggcgagaggcgaaaccgaacggaggaggtccgggaggggtttaaatagtgccggggcgatagagggtggccggggaagggaggaaaccagcgcgggaggtcggccgccatcaatggcgccggcgagattaggggagcggtttccacccgaattcgagggagagagggtgggaaaaatggggggaaagagagagggaaacacggggagtgatttccccctctttattgcgcgcggggacggcgggaggcggcgggattcgcggcggcggcggcgctagggcacgggcgaggcggtgggagcggcgggaggatagggatgacaggtgggccccacccgtcagcgagggtggcgggcgggcccgcccgtcagcggcgcgcgcgtggggagaggccgagtgggccgcggggaggaggagagagagggagggagatgggccgagccggcccaagagggggaagggggggggggaaaaagactttttagagcttttctttttataaaaccattttaactttgtttatttcttaataattattatttgtgctctaaaaattccactaaaatttgagggctccttttagaccaaggagaatttaacaaaaattctccgggccacatttgaatttttcttgtacgtattttagtgtttgccaatttcttttcgaattttaattaattctattattccttttagagaat

SEQ ID NO: 28236 - DNA, 2817 bp, Oryza sativa
tagttcatcagacggaatctaagcagaaaagagcaaaaacaccaaaacaacacataaacaagcatgaacagtacatgtggatatttttaacatgtagatctcgattttagaaaaatttagagacttgaaccaactaaatccgagctaagatgaattagttatgaatttttgaagatttaatcggattaaaacacttatattgattttaattgaattatgacgcaataatgaattatttttgaaaaggaaaagaggatttattgcgtcagcggatagggtttgcggtggaccgggcgcacggcggcggctcacgggaacgaacggccgagattgatccatccaaaacggacggccgagatcgatcggtccacgaccggctcacgggagagggcgacgatgacgtcggcggtgacgtcaccaccggcggcgacggctcggcggctcgacagctcggacggcgcacgctcgccggcgaacggctgcactacggcacgaacggagggcaccaacgggtagagggcgacgcggcgaactcaccggcgaccagaagagcggcggaagatcaacggacggcgacggcggcgaggttgaaacggcggcggtcttcgagtcgacggcggcgacggtgctccggtgatcttcggcgacggcgaaggggcggacgaggacggcggcgacttggcgaccacgacggcggtcttcccgagcgacgacgacggctggaacggcggcggcgcacggctggagcggcggcggcgacggcggcgctaggttacacggcgctagggcgctacggacgacgagaggcgaaggcgaaggtggcgacgggtagaggagacaccggggagccttttaaaggggctaggaggcagcggcgaaggcccacggcggccggcgacgagaaggaaagatcggggtttgaaggaaagagaccgatccgattcgaactcgaatcaaacacattccaaaccgatttagccgatgtttccaaaggagaaaaggtagaggagatcccgaagattgtttcccctcaatcaatttcaccggaaacggaaaggaacggccggatttggaaaggaacggcggcggcgcgaaactagggtttcgggcggcggcggccggaggtcgacgacgaccctgacaggtgggccccacctgtcagcgggcggacgcgcgcgcgcggcggactgggccggactgggccgaggagagagagaaaggttttgggccgactttcggcccaaagccaaaagagactttttaaaacctttttcaatttaaattattcatgaaatgaaattccatttattaaaaatacttccttagctcaaataaatcccagaaaaatctaggaattatagaattaagcaaagtatttaatgaaattttatctggccccattttatattggaatttattaattaaaattagatcttctcttctaggcttttttaaaaataaatctaataattccaattaaacaacaatttataaattttgaattttcagggtgtgacatatgttgataggtctactttgactttggattcgctttacacaaaactcaaaacacatgagatgaatattctttctcgaagagttgattctaagtctagtgcttaggtttcttcctcgacttctttggatgttggtgcctcttcatcgaagtcttttattcttgctttaattaatggcatatccgatgaacaactcgaataattcgaggaggatttggttttggttactaacaagttttctcgagctatgaataatgttaggtacaggaaaagaggtggtccaaattgttgctttgaatgtggttctcttgatcaccttcgtttgcattgtccaaagcttggaagaggcaagatggaagataatggtggagagaagaccaatgacaacaagccgaagagcacattcaaagggaagaagaagaaggagactctcaagaaggcttttgatcaagtctatgctgcttttgagccactaagtgatgtagatggtgaaagtgaagatgaagataagggaaagaacatttccggtgtttgcttcatggcacgtggtgaatcggattcggagtgtgaagacaatgaggtacgttcttttgagaaagctattcttattttaagtgcaaaaaataagaagtgtgagaagatgtatagaaaacaggagtttattattgaatctcttaattctgaagttgctagattaaaatatcttattcccaatgattgtgattgcaaaagttgtgaggttttaatgaatgaaatttcaaaaattagagatgtcaatgctgcacatgatttgaaaaatagatcttctctagatcttggatttgccttgcgcacacacactttggatgagttgtttttgactaaaaagttgttgcaaaaatatcaaattgcttttcgtgctagtttgatgtttaacataatttgagccaaaaagttaaaataaccacatgatgttttggattgctcaacatgtacattaaacaagatgaaactaaaagatgctttaggtcgtgttgagtcaatggaagatgttgtgaaaactaatgaagtgatttcttgctccaaatatcgtaaaagcaaaggtgtcatggtaaattgtgaaaattgtgctaatttggaaaaagaggtttcttatttgaaaaattctttgcaaagattttctgatggtaagaaacaacttaacatgattttggatcaatctaaagtgactagttacaatagggtgttggttttgatgttcatgactatttcaccaaaaatcaaccaaatgttttgagtgtgactgaacatggtgaaattt

SEQ ID NO: 28237 - DNA, 1648 bp, Oryza sativa
aaaaacaaatctttcaaaaccatcttcttttaaagaaaagtacacttgttcttttttgtggtaaggatgaacatcttgatggttaaattagctcgtaaacagaaaaaagaagagataaatggcttttgcaaaatcaaagtggcaaaaatctggttttccctcgaggaaaccggtcagaccgcagtgggtcccgcggtcagaccggttactgagcggcggtcagaccggtggttcagaagcggttagaccggcccccggtgagaccggctactgtactacggtcaaaccggactcggagaaatttttctgaaaattctcaaactgtttttgcacgtggatatatgcctattggatctactggtcgtgtgtcctagattcctaaatttgtattatctaaccccagtcctgaggcttcaacatcttcatgtgtgtaggctttggtggcgaggaaggagaacgtgtggatcgtggattccggttgttcgcggcacatgaccggtgataaaaattggttctcctccctcaaacaggcatccaagactgaatcgattatctttggtgatgcttctactagtgcagttctcgctacaggtttgctcaaggtaaatgacagattgaattgaaaaacgtagctttagttgaggatttaaagtacaatttgctttcagttttacaaattgttgatgaaaattttgaggttcattttaagaaaactgaaagtaaagtatttgattcttgtggtgattctgtactgaatatttctcgctatggaagagtgtttaaagctgattttcgaaatcctgtttcacctgtgataacatgtttggtcgctaagtttgataaggatgtgatgttttggcatcgtagacttggacatgtttgttttgatcatctcactaggttaagtggtttggatcttatttgtggtttgcctaaacttaagaaagatcttgatttgatttgtacaccgtgtcgtcatgctaagatggttgcttcttcacatgctcctattgtttctgtgatgacggatgcaccaggacggctgttacatatggacattgttggtccagctagagtgcaatctgttggacgaaagtggtatgtgttggttattgttgacgatttttctcgatattcttgggtttttttcatggcaactaaggatgaggcttttcaacactttcgtggtttgtatcttcgattggatcttgaatttcctggttctttgaaaataattcgaagtgataatggtggtgaatttaaaaatgctttatttgaacaattttgcaacggaagaggtcttgaacatgaattttcttctcgtgttccgcaacaaatggtgttgttgaaagaaagaattctgttttggttgagatggctagaacgatgttggatgagtatcacactcctagaaaattttgggctgaggcggttaacactgcatgctatatttcaaatcgggttttcttgaggtcaaaacttggaaaagcttcttatgagctttcacatttgcgtgattttggttgcaaatgttttgtcttcaaatatggaaatttggataagtttgaggcacgctctactaatggaatgtttcttggttaccccgcacattcacgtggctatcgtgtacttgttttggaaactaaca

SEQ ID NO: 28238 - DNA, 6341 bp, Oryza sativa
attcaattgttaccaatatggtcgcgataatattttatttatttccaaactcacctaatctttattttaattagttattttgccaatttaattttagtgtttattcctaaataattattccttattcgcgatcggtaaactttgaaaccaaattccaataaaataggcaaataaaatcggcatgatgcaatttattaaaaagtttttgaaggcccatatttctagtgttacaatcgggtggtgtgaacttattcctttgttatggtctgtttgcattgattactctattccttgataccttgggttattataatttgactagttgagctttatatatttgttcagctagatgttagacataattacttagccatgcttagaaacattagcacacaattgggataactaatgtttcactattacttaatgatggatatttaatgatagctcacgatgatcaatcgtgattggttaattaattaatgtgccaactaaaacttgataatggtgtgttgtgagcacatggttttgatggtcgtgctcatgacaattaaggaccggttcacgagtttcggttgtgaaacattaaccgtgccaaccacaagccagaatgggcaacagctggacactttgtataacaaggctcattgcggagcaccagactgagaagtggcggagataagcccacgggggtcgctggggagtccatgcctctggtttttgagggggtgactacaatccaggaacggtgcactgctttgggttaagttatgcgaggggtcttgtcacaactacacaaatggtgacatgttcagcatgggcacatgatgatatggtgacatattgtggagatgtgtcttgtgggtacagtagtacacctctggccagagtaaaactattcgaatagccgtgcccgcggttatgggcgggtcgaacaatgtctttcgtgattagtcccacactactcattaataataatgtggtaattgatggtaattaatttagctcctagtttggaatggtacattcctggtttggagatagatctgtgcagccgggtatggttgttcaggatggttgggcctgtgcagcatgggtgtgctgttcagtgttgattaatattgatgattaattactctattgttttacaattctcaaatgtttgctaaatgctgcttttgcaaatgagccctgtattatgccattctttggtatccttgtgcacttgcatatttgctgtgtggcttgctgagtatgtcatatgctcaccttgcaataatcaatcaaacctcagttgaagacaagttgcgaaggagaagacgtttggcttatacccagttgagctacctatgggagtggagctggagcttcgctagattttattttccgctgcagttttcttcatggtgaggactaagtgcctcttaagtaagtatttatcgttttagttaatttgatgaatctgtatattaaattgtcagtttgtgtaccttagctgatttctggacgaggattttatgcacaaatgtcacatcctgatttttgtttcaggatttataaattatttaataaattattattagaatttatattaaatgttcattaatttacaagtgaagttaaatgtgggaaataaaatttcctaaatataaagcatggatggatttaattttgattaaattctccatgattaattacactctctgaaattttctcagatgtttcggagctcaattcttaacttttaatcatacaaagagcatttcagtaattacccacatattaaattaatcattaaatggtctgtttttaatattgttaaatactttgggtctccaagtatgttcaagatttttcttggaattatttgagcataggaattatttttaacaattcaaagatcatttcattgattaatttaattggaaaagtaataataatcctcttcctagtcttgggccctttccagcccatctccctcttttgtctgcacggccgtgcagcccaagtcggcccagccgagcttcccccttctctttctttctttgctttgttttcagccagcccaagacgaaaagtctaatttgcctccctccacactgtttatcttctacctctagcagccgaactgagaccgatttggctcggtttttctcctccaaatctgacctttccccttgtgtttttctaaaattagttgaggggaaatattcctcttatcctcctctatctttatccccaaaaatcggagctaatcgttgagtatcttatccgaatcgaactcgttttcgagtttatctccaaaaccgagtttttgatttcccggatcgatttcttgcgggaggagtccgatctcttcaatccaaggctataaataggaccccctagtcctcctctttcgtttgccccctctcccgtggtctcccgtgcctcgtagcgccgccgccacgtgctccaccccgccgtagtcgccggccgagctccatccgcgtcgcgccgccgcctccgccgtcgccgccggtctccgtcaccaccgttaggtgcgcgggagggtggagaagcccggccgctatctccccgaagccgccgaccaccgcagccccgtcgccgccgtcgaccgaagccgcgccgccgctagacctcgtcgccggccgtcgtcgttcgtcgtttggttcgagggtgggtaccgttgggttcgtctcgtcgtcctctacgtgttcttgtcctccaaagtcgcagccgaccatccaatctccggcgaggtcgccatcttggttcggccattgatgaggtgacgtcatcatcgtttttttctttttcctgtttttctaatagattaaatcttcggaaattcataactaaatcatcgtaactcggttttgagtggttcaagttgctaaattcatctaaaatcaggatctacatgtttgtttactttatatgtactgtttatttggtttttattagtcttattcttcgttttgcgtgttagtttgtcgtttccgtcgttgcgaaggttcgtgagtgcgccggaagtattcaagaagattaattgaagaccgattattgcaaggcaagtcacacagatcctaaacacaatcctttgagcatgttgatcctatatttaaattctctatttatttcaactgtgcatttattttcgaatgtcactgggtggtgtgaacctattcctttgttatggccaatttgcattgattactttattccttgataccttgggttattataacttgactagttgagctttatatattggttcagctagatattagatatgattgcttagccatgcttagaaacattagcacactattgggataacttatgactcattgtttaatgatggtttaatcgtagctcacgatggttaatcgtgttatgataattaattgataactaaaacttgacaatggtgggttgtgagcacatggttttgaaggtcgtgctcatgacaattaaggaccggttcacgagctactgttatgaaacattaaccgtaccaaccacaagccagcatgggcaacggctttaccttctgtatagcatgattcattgcggggcaccagactgagaagcggcgagaagtccgtgggggtcgctggggagtccatgcctctagttatatttatagagggggtgattatgatccaggaatggtgcactgtggtgagttgtgttgtgcaaagggtattgtcacagcctctattcgggtactttccagtatcgcgacgcatggtagacatgatgaggaggctgtgtcttgtgggtacagtggtacacctctggctagagtaaaactattcgaatagccgtgcccgcggttatgggcgggttgagcaatgtttttcgtgattagtctcacacctctcacaataattatggatgttatatctggtaataatttgcttagctcctggtttggagttagatctgtacagccgggtatggttgttcaggatggttgggcctgtgcagcatgggtgtgctgttcagtgttgattaaaatttctgattaattactccactgttttactcctcttaaatgttttgctaaatgctgcttttgcaaatgagcctatattatgccatcctttggtatccttgtgcacttgcatatttgctgtgtggcttgttgagtatgtcatatgctcattcttgcaataatcaatcaacctcagttgaagaaaaaggatccagaaggagaagacgtttggcttataccccagttgagctgcctgtgggagtggagccggagcttcgctagaccgtaattccgttgcagttttcttttcttttgaaagtatgtaacactattattgatgattctgtatattaaattgtcagtttgtgtacctcggctgattcctggacgaggattttatgcacaaataagttcggaaattactagtgaatttctgagcgtgacaacaaactagttcggaaattactagtaaatttctgggcgtgacactaactttgccctttcaaattatctctaatcttttgcagtggaggaggctcttcaaacctaacgatgagatcaagctagaagctatgacagaagaaataaaggtgatgacaggcctacggcatccgagattaggtgtgggttagttggttagcgttagctgttggtgtgttggctttagaggttgttgtcaagtgtttgttcagcttttggtctgctcctaagctccttgctgtggttaagcttactagtcttgttttgctcttgtatggttcgctggcatccccagctgttaaaagacaccgccgatgtggctttcaagtaaaagccaggtctctgaccttttctctaaaaattagcgagacgtagagccgccatgccgaagaagttgcgcacgatggttgtgccggtgtcggagccgatggaatccgcgctgatgagctccaacatcatggagccgaagccgatttccgttgggagttcgtcgtgacagaggcaagcatggataacagcatggagctgaagcccattcccactgcgtgctagccgttggtgaagagagaggggagagaaggcagaggaaggtgatatggcacttacatgtgggccggccccatatgttctttttaacttttttttccgatgactaagatgccacgtcatccaaaacaaatatccatactgccaagggacctcacttgaacggttttgtaaagttttattttttttttggggggaggtgaagatttatggtattgcagttttgggatgttaattaaactcgacataaagatgagggacggcaagtggacttattcattttcaaaaatagacaagcttctgggcttcgccgcaatataaattattttctgggctctcaagtttgaacattgagcgtccgatccaccccttcattatcattgcatttagggatggcaggcacgacgggcacgggtagtgactacccatgctcgtgcccgcgggcatgcccgttactacatgacgtggaaggaacattgtctatgcccatcgcccgcgggcgccatgtgctcgcgggcatatccgtttacccatcacaggcttacagttcaatccttcaaccacaaatctctacagcagagagatattatcacagtttaaagatagggtacagttgtaccaagttctacaatacaagcattacaagtttatcaatcctagacggtggcatttatactaatttgactgagagcccacatgtcagttggtttttgcgggtaaacgggcgaagcgggcatgggtcactacccatgctcgtgcccgtatgtcacaccctgaagttctcctcccaggcctaaaatttaatttataaacgaccccccaagaaaatgcaggtgcaaatcaagagaaaaccctaagaaagtaatgcaaataataatcggatttgacatgtggaatttttcttgagttctacatgtcgaaattcattaacaggatttttagtggaattttcagagctctagaaataattttaaccaattaaaattgagcaagcaatattttaattccagggaaaatcctttttccttcttctttttctttttcctccctttttttttcctccttttttcgaatgggccgccggcccattctctccttcctccccctcctccctgctgggccggccgcaggccgaggcccagccaggccgggcggcttccttcttttcccggggtcggcgacaggtgggggccacctatcgggccctttcccaaacttcgggcactcgcccacgttggccattccgccgcgaaaacggcggaacccggcttcttcggttcacgttgggcacgcccgtgcgtgggccgtgcct

SEQ ID NO: 28239 - DNA, 684 bp, Oryza sativa
tatcacaatcaatccatcctcgttttgtttatttttgaaaacccacttgtttccaataatattatgtctagaaggtggttcaactaaggtccaaactttgtttccctcaaaattttcaagttttttcatgcatggcattaatccacgatacatcagttaatgcatgagtaacatctttgggttcaaaagaagcaacaaatgcagaatttgcacaaacatcatgagtcattaccttagaccttgtagtccactcacctatattaccaatgatttgttttggcggatgtcgtcattgaatatgcaaaggagcagcgacttatgatgttatatcacgttttgtaccagtactggtcgaagttgtaccctctagaggaccatctcgatcagcatcaacagaaccggaagccaacgatcctggccagtctgaccgctcatcctgagtcggtctgaccgggggtgtactggtcgaagttgtaccctctggaggaccatctcgatcagtgtcaacagaaccggaagccgacgatcctggccggtctgaccgctcatcctgagtcggtatgaccggaggtgtgtgttgactgtcattatcaatcaatttcgaccgtcaataatacccaaaatagaggagaactagtgatgcttgcaatgcatataaattgttacaataataatattccacta

SEQ ID NO: 28240 - DNA, 4991 bp, Oryza sativa
ttatgagacgttgctgtacaagattaccagcattttcttcccaatgaacaatacagaatgttgtttcttattaatggttctatccagcaatccagtcttctataggttgtcctgtttttgagcagtattcaggagggcagatccctcccttgaatttggaagtgactagtatattcaatgcgtgcgcatatgcaatgctctttgcaggcacacaacattattttagcttcattgaattctgacatttgctgttttggcaaatagttatgaacctctcaacaccagtctgtgttttgtaggtaccctactttgaatatgctcacttgcttgtaatttgcagtataattgattaaagttcctcctgaagtaacttccatcaatctattcgcgcagttaatatgtgtacgcatgatcaagtttcagtattgctatttgtatcacagttattctttatgggttggttttatttactttgcttcacttacaagactgctcagagattataagcaaagctgtgtctttgtaatatgtgggggtagaccattccttctttaggaaattcctgatgctgattccctgtactggaatctgatagtagaaattttttaagaaatttttttatgctgattccctgtactgtaatctgatagtagaaattttagcactgagccactgactggcgttttaataatcgcagagctcacactgaagtctgccctcatgctctggtcttaatttgtcatattactgatgaaagtcttaggaaatggtatgagcaacaaatgaaccacatagttcttttctattgttgtatggcttgataggtataagtaaagtacctttgttgttgcttgattccttgcaatacatcaactgtaaactatgtgttgaaccaaagttgcaaagttttgctgctattcttgctacttaatcttcgtttctgtgtctgttcagaaggaagcccatgacttgaactgaaaaggtaacgttacaaaagaattagtacaaggccgaaagcaacaggaagggtctccaactgaagagaatagaaaaaaaaaatccagaggagaccatggcagataacagagaggttcaaagcctttgcattgctctatctcaaagaccccgaaccatcctcagttccatttaaaacgtgcttaatagaaaggtaatgtttcagtaaaaaataaaaactaacgttaaagcttgggttacagtacgattacgtcttgatgcaaacttgcaaagtgagagtctgcttccttgataaaaacaaattcctgaagacttggtggtttgttgtttttctacaatattgctttgagttcttgctaaactatagctgtgtaatgtaatgatgtagctaagtttcagattctgtggttcattagtatgcagagatataagcgtgatatttaccaattttctagctctcataatgggttccatgttcaagtttactagtgtttcagtaaagcctaagtggaatcttgataatctctgaatagagaattttgatttttttaaaaaaggatttaaaattctgctaagtacttaagtaccatgccgaactggtacatgctatttgtattttacttatgatctttgtcaatttctaagattctaatcatggatacgacttgtctaggccacgtgtgattcataatggtgactggtgggcgtcttctatggctgcagcactcttggaattcaacttggtaattggtgtgaatcatcaaatatattgttacatggttccgaagttctaggacggtgttgcataattgcagcatattgttattatattaatcattctaagatgatgttttcgcttcaatataccatgtaaggtattcaattttgtgacatagccgtgaaagtttctacctatccatcatttctcaatgaaacgtatgtaatgtatattttgaactcatcatatgggattctgaaatctgaaataagaacgtaactgtgttggctcgaggattcactgaattaacagagttaggctccacaagcttttaacttcaacttgtccatgctttaaactgctttgcacccactgaacttttcaagtgtagcacattttacatataacttattgagcaaagaatgaatgtaattcttggtaataacaaatatcagtttccatttcattgtctgcctagtgctgcctgtatatatctgtgatgaaatatttttacagcgaggagaaatgtggaaatatgtctttccccttcctgcagcattgcaaccatggagtgaaaagagcgctggctggttgaatggtggtgaggaagcatccggcattatttcatcctaagagcaatgtagtaaacatgggtcatccaagacatggggctagcctccacatctgttgccactgtacactttacaattagagcttctttatggtttcttccactgcgcgttcataatacctcattctctgtgtagctttcactgcacggtcgaaatccctcctttcaaatgcttcctggaaggaatgggaccaggtttccagctttctcttaatctgataaaggtgatatagtgcgagcctagaaatcagtcaagcgtatttatgcttcgaaataacaaccatgacataattgtgcttaacagaacctgagattgtatcttctccagggtttgagaatcattggcatcattaactgcttcacgtatctccatcatctgcaaattatgtagaaatatagctttgtttcttcaaattgatcttgaattgaaatatacatgtcatcgcaattactattacttctgtgtgaagttattgacacaagcgtcatggaaatatataaactagtgattaagtggctgcatcagaaccacagaaaaaaagattcaaacaggttacctccataagaagttcaggatcagtgatagtcttttcttcatcaatgggtatcccctctagttggagctgcagaatggttttatatggttgagaagcaatttaaaagatgatgtagatggatgcttacatagatgttccatgtaaaaaaggtcatatgtttacaggtcaagtatattttttatattattttgagtggagatggagatggtttagcctcatataatcataacctaatatgggttaaaatgagatgaaataggctgtattttttaagtattactggaagaacttaccaagtataatgcccttgacaaaggtttgctcagtgtgcggtatgcatcaattacaagtgctgattgctcagcagcaaaggctctctctttctacacaaaacagaagccaagtcacaaattgttttgaagacaaaggtacgaatactatagattggtaagaatgccagggcctagggagagacctcagatttagaatgaactaggtcaggatgtaacttcttctgccagtctttgtatttcccttctaaattgttatcctttatggtgtattccctttctctgccaaagtaatgaagtaaattattgatgtatgattaaggcatagaaaatattgacagaaacttatgcaattgtagaaaattttgaaaatattattttaagagtaaaattcataacgtgattaccatgatggtaccactgtatttatcatgaagcagatcattggaacaaattgtgaatttgccatatcattacaggagaggtcaaacacttagggtggacaaaatatacagtgtggatacaagactatccaactgaaacgctcacgagttttctgaaggggagatttggaaatttaataaattataagcattaagcaaataggtagaaaatcacgaaaccatcaccaaacaaactacttgcgttattacctaaacagccaacatggaaatgaatagaagggaacttatcacttatcagcataataaactatgcagacatattcccccaggtaggattggtggatagagcaagttggaatatgaacttcgaactatatccagctaatcccaattccacctcccaataattcttttttttaatattacagatcagtgcatcaacaatcaaacattatactaacataattgcattgccctagaaatttccctaaaatgacaacatgttttggccaacctaagagtcgcatcaaaatgcacatatcttgtaacaatcattgcaaattaccagtcctattatcgcaatcacatcaaaattgccagtaggataattttcgtcctaaccataaaagctaaagctggtgtccagtttccctttctgcataacccatcaagctacgaacacttatttgcgctgcagatgatacaaagaaggcccaagaacatagaaaccgtccttgtacaagtagcatttcagcattgcaatacataatgcctacgagctgagcagttatgacgatcactgcacaatccaattatacccaaaatacactagaattcgaaagagacgacacgattcattcacaaacaaaagacaataatgagccaattagcatctgattaagtggggatgctactcacaggccaaagatccggaaataatcgacggcggggtcgacgggctgcacgctgccgcaggacccgcatgagaggaacgcgccgctcgcgccgcagctccagcactcgcctccccctgcccggtccgagaggctccgggaggaggaggaggagccccgagcgaaggctgcgagatcgcgggtggtggtggtagaggcggaggaggaggaggaggaggagggcacggtggggacagggggaagcgggttcctcctcctggcgccgcggccagcggctccggccgccgccgcgaggtggaggcggagctgcccgggtcggcgccacatgtggggctttctgcggcgggggcgcctctgtgcggatgcgggtaagtccggcgagcggcggcggcggcggcggcgcggagagaagggggggatatgcggttgagttgagagccaagtattttgtgtgggtttcggtggttgacaggtggggcccctggtagctttctcccgtgaa

SEQ ID NO: 28241 - DNA, 1713 bp, Oryza sativa
  unsure (1)..(1713): unsure at all n locations
tgccactgtaaatgtggcaaattagaaaaataccactactatttgttttattggctaggtgccactacaaatttttaaaattgaaaccatgccactccgtcactatttctgtcgttctctctcacgtcgtcatcctctaatctcacgtaggcacggcgagggcaagaagacgaggcggccgccggcgaggacgtcgcgagcgcggggagcggctgcggccacggccggcgaggatggagacggacgccgagtggttgaacagcagcttgccgacgtcgcggacggcagagccaacaggtcgaggaggcggagtggcggagttgccggccggcgtcatggccgccatgccgccgtgctaaccgtgcagaggctgcatccacgccaccatgccgccatgacacgcaccgcgtgcttgacgcatacgaacatggacctggcattgacagccatgacgcggtcgtactcgtcgatgtcgagcacgccgagcgagtccggagcctgtgctcctatgatccggcgttgctgtaaaggacgtcgaggcggccgtggcgcgtaatggcgaggtcaacggtcgcggcaacatccgccttgacagtgacatcgctgtgcgtgtacaacgcgcgtcagcgccgagcttggcagcgacggcacggcgttcgcccgctgctgctctcgctccccatgccatcgccaccgccggagtgccgccgcggggttccgttgctgctgctcctgctcccgctcccggagcgcgccggagtgccgcccgcgacccgccgcgtcgccccgaatcgtcaactgccgcgccgtcgttgggggcgggctgcgccgcgacggccttgtgctgctgctgttgtgtgtaccgtcgctaccgtaagtggtggtcgccggggaaccgagncggcgagccaccagactagctcgtcgncggggctctccctgaccaagccactatgcacgcagtccatggagaacgagagctgctcgtggaggacatggagatgcacggcgaggataagctcctcttcctcaacggcgtccgacgagaaaggtggtaatgcatagcggccaaccgcgcgaggaacgaggcccgcagctgcggcaaccggcattgtgaaaatcaacgatgggaacggcgccgaaggtgaagaagatgaagtccgatctccccgttccccgtgtctccggctgaggttcttgaggcttcttgaagaggacgtcgaggcgacgacggtggcgccatggcttgctccggcgtgctccggtttgacggcgacaaagacgatgtcccggtgatggcgtctagtcccggcagcccccacggcggcacggaccatagagttaggaaattaacgggggaacgacggaaaaggcgacgggatggcatggattcaatttcccaaaattccagcggcacctagccaatatcgtaaatagtagtggtatttttctaatttgatacatttccaatagcatggatccaattaaccctagtttttatcataggtcatttatataacaagttttgtggaagattcaaaatatcatttttttggcaatttatgtcccaaatatactaccaagcataaaaaaaataaaataccaattctatttctgccgtgaattattatggaagtaaagagaaaccgttcaaatgataaggaaggcaaaccttgcagagaagggaattatcaatcggaacacatcgctgcg

SEQ ID NO: 28242 - DNA, 1505 bp, Oryza sativa
  unsure (1)..(1505): unsure at all n locations
tggggcggngnnaatggaacatcaatactccaactatacacgtgacactattcaaacttgcgcttgcatgcctgcacgttaactgtacaggatccccaccttggataatgcatcggtcaatctcactggataatactagatttgaaggagcatgacttctcaaaggcaatgttggaggtttctccttgtttattattccagaactcatatcattattctctgggattggtgattgctttctctcagttttatcatttccttggttgagtgacaactttgtacttcccctacagttatccatctccaaccaatcctacaataaagaaaatgtcagtatgttgataaaatattatgtaccctaggaggaaaaaggtgccatccaaacattaccttgggcatcaatttagctgatttgtcagatgtagcatcaacagtattgctgtcttttgcggcggaggtaaatttagcagcgcagttggagttattaggtaaagactccttaactcgtgacgaagatggtttcaaaagactgccctgtgctgatacttcagttttctgagaaataggatcctcaacatctaagatgtccacatgcttttgccttgttgctaatgtgccttccttctgtgaaggaattatcgtatcaagctgcttcaatatctttgcagccatttgaattgactgtgctggtgcctgaccaaaactgctatcatttgctctgtcatgtacaccacttcgagtaatatcaccaactttatccagacacctacgtttttgactttgtactgagtgttccaaaccttcatcaagtttgctagcatgactaccactatatccacggtggcctgaccgagtttgcaacagtggtgacactctgttgtacctctgatgcattttgcgtatgggaccaacagaggcactctcgttattgagagcagcactcttcctcttcagaacctgttgattcattattaacagtaaatgttacatacaaggtagcatcaaatctaagcaggtaggacagcagcaaagaacattaagtggactgtagcccacaagtaaattatgtaaccatgaaaatttgcacaggtatccaattcaaaataattattaggcatttaaacaatgttatgcactattggtcatttaacataaaatatatattgtccaaatactgtgtcactaactgctagcaatatataaactgtaaatcacatcctggaaattagtgtttgctatatttatgcattcggtaactacaatagtagggtaaaaccttaaggtagtgcaaacagtgtaaatgcagggcctgaagaagtttaaggtaaacagtgcaaacagtggtggatgcagggcctgaagacacttgtagggacaccaggcctcaccatcacacagcaaaatggagggcatgtcataccactagcgcttgatgacgccagatgctagctgaagttgtttttgcccaagtctagaaaacttctaggtacaccactaattgccaa

SEQ ID NO: 28243 - DNA, 2235 bp, Oryza sativa
acattagcaacaaggcaaaagcatgtggacatcttagatgttgaggatcctatttctcagaaaactgaagtatcagcacagggcagtcttttgaaaccatcttcgtcacgagttaaggagtctttacctaataactccaactgcgctgctaaatttacctccgccgcaaaagacagcaatactgttgatgctacatctgacaaatcagctaaattgatgcccaaggtaatgtttggatggcacctttttcctcctagggtacataatattttatcaacatactgacattttctttattgtaggattggttggagatggataactgtaggggaagtacaaagttgtcactcaaccaaggaaatgataaaactgagagaaagcaatcaccaatcccagagaataatgatatgagttctggaataataaacaaggagaaacctccaacattgcctttgagaagtcatgctccttcaaatctagtattatccagtgaaattgaccgaaacaaaatcctagcatcatcaaatggcttttcattcccggttccggctgctctgactggccattctcaggcccctccaacacctactttggcatctccacctgtactatctgttgagaagcagcagctgtctgcatcatctagtgcaccagttacttcagtggaaagtattccaaggttagtttctgatcggttgtttgaactgatgtagttacagtcaaaagcatagttttaaatttgaagtacctttgcaatgaaaatgggcaatggttaccaagtaggttaacacataagtacttatgttatcattttatagtgttttttgacttgattgtcgttttatagttgagatatggtagtctgacacatgccaattatgcttcagtttccaatttatgaggatactcacttatttccagcacattaatctgacatgtctttttctccagggttttcaaaccagtttcagaagaagcctcagtttctaaccaacgtgatacaaagtcgaatacagataaaccaccaatttctcaaagctctgggcaaattgtttctttcactagtaatccagtatttaacgtcatctcctcaaaaccaacaaccttaagcaatggcctggcagatacaacaaaatctgcttctgctgctgtatttccttccaatggatcaaccaagtcagtttgttctacaaatgctggctcttcaacaccttcgttcccaaagttctcatttcagcctggattccgaacatcaacctcttcagtgcaatctagcggtattcaagagcctgctataacagctccattcagcactgtgagtagtttagctgggggcagttcatcgccatcctcaatgatatttgctggtgctacttctcaatctagttccatcaccaccagtggcagtgttcccttccaattctcttctcaatctagcagtgaaagttcattagctggccaagacaaatccaaggcagcaagcagcagtgccccttttagtttctctccacagtttggcagtacaagtccgtttgcaggccagggcaaatccaattcagtctcctctcagtctactttgctgtctggaagccaatttagcaattcactatctgcacagacttcaacaagcaattcaaacctattatcttcagaaaaagtaaatcctgggagctcgccaagctttgcatttggttcatcagcaccaggctcaagccctgtgttttcgttagcagttggttctggcactacttctgcaacacctgcttcagcatcttcaccaattttttgcaaccgtttaactagcacaaatgctccaccttttggctcccctgccacttcaccttttagctcaacctcgagccctgtattctcatttacctcagctacgcctacgataccaaatgcatcacctacaacaccactttttggtacaccgagcccgactgttggtttaagtacaggaactgatcagatgaatggaggtcagatggctggggacaagaacccgtttgctttttcagcagcttcaccctttggtcttccaagcagttcaccatccactccaactctgtttagtacgccagcaactcagtttgcttcagctacatccgcttcaccgggcatgttccaatttggccagcatagtcaatcatccccaggtggcttctcaataggcactactggtggcaacagtgaaaagtctgcaagaagaattctaaaagttaagcgaaagaa

SEQ ID NO: 28244 - DNA, 1911 bp, Oryza sativa
ctctccctctaacccctctccttttgttcgttaggaggttccgaagctcgtctcacggtcgccatcgccctccgtcgctcgccgtcgtcgatcgtcgtcggtagggcttctcctcccctttctccctctctcccgcgccggttagccaccgcgccaccgcttagctgcttagccgccgctatcgccgccggtcgccacctcgcgtcgccgctgcgtgcgcgccgcgctgccgcgcgccatggccgccgggccggcttgagccgtgcccgcgcgcgccggccgcgagccgcatccgccgtccgatctaccgggcagtagatcgaggccgtcggttcggctgccgcatggctgccgcgtggccgccgcgtgtgcgccgcgtcggcgccacgtgtgcaccactctctctcttgtggggcccgcatgttggcgccgctctctctctccccaggattttaattattgcgcaataaatcaattaaggatttttctgtttatagtaaaaacacagtgaatattccaaaattcatatctaattcatccgagctccgtttaagcccattcaagtctcagtaaatcaataaaaatgcatagattccattaaaaatggttttgttctctgtttcagtagtcttatagcctgtttgtattgtttgctttgtatgtcgcttagattccggctctcccaacgctccggtgtactttgaaatagtcgccgaggttcctccagcagcagagcaaggcaagtcatgcttgtcacttgaacatgttgatcctatattgcaaatgttttactgtttttgttcaaatattgcattgttttacaataatactatgggatgtttacctactgttatagccatgctatttttgtaccatgctcctttgttagcttgggatatgacatgactagatattggactagggattgcttagccatgcttagttcaactagcacacaatgggggaaatcatataatatatagacttcaggttctagtgttgatgttggattagtaccaccgtcctggtgttgctaattaaaatgaatcctatggtgggctgtgggtgcatggttttgctagtcgcgcccatggcacttaaggactggttcgtgggaaaccctggaagaattcctcgtacttaccacaagccagcgtgggcaatggctaggcttgtagtgtagctttcctctagctgacacatccaggcaagggtgggcgtgatggagcggggcgggccctgcgacggcctctgtcgcttttggattcacctaggcacgagaggggactgcccgttgcccgctggggacgggggtgaaacttgaggtgtggtgtgcttggctagagggggttatgcgaagggtcctgtcacggcctctttccggtatgtcgtggtggcatgtcggcacatggaaacatgtcgtggggctgtgtcttgtgggtacagttgtacacctttgattagagtaaaactattcgaatagccgtgcccgcggttatgggcggtcaaccagattcaccgtgattagattcaccctagactagtctaatggaattgaatagtataggtggatggttgggcctgttgcaacgtggtatagcattggacagtggatgattaatattgattaattattacaacggttttactactttcaactactatttataaatgctcgctttatgcaaaggaaccattatagctatcccttgataattccctgcatcatacccctattccggtatgacttgctgagtacagggggtagtactcagtcttgctatattttccccaaaccccagaagtttgagtatgcgtaagatgggggcttctccgaggaagaggcttctgtcctgcccgtcgagatacttgtggagtggtgttcccgctgcgtgcaagtcaagtttatct

SEQ ID NO: 28245 - DNA, 814 bp, Oryza sativa
gccaagtctggtttccaggcgtgctcctttctcgctttgttggaggtccgctcttgtgtgccacgcgtagtttggaaatcaaacttccagggaccagaagcccaaccgcccggtgtccgtccccgtggttccttgttgcccaacgctttcgtgaggaggtcgtcctcacgtctttgagagcaggcctcttgcgaggcttgttgctcggcaaccaactccatctgcattacaatttagtggggttaaataaactgcacgatgggaaacaatgcgaacatctagtttgactagacacttactatagcttcgtacactcgttgatcttctgcatttggcatgaagattgtgccatcatcattcttctggtacctggccctggcccagttcctagcccgagggtgtgggatatcgccaaacacgagcggtgtgcatgattcctccgcttcttcatcctcacgttgccattcctcttccttactggcatatccggcggtgcccagccggtgcggatgctggttcctggtctggagcaagagatatgcctcgcttctagctctggactcgggggtcgacttcttcgcatgtaattcctcccagacctgttccgtgatccaaggaaatttctctcttggatctagattcgccgggttgtagacgaactcgccgactagcttagtcttgaagttcttccaagcattgcccataaccttgaaagcagcccgcctgagacggtcctcatgctccacaggataatcaaagctctccttgaacattagccaagcaatgtccttctctgcggccggcatgagcttga

SEQ ID NO: 28246 - DNA, 1812 bp, Oryza sativa
atccatatagatctcctcctccaactctccattgaggaaagttgtcttaacatccatctgatggatgactagaccatgagaggctgccagagtgagtagtactcgaatcatagtcaagcgagcaaccgatgaataagtgtcgaaaaagtcctcgccttctttttgggtataacccttggccacaagtcttgccttgtactttttaattgtaccatcaggcctaagttttttcttgaaaacccatttgcatcctacatgcttgcacccatatggacgctcgatgacttcccaagtaccattagacataattgagtccatctccctgcgtaccacttccttccaattgtcacttaatcagcgtcaagagaagaatatgcctcttcaatggttcttggagtatcatccacaagatatgcaatgtagtcatctccaaaagactttgcagtcctttctctcttattctttcgagtggctacaatgttatcctcctcaggattttcctcaagcgtttgatcaatgtgttctatcggcacaaagtgttcaggggataaaataggttcttggctagaagtgctaggtgcatttttcataggaaattcattctcaaaaaatgtggcatctatggactcagtaattgtaccaacacgcatgtcgggtactccagaattttctattaagaacctatatcacacactgtggatagcataaccaaggaacacacaatctacggttttttgttcaagtttacgctttttgactatatgtacatttaccttgggcaaacaaccccatgtgcgcaggtgagagagatttaatttcttcctttcccattcctcgtatggtgttacttcctgatgtttagtaggaattctattaagttacttcattatgtatgtaggctgggtgtgcttggtgctcttcttttaagtagcaagcttctttatgttgtctcagagcatctccaacaacctctccaagtgactctctaagctaaattttagctattctagccaaaagacgtctttcaacatcctctccaactggatggctaagccatccggctagccaaaactctcaccctccctccactagtcaaattaggaagctaaaaatcactagccaaccatgggcctcatacacattccacctccatctccttcggctcttctccaggacggcgcaggcggccacgacctcgacgccgccgccgtgcaccgctgcaaccaccagcttccggcaccgctcgatggctgtgagcgctacctgcatctccaggatggcgcagcggagcccaccagccgcaggcgcggggtcgccgccgcccggtgaggaggggccatggcggggttcccggggcagtgcgggccggcaggggagagcacgacggcatgcgcggctaggatgcggtcgaggagcgccatggcgcgtgggatctccgcgaaggcgtccgggctgagggcgttgagctgggcggagcggttgaggcggaccttgtaaaccaccgtggacgggtcgggcggcgtcacggcgagcgtcttgaacccacgccggagctccgcctcgagcaaggcgccgatgccgccgaggcgccctcctagtgtggcgagggagggaggaagcggcggcggggcggctcgacgagaaagaggattggagagaggggaaggaagaagaaagggggatgagaatgactggtggggtccattggttaatagagagtataatgcggagagtctgttggaatagaatgcaaatttgactctctaaacttttgttaggttggccaaataggtatttggagagctaaaaatg

SEQ ID NO: 28247 - DNA, 1614 bp, Oryza sativa
catatgagagtaaagttaccctgtttctcaaaaaaaaaaaaaaaaagaaagagcaaagtaccctttaaagtacggataatttttcggacgtcggatggagatccatcgtctcacagccctccccttcctctctaccctctaccgagtcgagcgtcgcgtccgccgccgccggcgccgccgccccccgcctcttctcccacccgcgcgccaccgctctccgccggcgagccgtaacactaacccgctcctccccccgcccacaccactccattttcttcctcatctccggtctgcaaaacggtagttaaacaacggggatatgttcgccgcgaaatcaaaccggggaagaatgtacatggcgacgaggagcgccgccgccaggctgctctcctcctcctccgccgccgccgccgcctctcccctttggtccagacgccggcgccgccatccattcctccatccgccctcccgctccaagaccacctcctcctcctccagcagcagcaagcctcctcgccgcccaccgcctcgcaaggacggcggcgggccgcgcccgtgcctcttccaagaactctccggtctcgtcgccccatccgccagcgatgaccccgcgtttcagcctcggcgagatgggcaggagcggtgtggcctcctcggccatgacactgcgcagtgcgcggaaggtgctcgacgaattacccctgagggagcggctgcggcttctggttctttcaccggtagcgttccgaacaatgacgctcttgggttccttcctgatggtgggattgggcctcgtagcactgcaacaggcggtgctccggacagtgagcaatctatccaggaggtgggcgatggaaatgctggagatgttgagaatatcagtgaggttgtgcatagggtaacagaagttttgcgggcagaggtgcctggattgtctgtggaacagaggctggagaacctgggagttacatatacaccgaggcttgtgagcttggtgctcaacaggtgcttcaagaagaggcatttggggttcaaattctttgactgggttaggcaagttcctggattccagcacaccacggagacgtacaacgcaatgctgtacattgcgggtgaggagaggaactttggggccatggagaagttgatggatgagatggataaggagatgtgtttgaaggacatcaagacatggacaatcgtcatatccagttatgggaaggcaaggcagattggcaagatgctatctacctttcaggctatggggaaatcgagacatgtggcagcagatagtaaagtttataggacgatacttcatgctttatgcaattctgcaaagtccgagcttgctcttgagttctacaaagatatggcaaggaacacggaggttggatctgacatttttcgacttctattgtgttgtctcgcaggatcagataatgctgaaggtgttttttatgtcagagatgatatgattaagagcatgaagtatccagaggagtattgttatctggaagctctacggagcttctgtgtttcaggaaaaatagaagaggctcagaaaatcttccagcagatgatgaacaagtccattgctagctcatctgcatttga

SEQ ID NO: 28248 - DNA, 1917 bp, Oryza sativa
aaagtactggagggctatagtgattcaaactggatatctgatgctgatgagataaaggccacaagtgggtatgtgttcacacttggagggggcgctgtttcctggaagacttgcaagcagaccatcttaatgagacaatggaatcagaactcacaactttagatattgccacagttgaggccgaatggcttcgtgagctcctgatggacttgccggtggttaaaaatttcagtaccagtaatcctgatgaactgtgataattaaacagtgattattaaagtgaacagttcgaaggacaatatgaagtcatccaggcatgttaaaagaagactgaagtatgttagaaagaggaaaaactccggagtgatagcatttgactataccctgacggctaaaaatctggcagatcagtttatcaaggggctaccacataatgtgatagactgtgcatcgagggagataggcttgagacccacttagagatgcacaatggtggtaacctgtccattatgatcggagatcccgtgaatttggatggcaaaacaaactattgggtaactgagagaagagaccctcaaaatgagtttatcttcatgatgtacttctcttctattctgtatggtacgatggtatacaccttaatgtgatccgagtggcttttcataaagcagagatgtcatcctacagaatatcttagaaggaacacacctatatgagtccaattgctagttatagtctatgagatctgggtaatctctagatactcatgaaaagtccaggagtatgacttatatgatccaaacagaggggatgcaaacggcagcccagtaccagttaagggtttgagtgaaacctgaatcgcacaagactgacaattcaatgcatagtccattgttcagttgtgatatggtgtagctcttttcctaggtggaagttcaacttaacagtctccatcaaaacactggtataactaacaggttcagttttgagaacatttgttgtgagccatgaaatttggtggggattgttggaataaataggctaggcccaatttaattcaactaaaatctcaagagcccacaagtaatgttagagacaataatactgccttgaaaatttaggtagaagaacctcaacttaaatagggtgatattggagattccctattgaccggttgaggtgatggttggactgctacacacgcgcgcgtgcgccgagttggcctcggcaatgggcgtggcgaggcggggcggccgactgagccgagcctgcctgctgctcttccgttttgtaatagacgagaataaagtcaccattaacaaatgaaattcattgtgttgtaacctccacaacgaatgagacattcattgtgttgtaacatccacaacaaatgagagatttatttgttgtaatctccacaacaaataatagattcaatgtgtggtaaccttcacaacaaatgagagatttatttgtgtggtaatggagatctctctatatataacgcaaggcagaggctctcaaagatcgaatcttcctcctgctgctgttcctacgtgatactctccttcagttcctgcgctatctctctgtttccccggttctgttcatcccgcgcacacgggtgatcggaacgagtaggtgcctccgaaactccgtccgcttgagaacctgcatgggtagacaggcgaagtttttggggagcgctacacgcgactgcttttgttcgtcttcctctgcatcgtctgcgccaacatgtcgaacaccggcgacaacagtaacattggagacaaggagaaggaggctcccgtcaacaccaacggaggcaatactgcttcaaactccaacggaggaccgttctcggggatataacgatttactattaccattcgttcttcatttcctactactatcagt

SEQ ID NO: 28249 - DNA, 1666 bp, Oryza sativa
actaccaatacgggactaaagatcgctatctttagtcccaggtgaaataaccgggactaaagatcgatctttagatcgagctgaccttttttttttgcatggccctgttgctgcatggtttatatatatataaaccatgcatatatatgtttcaatacatatatacatgattaatatatatgtatttatatatatatatgttatgcaaatgcatatgtgtgtatatatacatacacaacacacacacacacacacacacatatatatatatatatatatatatatatatatatatatatatatatatatatatatatatatatatatatatatatatatatatataaacaaaattttttttatctttaaagaaaatgtgctcacatgcattttgaaaaattaacttgatctatatacatatcattatgttgttctatatagatactattacgacgatatatttatatctatctaagaagctaaagacctatgtattgtttttccgccgtagtagaattcacccttggcatcaaggatttgttcgttgatgaatcccatgagttgttcttgaaccaccgtgataaattccttgtgtgtgatcaggttatccctcatacgaataaactatatgaatgtgtgaaattaattagtaattaaacaacaaatcgatacgtaatgaaattttgaatttatttgcacgtacatcgagctctcttgtggtgatgatttggtctgcaaggcagtggcaatactcgcacacgtagtagccgcacaagttagttccctacttttgctttgcgcactataaataaatgacaaatggcgagagatctaattaatatacacttgtatgtatttgaattggagattcaatataaatgtagagcatgtgtactcacaggaaaattgaacttccgcataagtctttctctcatttttccgcggaccaaatgatggaaccgataccaagccctacatggagtttaaagctatgattcgtagtagcaattaattataacaagattcttaattaacataggaatttatgacagtacctgtttataagttcgaaaaccttgtcaaacgtagactcttttttatccattgagtcatatacgttgacggtgcaggcctccaggtcgaagagtaaaagcacccagtggaatctgcaatgtgcgtgggatgcattatatatgaaacacttagcatgtttgtacgggaatgaaatttggtataggaagacagtaaaattaaactaactctgtgttgtacggcaacagtatgaacgtcttgtaatgctgcgccttcaggagatggacgagattgtcctctgtgtcttgcagataccggtcgagcactgtgacgtttactttccgagggtcgatgaatccagtatcgaaaaccccccaccgtcgggccctttgaatctccattctacaacgataaaaggaagtatatattatatatagtctacttatatacaaggacctaattatttaaaggaaacgtaataagaaatctaactgaacgatacttacaaaatgcagcaactcataatagaaacgtcgagggcgtccagctggtatagttcgtagatacccttgaaattgatccagagaatgtcatctccttgcaagaagtccgtgtccctgatcctcgctctgat

SEQ ID NO: 28250 - DNA, 775 bp, Oryza sativa
  unsure (1)..(775): unsure at all n locations
tgtaaataaatatatatatatataaaatatagatatatagatatatatatatatatatatatatatatatatatatatatatatatatatatatatatatatatatatatatatatatatatatatatatatatatatatatatatatatatatatatatatatatatatatatatatatatatatatatatatatatatatatataaccaaaatatatatttacattaaagaaaatgtgtacacatgcatatagaaaaatagacatgtactaattacaatccattatgatgtcctagctagctactatttcgacgtagtagtagtcgctatctcagaagctaaggacctatgaattgtatttccgtcgtagtagaattcacccttggcatcaaggatttgttcgttgatgaatcccatgagttgttcttgaaccaccgtgataaattccttgtgtgtgatcaggttatccctcatacgaataaactatatgaatgtgtgaaattaattagtaattaaacaacaaatcgatacgtaatgaaattttgaatttatttgcacgtacatcgagctctcttgtggtgatgatttggtctgcaaggcagtggcaatactcgcacacgtagtagccgcacaagttagttccctacttttgctttgcgcactataaataaatgacaaatggcgagagatctaattaatatacacttgtatgtattggaattggggtaccaagcgcgntgtcgcactgtgatcaagcaggtcacaagcgcggg

SEQ ID NO: 28251 - DNA, 1062 bp, Oryza sativa
ctggaccacgatcagtggagatagcactgctgccatcgagaggtatcctagttagagaagaatgagtgcaccaggttagctcacgtagaggaggggaatggcaagggacaggctgcgggttaagaaatcaacaggggcggtatctttagcgatcacagctaggttgcactgttgaatgaagaataaatgtcaaagcaagagaaagaaggaataccttataaggtcctcatgcagccagtgttacaacagttcactgctctaaattggataaagtgttcctctgattactgatctgggcattccgcatagtgcaataaataatgtttcttgttcaaatgctcgtaccacatacaactcttgttccaataaataagttgaacatggagcactactcatgataaattttcaacagagaatgtgaattaagcagatgaattgacaataaacgaatctgagaaggtccttcgattccgcaattgccattttgactggagaacagaatcagctagcttgtacttgccctccatattcagaccatggacaacagttctgaagttcactgcactggggatgataccactattcagcatgtcatgaataagctgcaacccatcctctgatctacctgccttacaaaggcatgacatgaacattgagtaggtctcaaagtctggcacaggtcccttcagtttcatgcgttggaagacatcccaagcctctgaaaccatacccattgccatgtgaccacggatcaatgcagagtaagtgacaacagtaggctcacatccattttctgtcatctccttaagtacatccatcgctttggaaacatcccttttccccaagtaatagatcatgaatgaggtatacatatgtgtgctttgagctatacctaaattcttcatttctgcaagcttagctgaagcatcttcaaagcgatccctcctcaacaacgcgtgaatgagactcccatacatgtatgcacttcttgaacatccataattcttaatattatcgaacaaactgagagcttcggccattctatcagacctgcacaatgat

SEQ ID NO: 28252 - DNA, 2246 bp, Oryza sativa
  unsure (1)..(2246): unsure at all n locations
accattttctgtaatttcgtaaagtacatccatcgttttgnaaacatcctttttccccaagtaatagatcatgatgaggtatacatatgtggttttgagctatacataaattcttattttctcaaagcttagctaaagcatcttaaaagcgatccctcctcaacaacgcgtgaatgagactcccatacatgtatgcacttcttgaacatccataattcttaatattatcgaacaaactgagagcttcggccattctatcagacctgcacaatgatctaatgagtatggagtagccagcctgaatagaaaatccatgtttacataatagtactactgagctttcagcacgatctatcatcccacactcacataacacagaaagatatgtgcaaaccattccattgtcaggtatatagcctgcacgacacatttcatggaaaatcttgactgcagcatctactttcctcccttttctgcggctgaggtacattattaggtgactgtaagtagttttgtcaggctgaaagccaccctgcttcatctggtagaatgtttcaagggccatttcagttagaccagcatttccatactgacaaatcatgacattccatgtatccactgttgggcaacactctgcccatatcatctctctgtaaagatgcctcatgtgcttaaaatcttttgcagagccagcgagttttatggctgtgttatatgtctttgttgtctgcatgtagtaagatcgtttgcctacccaagaaaaaaattgtaaagcagcacgactgtttgccttacaacgcttcataatggcatcaacaagatctggagtaaaagatattgatgtcatctctaaagcctgttctattgagctccagcaatcagaagatgacagaatccgacatatttgttcaacgtcttcattgttgtaatcctttgcttgttctaaatcctgtgtgtcatcacaaggaaagctccctgagacctcacagtctttatacgaaggatgaccaacaaactccactgtcctttccttctcttccggaccagatccagatgatttttcaaatttaccagtgtagtcactttgatccaatgttctgcgttgcagctcttctatagggctacaacaattaaaagatgctcgcatcctctcaatattgctagcttcttccaaatagtgattgtcatacagagtggaaataatcctgctgaaagtttgctcggaaggcctgaaatctgattccagcatttccttcagaagttttagtgcttcaaggggcctggaggccttacagagctcttggatgaacactgtataagctttcaatgtgggtttctgaccattctcattgatattcctaaatgcatcccatgcttcagatatatgtccattacgaacatgcccacctatcagtgctgtgattgccacaacatctggttcaataccattttcctgcatttcctcatacaatctacatgctgcttcatgttgatcaaatgcaaagaggtgttgcatgagctgagtataagatgatgccaatggaacacatccatattccctcatttcctgaagcacctcaagtgccttcatacgctctcctttcctcaggtagccatcaatgagagaaccaaaggtggcactgctcgcagatgagttgcttttcatgtactccataacttgaagagctttatccatccttccatctttgcaaaggcccctcaataggatttcaaatgcagatgagctagcaatggacttgttcatcatctgctggaagattttctgagcctcttctatttttcctgaaacacagaagctccgtagagcttccagataacaatactcctctggatacttcatgctcttaatcatatcatctctgacataaaaaacaccttcagcattatctgatcctgcgagacaacacaatagaagtcgaaaaatgtcagatccaacctccgtgttccttgccatatctttgtagaactcaagagcaagctcggactttgcagaattgcataaagcatgaagtatcgtcctataaactttactatctgctgccacatgtctcgatttccccatagcctgaaaggtagatagcatcttaaaaatctgccttgccttcccataactggatatgacgattgtccatgtcttgatgtccttaaacacaatctctttatcaatctaatcatcaacttctccatggcccccaaagttcttcttctaaaccgcaaaggaaaag

SEQ ID NO: 28253 - DNA, 995 bp, Oryza sativa
ccatcaagtgagtaatattaatcattaattgagcaatttcatcacgtcttacttttgcaatactgatcttataatatgtgcctctaatttgttttttttattttgtagcaattgattgaagttggatgtatgcgaaaaatttgaaacgtcattctacggagtacagaaagggcgtaataaattttatgaacgccgcgaaggaggatcggatcagaagaaacagtgattacatgtgttgttcatgtgcagattgcaagaatgagaatatgtttgatagcggagaggacgtacatggtcatctgatacaacgaggattcatggagagctatacatgttgggtgaagcatggagagcaagaatcaggaagtggagtagcagcagacagaagtggtgcgcataatcaggaagatgaagatgagcatgacatgtttataccttctccattgggcggtgaaatggttgatgtggatcacgatctgctgcaagacatgttacgtgacgttgaggacccagcccagaatgagagagatggaatgaagttcagcaggttggtaagtgattccgagacgtctctgtatgctggatgcaaagcaaaacacactaagttgtcagttaccttggacctaatgaagctgaaggcaagtagcggatggacagacaagagtttcacagaacttttaggaattttgaaggctatgcttcctattgagaacacattgcccgagacgacatacgaagcaaagcaggttctgtgtccactagggttagaggtccgtagaattcacgcttgtcccaacaactgcatattgtaccacaaggaatatacggacttggatgcttgtcctgtctgcaaggcttctcgatacaagcgaaagaaaagtgctgacgaaagaaataagtcaaagaggggtggtccagcaaaggttgtgtggtatctacctatcattgatcgtttcaagagaatctttgccaacccgaacgaagcgaagttagta

SEQ ID NO: 28254 - DNA, 1665 bp, Oryza sativa
acgttgacggtgcaggcctccaggtcgaagagtaaaagcacccagtggaatctccaatgtgcgtgggatgcattatatatgaaacacttagcatgtttgtacgggaatgaaatttggtataggaagacagtaaaattaaactaactctgtgttgtacggcaacagtatgaacgtcttgtaatgctgcgccttcaggagatggacgagattgtcctctgtgtcttgcagataccggtcgagcactgtgacgtttactttccgagggtcgatgaatccagtatcgaaaaccccccaccgtcgggccctttgaatctccattctacaacgataaaaggaagtatatattatatatagtctacttatatacaaggacctaattatttaaaggaaacgtaataagaaatctaactgaacgatacttacaaaatgcagcaactcataatagaaacgtcgagggcgtccagctggtatagttcgtagatacccttgaaattgatccagagaatgtcatctccttgcaagaagtccgtgtccctgatcctcgctctgatcatctctctaccggtggcgctcatctccatgtacagttgatggaacttgtacatttgagtgggtaggaactgcagctgctcaggcttgataagcggtttatcgagttcgtacatgtatttcactttcgccttttcgattggtgcacctcatatcaattgatccgtagttagcccggtgtcatcaataaattcttgtattccaaaatcttcaccggtcaccaacggctcgatctcctggcttgcttgctctccaagctgagggactggtttggactttccagaagatgctttctcgagtgttcgctcatagtccgatagctttatggccttcttggcaggtgcagacatacccctgaagaagttcttaacactcgagtctataggaatcttcttttctggacttcgaggcttcaattgtctcctgacttctgatgccacataagcgtcaagctcctcttgcgtgcaatcgtaccctagatccttgttcttggcggtgtgaactttcgccttcttcgttgcccttgtgggggcaggcggtggagcttggggggcccttgacttggaaggtgctgaacgaggagcctgcggaggagtcggtgtaggagcctgaggaggagtcggtgcaggagcctgaggaggagttggtgcaggagcctgaggtggagacggtgctggagcatgaggagacggtgcaggagcctgaggaggagatggcggagccggaggagatggtgcacgagacgccgcttgtcgccctgggaggatgatgtatcgcttgcgccatagtataatggcgtggcttgtgtctcgtagatgcgtctcaccgtctcctccagggtaatccaactcgaggtcctcgtacgcgccttcgaccaactcaacttcgaccttggagtatcctgctggaatcgtcctacagtggtaagtacctaaagggtccgttgggatggccatgcccgacgccaccctcacgtggtgagaggttatttattagtaatcaacgtttataagcagcaacttggcgaatgtaccaaatctaaaattattaactacgagcctacccttattgataagtttttgagggaatattcagctcaaatggtgcccgtgagtg

SEQ ID NO: 28255 - DNA, 2198 bp, Oryza sativa
cgacgccaccttcacgtggtgagaggttatttattagtaatcaacgtatataagcagcaacttgtcgaatggacaaatctaaaatctataaactacgagcttacctttattgataagtttttgaagggaatatgcagctcagatggtgtccgctgagtgatgtcatcaacggggcaggtggttttgtcctgggtttgcatggcgtccatgctctgtgatcctccctgccccgttgaggcgcagttgctacgatttcctgaagggctcacaattgcaggaggaatggttggctggggatcattggaccaatgtgcggccatgcgttcatcaaccttccttgccacctcctcttgcatgctgagctcgtagctcgataccctgaactcaagatctgcaatcttcgcctcggtatctctcttgctcctcatccgactcctgtacgtgtggatgtcctccttgaacccaatcttccaaggaatcacccctttccctcgtgttcatcctggatgctctggagtctgcagggcgagtgacagctcgtccttctctctgtcgggtcggaacgtaccctgagaagaggcttccactgcgtccgttagtcgacgcgtagcctcgcgtatctgatcgctgaagaccagggagccatcaactgggttgagcgttccaaagtgagcatagtaccagaacttcgatcgttccggttaattagcggtggccggttcgatacccctctcaagtaagctagcctccatctcctcccacttcggcatcgcgacgctatagcctcctgaccccaagtgtgatggtacttcttcttggcggcattttctttgtttctttccatcatcgcctgcccttgttcacatgtcttatgtgcaacgaactcgtcccagtgatcccttagctttgggaatgtgtcgaagttcggtgtctgccccttcaggatatatttctggtacagatctcccttgaagctctgaaactgttctgccattttatttagagtccaccttttcactttgtcctctgtacctgtgggaagggtgaatgtctcgagcattgtggtccacaacatctctttctccgaatatgggacaaagctctcatgatctccgtgtgcccttgttctgcgccagtacaccgtactgacaggcacgttatcccacacaacccaaccgctgtgacgtatgtagttcttggtggcttccgcctaggcactaggtcggccgtcttcgtccacttccgttatgatgtgccaaccctcaagcttcttcgcggcacctcgttgcccgcgtgccctcttctgtccagcggagggttgacttccactagcctcctcctcctggttcccctccacatccctctatacgtgcccctcctggttcccctccgcatccctctccacattcccttcctggttcaagtactggtttggatcctcgttcccctcttcttcgttcaagtactggctgcttccctccgcaattgtatcttacaatatatgttcctcatcgcgatcagctatctgttcatacaagaaatagttcctaagtcatgagacatttttgctttaacaatcttatatgctaacaatcatatatgctaagtctaaacacaaatctaataatcttatattaaaactataataatcgtatacgaaaactcaaataatattgtattaaaactgtaatagtcaactatgctaagtctaagtgacgtatattaggaccctagctagtcaataattatatactaagtctaattacaaatctaataatcttatattaaaactcaaaaaatattatattaaaactctaattataatgctaagtctaagtgtcgtatattaaatctaatagtcttaattgcgttaaaaatctaacaatcatatatttacatcacttgcctgcgcgaattccttcgagggctagcaaccactccggcttgagggacgacgacgacaacgtcttttctgcaacatacaaaaagatgtattaggagaaacgcgaagtaacatatattgtatttctcgttcgcgttctcattaagttcacgtttcgttcacgatcgttcacgttcgcgttctcgttaagttcacgtttcattcacctacgttcgttcgttcacgtgcgtccacgttaacgtacgttaagtaaagttcgttcacgcacgttcgttcgtttacgtatgttcaaata

SEQ ID NO: 28256 - DNA, 2157 bp, Oryza sativa
atacacggttccatttagccgaggctaaatatattttcccgatctttccaaattcttttaaacccggttagggttaataaccgggactactgataagcgcactgaatattaatttccattacatatgtgttcctaaaatagaaaataatgcattaaaattttttaaagtcgaaaaattaatgacaattacttcgaaaaattattgttgtctgtagtaaattaagtggataaaacgtaataagcaaatatatgatttaaattaataaaaattctaataatcatatatatacttagcgtatgaatgatattaaattgttaacaattgtaattaacatatgtatatacatacgacatgcatgatttaaaattaataaaaattctaataatcttatataattagcatatgaatgatattaaattaattgttaaaaactctaattaacatatgtaaatacatatgacatgcatgatttaaaattaataaaaattcgaataatcatatataattagcatatgaatgatattaaattaatttttaaactctaattaacatatgtaaatgccacaagcatgatttaaaacttttaaaaatcctaattatcgcgtataactagcatatgcagggtttaaaattgttaaaaactctaattagcatatgtaaatgccacatgcatgacttaaaacttttaaaaattctaattatcgcacataactagcatatacatgatttaaaattgttaaaatctctaagtaaaattgttaaaaactctaagtatcatatgtaaatgccacatgcatgatttaaaacttttaaaaattctaattatcgcatataactagcaattacatgatttaaaattgctaaaacctataataaacgtacgtaattaacatatgccatacaacaactgatttatatggataatcaatacatccaaaatagtttacatcgtgtacacaatagttacgacaatacatcagcggtgacggttgaccgcacgtactttctcctcactattgttccctccttgtgatcgctacgtgagtaaggggtgtcttcatttgataggaggatgctagggtcaatcgttaccatgaaagggggttgcccatcaaactgatcgtaatcctcgtcagtcttgtcctcaactccgacgatttttcttttgcctgagagaaccacatgacgcttcggctcgtcaggccctctgcccttctttcctttgctagacatttccttcacgtaaaagacttgcgttacattattggcaaggacaaaaggttcgtccgagtatccaaccttgttaaggtcaaccgttgtcatcccactatcatcaatcattacgcctccaccagtcaacctaacccattggcaccggaacagagggaccttgagaggaccatagtcaagttcccatatgtcctcgatggcaccgtaatacgtgccagttgttccatcgtgtcccattgcatcgatacgaacaacgctgttttggttcgtgctcttcatgtcttgggctctcgtatagaatgtgtacccattgatctcatatccctggaatgtcgcgatcgacccagatggtcccctcaccaggaaggccagttgttggttgatcgtctcgttacccatgagatgttgtcatagccacgcggggaaagtatcaatgtgatgccgtgtaatccatgcatcggacttaccgatgtttctggcgtgaactagagccaagtgctccttgatgtaaggagctaccaatgaagattgttgcagaaacgtgaaatgggctttacggaataaattgttgtctatcgtcattattgctttccttccgagagttccctttccccgtagtctcccttcatggcgtgattcaggtaccccgattgggcgaaggtcttcaataaattctacgcgaaattcgatgacctcctctgttccataccccttggcgatgcttgcctctggacgagcatggttacgaacatacttcttcagaacgcccatgtacctctcgaaaggaaacatgttgtgtaggtacacaggcccgagaatactgatctctttgacaaggtgacaaagcagatgcgtcattatattgaaaaatgaaggtggaaatatcaactcaaaactccacatcattcagaagggcttctaatcta

SEQ ID NO: 28257 - DNA, 6132 bp, Oryza sativa
tgttgcaaggattcgacgatgaccatgtacacaaccttcttcaagtgcttaagatacgtactttctgtttcatccatacagtgagtgcaagccttgtcccccttgttggactgtccggatgggttgctaagtgcaggccaatcgttgatggttacgaacagtagcactcgtaggttaaactcctcctgtttgtcctcgtcctacacggggacaccttccttcttccacaacagtttaagatcttcgaccagcggtcttaggtacacatcgatgtcgttactaggttgcttggggccttgaataataatcggcatcattatgtacttcctcttcatgcatagccaagggaggaggttgtagatacacatcgtaatgggccaagtgctatggccgctgctcatctctctaaaaggattcatgccattcgtactcaaaccaaaccgtatgtttcgtgcgtcctttccaaagtctttaaattttctgtcgatgtttcgccactgcgaaccatcggcgaggtgtctcagcatcccgtcctgttgacgctcttcagtgtgccatcgcatcattctagcattccccttgttcctgaacaaatgccttagacgtggtattatagggaaataccacatcaccttagcaggaattctcttctttgttagctgcccatcaacttctcctggattgtctcgtctaatcatgtatcatagtgctttgcaaacagggcatgcttctaggttctcgtacttcttaccgcgatataggatacaatcattcggacatgcgtgaatcttctgaacttccagtcctagagggcagactatcttcttagcctcgtacattgtctcgggcaatttgtttccctccgaaagaatgttcttgacgagtttcaataaattgccaaatgccttgtcactaacaccattttttgccttccattgcaagaactccagagtggtatccaactttttgtgcccctgctcgcaacctgggtacaacgacgttctgtggtcctctaacatcttgtccaatttatgggcccccttttctctttcgcagtcctccttggcgtcctgcaacatctgaccaagatcatccgcaacgtcgttaccatcagcatccctttcctcctcgcccgtttgatttccttcaaatccaacgtactgagcaaagtccagaatattgtcgtcttccacttcatcttcttccatttcaacaccttgctctccgtgggatgtccaacaattatagcttggcatgaaccccgactcaaacaagtggaaatgaatagtcctggatgcagaatactccttctgattcttacacttattgcatggacaacaaataaaacccttatgcctgttagcttcggccactctcaaaaaatcatgcacgccatcaataaactctttggaccgccgatcagcgtacatccattgccgatccatctacatgacatgaaaaaaaatcatacacaaataattattcttacaataatgacagtcatacaataattataaaataattacaaactctttcaacagtcatacaataatgacatatcattattcatacaaaaatcataaaatattacaccaaataattcttatttactatttctaaagtttacaactaatattaatgtgttttacttcttttaattttcattttagtttgttttctattatttaagattaactatcactatattttccttctcaactattttataaaaccttctttagcaaaataaactaaatttctatatattctttcttccccacacaaattttctctctcatcaacttacaactaaattttggagacaaaaaagtgtgcaaaacatagctccaaatgtaatatgacaaaaaaaacattggaggatgaagttgctaaccttttaggcacctctgatttctatataatcaccaaaataaatttactagaaattttggcatgacctcccctcttttttgaagaaaaattgaagcttgctcgggcagttggaggaggaagaagacatatatatataggggtaggactttagtcccggttggtaacaccaaccgggactaaagctatgatctttagtctcggttggtgttaccaaccaggactaaagatcccggggggggggggggggcttgataggccttgacagcatttgaatcgggatctttagtcccggttggtgttaccaaccgggactaaagatcaaatatgcccgttaccctttttaaccgggactaaagatcatctttagtgatctttagccccggtttttattgcaaccgggactattgtggaattcggccgaccgacgaaagatggtttctccaccagtgagcagacgactccatttataggcagcaaacgagagttcgatgccactatattgctactagctacttattctatcaccaatttgcatgtggaagtaacatgcatcatggatggtaggctttggtttaggagtaaagaatctcacagaattgtgtttcgattcattcctcatgaccccatgcatgtagtttaagctagatcttttgattcatttaagccaacatgtctgctgatctgctctgacttttggatagtccatgccagtgaagcttgggaactagatatagttttatgattacacatagctagcgcactactggagagatgggcatctctgccggttcgcaaccccctttactcccgggtaatgaaccgagacgtccaattcgggactaaagatacccatctttagtcccggatgaaataacccagagtaaaaatggatctttagtccccgggactaaagattctagcgccattttagtccggtttcctttttttgtttttattcttgcatttattatcaccctcaaatccccacaaatcatccccaaatcacacaaatcacccccaaatcatgcacaacaagtcatccccaaatcatgcacaattctcagcccatccacgaaatcatccacaatccacaagtcattcagaaatcatgcacaacaaatcatcctcaaatctaaaataaactacaacaaaaattacaaatcattcaaaaaaaaatcagaaaacacgccaccgccggccacccggccgtgtgccgcctcccggcctccgcccctcgaccgccgccacccggccgcctccgctaggccgccgctgcccggcctccctcccaccggatatggcggagggtaggccgccggccgtgcgccgctgccgcttcgtgcgctgcggggcgcccgctgtcaccgtcgtcgacgtcagaggagggaggggggagggggaggagagggtaagggggaggaaggggaggagagggggagggctggaggagatgaaggagttagagaaaatggaggggagatgagaggatgagactggaagaagagttggagtggaggggataaggatgaggcggggaggacgaggcgcatgcggctaggtggtgctcggtttttttttaactttgctcctggttggtataaacaaccgggactaaatatgatgaggcgcgcatggctcggtggtgcactattttttttttaacttaatttgctcccggatggtataaacaatcgggattaaagatctatttttagtcccggttgataacaccaaccgggactaaaaaatagggctttgacatgtttttgaatcgagagtaaaattaatatttagtttcagttggtgttactaaccgggactaaagataaaaaaataccggtgtgttttcaaaccaggactaatgtgatttttgagtgacccaacaaagatcatttctccggtagtggcggtaattttatttttacccctacttggatatgtgcccctgttttttttaaagattttttccccagttcttttaaacggagccaaattttatctttattttggagggatatgttgacggtgtgaagtgaaaaggtatatatgtctttacttactgttacaaaattgtccctttatttgtgcattagttgtgtttttccccctaatattgtaaatgcagctcgcaaccactactaaaaaaccctcatagggactagctcataggtgccggttcatttaaaaccagcatctatagagcatttcccacctccgagcaatgaaaaaatatagaaccggcacctttaaccatgttagaaccggcacatatactataggtgccagttttttaaaagaaccggcacatataatatattataggtgtcggttaattaaagacttaaagaacagacacctatatgttgtttttaaaaaccggcacctataactttgagccaagccgacgagccgagaccatccgcgcacgcatgcgcactgcacccaccgcgcgtccttatctactccctcgcctttcctatctctcgcatatctctccctctctctctctcgcgtctctgtacccgtctctctcgcagcggctgcccagtggaggcagggtggcggcgggctcttctcttctctctcccatgttcttctcttctctcccttctagctatctgcatctggggcgggcttggggcggcacctctagcccccacggtggcgcacggcgggtggtgggcggcctccctggtccggcgggaagggagaaggcaggccatgggtggcggccaggcggaggcagtcgggtggcctctctctctcttctttcaggcggtggcaaccgagcggcggtccggcggaggcagcagcggcggcccaagttcatgcggaagcggcaacgcactgtttagttttttttttattcttgtttagttcatgcggcagcggtggcgcactgtttttgagttcttgtttaggtcttcctctcttttctcctccttgatccatgtcccaaatgtatgtgaacttgttgagttcttgatgcatgtaggatttcaattaatgtgattgttgttaagtttggccggtggttcgctgttggtttgctgttgagtacttgatgatgtgatccaggtttgctgttgagttcttgatgatgtgatccaggaggcggtgatgaatgggatgtgaggttggtgagttcgactcgaatgagccggctctctctttttttttttttttttttttttttttttttttttttttttggctcgagcaaagcttaaaatgccggctgtatatttctaataggtgccggttgctattatatatgtcggttgggaaaccggcacctatagacggtttttaacaagcaccaatgagtatttgtgtactagtgaacttgattttttttaaagatgtttaaaatcaaatgatttttgacaacctttgacaaatataacaattttgacagaatatcaatagaactatcacaaatttgatagtagaaattaaacataatttttccagtaaaagaaaacataatttttacatctttttacacagctagcagaagtagtcacagcactttgacaggctgctccttcactgctgagtcgagccgacggctgcaggatcacgttcacctaggctgcctgctccccgcgctctgcctacggagtcatcgccgcgaccttctcctccccgccgctggtcacattggtcatcgccgaggctgcctgcggagtcgccgctgttgccacctgctccccgcccgccatgtacagggttcgctaccacggccaactactccggccaccttgctggctgggtggctgccgccgccaccgctgctgccgtctcccggccactgccacctaggcaggtcgctgtcgtcgcctggaccgtatggttcgggaataggggaaacagcgtcagggccgattgaggagacagatttctgctctcattttcttcttttacgtatatcaggggtagaaaggtaaatcaataaattccaaaatgattattcctctttattcttattattttgttatcttaacaattccagtttccgggccgggtccactaacttccataaaaaaagagtaaacacctccttcatttgaaaaaaatgggcaaaaaacccaaaactcgaaaaaaaacacgagcaaaaccataattgaacattaaagtaggagcaaaacaaaattgttcctaataaatataagtcgttttacgtaagcttgcatataaatattcaaaaatggataaacagtccatgtctccatttag

SEQ ID NO: 28258 - DNA, 5345 bp, Oryza sativa
  unsure (1)..(5345): unsure at all n locations
cttagccagcagtgcagcacaaggattttaattaatcatatccatgatgcatgtgatatatattctccttgcattgcaagtctaaatgcaatgagtcaagtcaactccgatacattcatgttgatctccattacaataacagatatacgattacagtcagggtttcaaaaaccgctgggggcccggttaccgccacccggcggtacggcggtaaccgcggtaaccgcgcaaaaccgcgacaaatttacaaatcgaaatttgaattcaaaaattcgggcaaaccgcgcggtttggcgcggttaccgcgcggtttgacgcggtaaccacgcggtttggcgcggttaccgcgcgatgtgtaatgggttgcacagtaacgggccggcccatttttttttctttttccaattttcaaatttattctccgttttgctctcaaatttgaataaatattactcttttttgagaaatttcttcaccataaaacactataaatcaagcactaccttcactattttttttgatttttttctttttttttaaatttttgaatttggacgaattttattaaaccgtaccgcgcggtacgggtaaccgtacccccgcggtacgggcggtaaccgcggtaaccgcgcggttaccggcggtttttcacaccctgattacagatttacagtacgtcaaatgcaaattgattacttagcttgccaggtatttctaatcaatagtcaatggtgcgaaaaatagccctaaaaaatcataaccagccaaccaacaaattcaacaaaaggggaaaattgatggaataaattctgaaggagcccatagtagagattgcatgcatgtcagttgcccagtcggtgtgcgtgatcaactgttggctccaaacttcattaatttgaactagcttaatttggttgtcagcagggtacgataataggttatctttcaatatctctccattaacgggctttcaatggtgacatgctcctagctagccacccactgattacccttcggcttataattacgccacattcaaattttgaattttaaacatcagtttggagttgatcttatgttttctttcgttgtagtttattttctaacattttcttttaaattgctaagaaacatattatcattaagaattattttttattgctcataagcctattgaaagccaaaaggtttgtgctgggaaaatctagacaccaggtttacagcgtagggagggtcaaagccctcctaaaggaaaacagacagactccaaaacttactaccagctctaaaagcagcaacacaactaaaagaaccaaaagggctgccagtacaagcagatttcaaacatcacaacttcagtagatagaggatagtgccacaacttagggaacctcttaactaatctatcacccaatacccagcctatcactttcagagttggcagcagcggtcttcatcttctctgccacaaccatcatcgtgctagcttcttcagtatgccctaaaaccttccactgcagcaaataagaagcaatacaaaaaggaagcattaggggggaatacaccaattgagatctgaatatcatattgtttcttgtggtccaaagaacccaacagatagcagcaagcaaagaaaccaaagctcttctattactacaagcattatgttttattagcaagaaaaactcttcaaagctgcaggggacagtatcccagttcacaacatctctacaaatgcagcaagcaaaaattgccattggacagttaaaagaatgtgattggtagattcaatagtattgcatagcatacaaagttctgaaccatcccaacctttctttttcaattgttcacaagattggatcctatctctacttgccaaccaaaggaaatgtttaatttttatgggacagggagatttccagattagttgtagcatctcatctttcacccatctaaaagccatagctctgtataaagagttggtagtaaatctcttactagctgtcaaaccccatttcaaaatatcaggagagtcagtcaactctagctcttctaggattgtcctaacctgctgccattggtcaagttccagagggccaaaagttctcctaaaagataaaccacctatacctatctgtttcagctcagaattgtgattgattgtgggttgcatatctcaaaaatctcatgaaaacttgttttcagagggcaagacccataccaaacatctagccagaaccaaatatgggaaccatcaccaatcttctattcaattcagaaccaagcatcattcattttcttgtattaagaatcccagaccaaaactgagaagcaccttcagtagagcactgaaagactcccccagaacacaagtatttctttcttaatagctcaaaacagagactaccatcaggagattcaaccttaaccaaccatttagccaacaaagcaatgttaaacattctagtttcagtaagacccaaccctacaaactcttttgggaagatcaaatctgcccatttcatcatatggtattttctcccttgtttgttaccagcccagcagtatctacctcgaattgaattaaatttctgatgaatcccctcatacagctgatagaaccccatagcatacgagggaatcgatgagagacaggcattgatatgtacagctctccctgcatgagagacagaacaaccagaccaatttcctaacctcttttccattttttgggctaaacaataatgatgatattataagcctgtaaggtttataatatcaacataagcgaaacaataattatgattaatccaacctaaagaagtcaatggtcagcacacagcaggatattcttaccctgaattatatattatcacaaattatcagacgtaataagatgcacgtacgcacgataatgaacaacatgcgtatgcagacctagagaaaaattactctatattatctcaagatcgatcgatggaccaattctagtcaatacgtttaccaggaccaatattttactgatagttatctcatcaattaaactatgtaataaagctcacacagatatgtttacgtactccgccgaaatttagctttgttcctaattaatttgcgccctatctggaatatgcaaaatatcacattatggtttcaaaggaattttatacatcaatagttcaattcccagatggaagggtacgtagaggccattaagagcttgtggggaaaagaaaagggtgaatagctaatacggtctctgaagtttcgtttcggacttagtttagtacttgaggttttaaattgtctaaactagttctccaaattaatcatttgggttaatatagtacttggacccacaaaaagtgtcacgtgagcatgccaaatcatcctcacatgcaacggtatgaatgaaatgaccattctacccttatgtaccaatagaaaagaaagaaaaaaagaagatagttgtttcacacatgtatgatcgttatagaattgtcacttgcgattgctgtagccaagcactgatcgtataaattcctttgtcacttacgatttctgtttgtatcttttctttcttttctatatgatatgatatataagggtagaatgctaatttcattcataacgctgcatgcgaggatgacttggcatactcacgtagcatttgtttttaggtccaaagactatattaacccaaatgattaatttggaggacttgtttggatgatttaaaacatcgagaactaaactgagcccgaagcaaaactcacccgaaagaaaacgatctcttccgtaacttcatttttctgtgccgtgtctttccggacggcttcggtaactacttgctgttgtcagctagtacaattattatgcctgccttgcaacgtttaccgttccataatcgcaaaatttgattagtgtgcgcgcgcacgatttggcgttaaccaacaacacgtcggtgagccgtttgattgtcataaaccacatgattattgcatgtatggacgtggacgtgggtgcagatagagccttctatcagataagtacacatgtggagataccgcgcaccaaacaaacttatgtaatgtttggtacatctctactaatataaaaagtatgagttcatccacaatcctgcaatcctacaatcctggatccaacccacccagccacctggacccactccttatcacgtctccacaaaccgaacccacgtcggtccgggagaaagaaaaagaaaaagaaaccgagaaaacccacaaaccaccgttttctcggccgcttctctccgcntgngcagcgctcctcacgccgcgcgcnttttccttttgcctccccacgccacttgtcggcgctaccctccccgctcccgctcgntccgcagcttccctccacttgcgccgccgccaccgctgcctccaacgctgactccgacttcaacgctgctccggttgctgtgcaagagggaagctgtagtggcggcttaacgagcgagacctcctcccaccccgcctccaccgcatcaccgccgttgcgcagctcctgctcgcccgcatcacctcctccttcaatccgtgccgcccctaaccctagccaaaccgagctgcatccctcgaaaccgagccactccgctcgcgcgcggctgcgaacctaacaagggaaagttttaacagaggaaacttggtggaaactggattaagctctactgttggttaaaaaaaaagcatgcttctcatatgtcaccactgtttgcacctattccaaaaaaccaccctcttccagcattttgactttcaacaattagaaacggacactaggtaatggtgagcagcgactcccttgtcatatccaattagatttgataagacctaaactgtagtaaaaaaaatgtaccacatgctttctcatatgtcatcaatgtttccacctattcagacaacctccctcattcagcattttggttttcaactagtatcaaacactaatgaagcaatcgccactaggtaatggggcactaccttgtcagatccaactagaattgacaaggccatcattactacaaggcattcagcttagccgtgaattatgtcggcggctacgacggtagtgcaactaaacttctaaattggtttgatctttctttgttttggtaactccatactcaaatggtttgatctttcttttgtttgctaactccatactcaagagtagaagatcaaaggaatgtttctctcaaattacatgaaacgttcgacagccttcgacgatatcgnctcatgctcaattcagagaagtgcatgtttggagtaccaatcggcaagctacttncgtttctcgtt

SEQ ID NO: 28259 - DNA, 2196 bp, Oryza sativa
agcgactcccttgtcatatccaattagatttgataagacctaaactgtagtaaaaaaaatgtaccacatgctttctcatatgtcatcaatgtttccacctattcagacaacctccctcattcagcattttggttttcaactagtatcaaacactaatgaagcaatcgccactaggtaatggggcactaccttgtcagatccaactagaattgacaaggccatcattactacaaggcattcagcttagccgtgaattatgtcggcggctacgacggtagtgcaactaaacttctaaattgttttgatctttctttggtttggtaactccatactcaattgttttgatctttctttgttttgctaactccatactcaagagtagaagatcaaaggaatgtttctctcaaattacatgaaacgttcgacagcctccgacgatatcgcctcatgctcaattcagagaagtgcatgtttggagtaccatcgggcaagctactcggtttcctcgtctctggcagaggaatataagcaaatcccgagaagatcaaggcaatcaagaacatgaagtcgcctacaagactcaaggaagtacagaagttaaccggatatatggcggcattaagcaggttcgtcgctaggatgggagagcgaggacaacctttcttcgctctgctaaagaagcaagacaaatttgtatggacacaggaagccaaagaggcattcattgcactcaagcgctacctatcaaatccccctatacttgttgccccccaacctaatgaagaattatttctctatattgccgccacgccatattccgttagcactgtcattgttgtcgagagagagaaggtgcaacaaccagtctactacgttagcgacgctctccacgacacaaagacaagatatccacagatccaaaaattgctctacgcggtaatcatgacatcaagaaagctacgccactacttccaagcccacagggttacagttgtatcctcctgccctctcggtgaagtagtgagaaacaaagacgttctcggccgcattgtgaaatgggtagtcgagctaagccaatttgacatccgctttgtgccacgaacagccatcaagtcccaggtacttgccgacttcgtagccgattggactatgcctgataacaggtcagacaaccaaattgacaacgaaaggtggacaatggcgttcgacggcgcactcaacagccaaggagcaggggcaggattcatcttgacatcaccttcgggagatcaattcaagcatgcaattcacctcaacttcagggcgaccaataacacagccgagtacgaaggactactcgccgggataagagctgcagctgcactcggagttaggcgactaattgtgaaaggggattccgaactagtcgcgaaccaggtgaataaagattacaagtgctctagccccgagttatccaagtatctcgcagaagtcaggaagctggaaaaaaggttcgatgggatcgaggtctgacatgtataccacaaagacaacatcgaaccggatgatctagcacggcgtgcgtccagacgagagccacagccaattgaacctggcacctttcctgaccaggccatcagtgaaagaggcaagcggcgaagatagcccggtcacccctaacatcagctcgggggctacagaggcagagcgcgccgttgccgatatcgagagcacagatgactggcacaccccactcattaaattcataggcagtgaagagttgcccgaggacgacacagaagccaagaaaatatcccgtaaagcaaaagtctactgtatgatcggcaacgatctatacaagaaggcaccaaacggggtacttctaaaatgcgtctcgtccgacgacgacagacacctcctccttgacatacatgaaggaatccgtggatcacatgccgccggtcggacattagtcggaaaagcttttcgacaagggttcttctggccaaccgcccttaaagacgcctgcgacatgattcagcggtgtgaagcctatcaattctacagtaaacacacaaggctaccagcgcaagcacttcagactatccctctcacttggccgttctcgtgctgggggctagatattctcgggctattcccacgaggatagggcggctgcaggttcctattcgtggcgatcgacaaattcactaagtg

SEQ ID NO: 28260 - DNA, 1085 bp, Oryza sativa
cgtgatatattgttgttagacaacgatgaacctactacctacgaggaagcaatggtgggaccagactctgagaaatggcctggagccatgaaatccgaaatagaatccatgcatgtcaatcaagtttggaacttggttgatccacctgatggtgtaaaagccattgagtgcaaatgggtctttaagaaaaagacatatgtagatggaaatgttcacatctacaaggcacgattggtggcgaaaggtttcagacaaattcaaggtgttgattatgatgaaactttttcgccagtcgccatgctaaaatctattcagattgttttagcgattgctgcctatttcgactatgagatatggcaaatggatgtcaaaacagctttcctcaacggaaatctcgatgaggatgtgtacatgacataacccaagggatttgttgatccacaatcagctaaaaagatatgcaaattgcagaaatccatttatgggttgaagcaagcatctcggagttggaatattcgttttgacgaagtagtcaaggcgttgggctttgtcaaaaatgaagaagagccttgtgtatacaagaagattagtgggagcgcactggtgtttctaatcctatatgtagatgacatattattgattgggaacgatattcctatgcttgaatccgttaagacatcgttgaaaaatagtttttcaatgaaggacttaggagaagcagcatatattatgggcataaggatctatagagatagatcaaagaggctaattggattaagccagagtacatacattgacaaggtgttgaagaggttcaacatgcaagattctaagaaaggcttcttaccgatgtcacatggcattaatcatggcaagaatcagtgtcctcaaacgactgatgagcgaaacaggatgagtgtgattccatatgcctgggcaatcggatccaatatgtatgctatgctatgtacacgtatagatggttcatatgcacttagtgcaacaagcccattaccaatcagaatccaggtgagagtcacctggatagctgtaaaagaattatcctaagtacttgagaaagacta

SEQ ID NO: 28261 - DNA, 660 bp, Oryza sativa
tacgtacttcctgtttcatccatacagtgagtgcaagccttgtcccccttgttggactgtccggatgggttgctaagtgcaggccaatcgttgatggttacgaacagtagcactcgtaggttaaactcctcctgtttgtcctcgtcctacacggggacaccttccttcttccacaacagtttaagatcttcgaccagcggtcttaggtacacatcgatgtcgttactaggttgcttggggccttgaataataatcggcatcattatgtacttcctcttcatgcatagccaagggaggaggttgtagatacacatcgtaatgggccaagtgctatggccgctgctcatctctctaaaaggattcatgccattcgtactcaaaccaaaccgtatgtttcgtgcgtcctttccaaagtctttaaattttctgtcgatgtttcgccactgcgaaccatcggcgaggtgtctcagcatcccgtcctgttgacgctcttcagtgtgccatcgcatcattctagcattccccttgttcctgaacaaatgccttagacgttgtattatagggaaataccacatcaccttagcaggaattccttttttgttagctgcccatcaacttctcctggattgtctcgtctaatcatgtatcatagcgctttgg

SEQ ID NO: 28262 - DNA, 1585 bp, Oryza sativa
atgtcactgtcaaggcggatgttgccgcgaccgttgacctcgccattacgcgccacggccgcctcgacgtcctctacagcaacgccggatcataggagcacaggctccggactcgctcggcgtgctcgacatcgacgagtacgaccgcgtcatggctgtcaatgccaggtccatgttcgtatgcgtcaagcacgcggtgcgtgtcatggcggcatggtggcgtggatgcagcctctgcacggttagcacggcggcatggcggccatgacgccggccggcaactccgacactccgcctcctcgacctgttggctctgccgtccgcgacgtcggcaagctgcttttcaaccactcggcgtccgtctccatcctcgccggccgtggccgcagccgctccccgcgctcgcgaagttctcgccggcggccgcctcgtcttcttgccctcgccgtgcctacgtgagattagaggatgacgacgtgagagagaacgacagaaatagtgacggagtggcatggtttcaattttaaaaatttgtagtggcacctagccaataaaacaaatagtagtggtatttttctaatttgccacatttacagtggcatggatccaattaaccctaaaaactataacaaaaatataccaaaaagctcatagctcgtgactaactcgactcggctcgtttgtatttattaacgggctaagccagggttagctcgtttgctataacgagcgagctcaagctggctcgcgagctaaatgagccatggaaaaacaaagcagcccaggagtgctgaggtggatcgcattgttatttgtaggcctaaggcccatcagatccactgatttccactaaaccctagttatatcaaatagatcgattgatttccccattccccaatctacagcgcacgctgtttctgtccagtatcacatcgccatagtgtcgcccaagccctcacgccggcatcgtcgacgacctggccgtcaccaccagcctctagggggcagcaacagcgtggtttgtgagctcacggtgccgcgcttcctctcgtcgccgctccagccggtcggccaactccgtggcaagcgtggccttgtctcagtctcgtcgtcgtgaggaagacgaacaagcagggtgaaggtcccctgctgcaggatgcaagagcatgcaactccatcgacagcgctacaagttataaatcaaggagcaaaagttcaatcttgccgtcctcgtcgccgtcggcagttcggcacttcggcaagtcaatctcccatgttaattttggttggtctaggattcactagggtgtttgcttggtgttttgtttggttccaatatgacgagactttcagatctgtttttatggatgcaatgtgtaaaaaaaaatttgtgccaagtctttgtgatttgtcggttgtttgatttcttaagcaattgcaaaaaaaattgttggcagccagaatctcgaagtgagagatttctattgagtcacggatgtattggctcgcgagctaaacaagctagctagagttgccagtcgagccgagttaggattaggctcgttatcctaacgagtagaccgag

SEQ ID NO: 28263 - DNA, 912 bp, Oryza sativa
cctctgtcgcttttggattcacctatgcacgagaggggactgcccgttgcccgctggggacgggggtgaaacttgaggtgtggtgtgcttggctagagggggttatgcgaagggtcctgtcacggcctctttccggtatgtcgtggtggcatgtcggcacatggaaacatgtcgtggggctgtgtcttgtgggtacagttgtacacctttgattagagtaaaactattcgaatagccgtgcccgcggttatgggcggtcaaccagattcaccgtgattagattcaccctagactagtctaatggaattgaatagtataggtggatggttgggcctgttgcaacgtggtatagcattggacagtggatgattaatattgattaattattacaacggttttactactttcaactactatttataaatgctcgctttatgcaaaggaaccattatagctatcccttgataattccctgcatcatacccctattccggtatgacttgctgagtacagtgggtagtactcagtcttgctatattttccccaaaccccagagtttgagtatgcgtcagatggtggcttctccgaggagtaggcttcgtccgtgccgtcgaggatacttgtggagtggtgttcccgctgcggtgcaagtcaaggcttagctccagttatctttttattttccgctgcatttatgtaatacttttataatgtttgtaagacgtggatctgtatgtcaaatttgtcgtttgtgtaccccgaccggtcctggacgggggttttaatgcacattctgcttggaattctattcgggaatttctgggcgtgacaacctatttcaatcgggcatttagttatggccggcacagatggctttaattcacaaaaaaatttgttttttgggtaagccct

SEQ ID NO: 28264 - DNA, 2530 bp, Oryza sativa
tcaaagctggtaggcagacttggttattatgccctacattgtcataattccagattaattgatcgatcatatataagtactaaaatatatttagtctatcacaattgagaccaccgacctcaaactcagccaaagtcttcaccttttctctatacagaaggcgcatgttgtggcacacatggaatctgcactggtcacctatttgttgcttcaccgggaagtcttttttgtggatgagggtgtcatgtcctgtcttcctgaggtctcctctttgcacatattgggcccacgcttcatctattgctagttgaattggggtccaattatatgcgttcttatcaattctggagttcaggtagtgacatgtactccacttaggtgttatgaccagaaggatccaatgggcactgcggcattaatatagtgaaagttaattaagtactcaaggaatgtgtgtcattttgttgtgtatatttagttaacacacttactattgattataggcgcacataatgtactccttgtctcggcaggaccacaaggtgtcgtagatgtagttgaccattccttgacggtcattctggagatttgtgacagtgaccacttgtggatcaaggaaggcaacttccggtgcatgcttctgacaccattgccaacttaacctacacacaggataaacgatcttgtaagcaagttaaaccgattgttattaccagaatgagttgggcgacaatacttacaaggagtagcacttaaggaggcttgtgtccaccgttcggagcctgtagaggtcgaaaagatccttgaagtcgaccacgacataatttgttggaccaaggaatggctttccatcgtgctctccaaggatatcggtagctttactcggcttcctggcgttagatttctccatgtagtataagtgaaggtccttccaagcggtgcccattgtggcaagcacgtcatctccaaccaatggcatgcctagtttgaactcctgtggagcaacgtatttcttcttgacctctttgcccttagtctcttcctggcccttgcccagatctagcttccttggagctagaagcgaggcctgcacctttcctccccttcctctcccctttgcttcgggtttattgagagtaattctctaaggggaagagtgtgccttcctgctcttcttcatcagtgggggttcatgaatcgccttgctgtcggcctccgttcggtcctccccaaaatccgtgtcgtactgcaactgcacatcgtaagattgtgcatgacaatcttgagcaggaggggctgaaggagcagaggcgggtctctttgctgaacgacagcctggtgcaagtggttagcctcactgtaaccctgatctcaatgaggtccttgggccattggatgaaggtaccacgagcatttcctagtgagaggacctcgtcgtttggtagatacttcaaagggaacagctcgtattcgggcttcaccgagtcgacttgaacttttgcacagtcggccctgagttgcgctccatgcacttttgtctatggggtcggcttgtacgcaagtccctcggctgctggaaccgtgaaggtcggcatcaccctaactatgagggtgcagctcgttggttcctgcgatagattaatcaatttttttagaatattatatatcatatggattcggtaagtctttcatgtattgagtaagttcatggttaccgttatatggtcagcggcgctgtcgaccgatgttggattttccgccaactcagttgatgcgcaactgctgcgtttttgggtgggacttcctaactcttcgtgcgcagaagcaacggcggcctgggggttctattgctcttctcggatctcttgcctaatcttggccctcatcgactcgagcttttcatcgaattcagatgtcagctcagctcttatcgacgcccagatcttggcttcaaggcgtgcatctttctccgccttgttggaagtccgcttcttgtactgccacgcgtagtctggaaatccatacttccagggaacagaagacccaacgccccgtgtccgtccacggtgttccttgttgcccaacgctttcgtgaggaggtcgtcctcacgtctttgagagcaggcctcttgcgaggcttgttgctcggcaaccaactccatctgcattacaatttagtggggttaaataaactgcacgatgggaaacaatgcgaacatctagtttgactagacacttactatagcttcgtacactcgttgatcttctgcatttggcatgaagattgtgccatcatcattcttctggtacctggccctggcccagttcctagcccgagggtgtgggatatcgccaaacacgagcggtgtgcatgattcctccgcttcttcatcctcacgttgccattcctcttccttactggcatatccggcggtgcccagccggtgcggatgctggttcctggtctggagcaagagatatgcctcgcttctagctctggactcgggggtcgacttcttcgcatgtaatt

SEQ ID NO: 28265 - DNA, 717 bp, Oryza sativa
aatggacttgttcatcatctgctggaagattttctgagcctcttctatttttcctgaaacacagaagctccgtagagcttccagataacaatactcctctggatacttcatgctcttaatcatatcatctctgacataaaaaacaccttcagcattatctgatcctgcgagacaacacaatagaagtcgaaaaatgtcagatccaacctccgtgttccttgccatatctttgtagaactcaagagcaagctcggactttgcagaattgcataaagcatgaagtatcgtcctataaactttactatctgctgccacatgtctcgatttccccatagcctgaaaggtagatagcatcttgccaatctgccttgccttcccataactggatatgacgattgtccatgtcttgatgtccttcaaacacatctccttatccatctcatccatcaacttctccatggccccaaagttcctctcctcacccgcaatgtacagcattgcgttgtacgtcttcgtggtgtgctggaatccaggaacttgcctaacccagtcaaagaatttgaaccccaaatgcctctttttgaagcacctgttgagcaccaagctcacaagcctctgggtatatgtaactcccaggttcttcaagcttttgttcacaaacaatccaagcacctttgcccccaaaacttttgtaccctatgacaaactcactgtaat

SEQ ID NO: 28266 - DNA, 1695 bp, Oryza sativa
cacagatgtcccaaatgagacagtacagttgttggggatgggaccgtcttggaccgtagacacatggcaaggatacgatataaatggatattttacaccgtcaaacaagatgacaaaagcacagtgcaaaacaacggcgtccgtatagatgcgttccaggatcaagttgggtcaaacacatactacggccgcattgaggagatctgcgagctaaactacgtcaagttcaaggttcgtttgttccgctgccattgggtgaatctaagcactggtgtcaaagccgacaaggaaggtttcactttagtagatctatctaaggtgggatacgtcgatgaaccatttgtacttgcgaaacaggtcgagcagatattctacataaaagacccttcaaacaggaagatgcacatcgtgagggatggaaagcgccgaattgtaggagttgacaacgtcgtcgatgaagaagaatacaaccataatcttcatgtaagacctcacattgaccttgacgatgatccccaagagcctgtggcatatgctcgttcagatcatacggaagtcataaccttgtgacatgcatttgtacttatctattgtaatgaatgaagtattttgttttattacaaatgaccaaaataaaagttgtagatcctgatgagaggatcaactttgtttttgaccatatttcaatttgaaatcatgtagtatttacaaatgctgttaattagatttgttatattgtcaaaatcaatttcaagttgttgggaaaaaaattatatagaaaaatgaccaaaataaaactagtagatcttgaaaggctctacaactttgttgttgaccatatttccatttgaaatcatttactatccaaaaatgtattatgactaataaaatgaattattacacagcagctatatattttgcacccacaacaaataaaagatggaaaatgagtcatcgtgacgggccttagttcaagcccgatagagattaatctatctctatcgggcattatcttagggcccgtcacagatgagtcatccgtgacgggcctaaatgtcatctcaatcgggcattattatggagcccgtcaccgatgagtcatgtgtgacgggccctacggcaaagcccgattgagatgactcatcactcttttgtaactagggtttctcagatcggattgaaaaattttctaagtcctgctatagtttcccgcctccttagaaccctagcgccgccgccaactcctacttcaccgccaccgccaccgagaccgtcaccgccgccaccgagcccgccgccgcctccaccgagcccgtcgcctccaccgaccggcgacgccctccaccgaacctggcgccaccgccaccgagcccgccaccaccgccctcgccaagcctgccgccgtcgccaccgacgttgagcccgcggctgccgccaccgagcctccttggcccttcattcggaccaccgccacttcttcactgacgacccccaccgagcccgcgccgccgccaccgagcctctacaccgactggaccggtgtcggccttcctcgtcgtcgccgcccgcgtcctcaccgacgcacgttgccaaccccccaccgagcccgacgccgcccgcccggcgccgacctacccgaccggcatctccactgaccggcgccgccctccaccgagcccagcgccgacccccagg

SEQ ID NO: 28267 - DNA, 1030 bp, Oryza sativa
tcagtttattagatttgtgagatgtgcaatttagtttatttatgtgaataagtgattttagaactttggattctaagccattgaagcactgaattgtgtattttcgttattttgaaaaaaagtagacgatgtctcagcaaggtgaaccaatgtcgacgacaactagtgggtcctcaagggcacgtactcctaggacagggaacaaaatccctaaggaacggttccgcataacagtggtggacgccgtagggttgccgacatctccaaggaaaatattgagccgatttaggtctatctgtggggtcatagggaggcagaaattcagtattctgcaagatgacatcaagctcatgccggccgcagagaaggacattgcttggctaatgttcaaggagagctttgattatcctgtggagcatgaggaccgtctcaggcgggctgctttcaaggttatgggcaatgcttggaagaacttcaagactaagctagtcggcgagttcgtctacaacccggcgaatctagatccaagagagaaatttccttggatcacggaacaggtctgggaggaattacatgcgaagaagtcgacccccgagtccagagctagaagcgaggcatatctcttgctccagaccaggaaccagcatccgcaccggctgggcaccgccggatatgccagtaaggaagaggaatggcaacgtgaggatgaagaagcggaggaatcatgcacaccgctcgtgtttggcgatatcccacaccctcgggctaggaactgggccagggccaggtaccagaagaatgatgatggcacaatcttcatgccaaatgcagaagatcaacgagtgtacgaagctatagtaagtgtctagtcaaactagatgttcgcattgtttcccatcgtgcagtttatttaaccccactaaattgtaatgcagatggagttggttgccgagcaacaagcctcgcaagaggcctgctctcaaagacgtgaggacgacctcctcacgaaagcgttgggcaacaaggaaca

SEQ ID NO: 28268 - DNA, 944 bp, Oryza sativa
ccccttctccccctaaggaattactttccaaaaccctgagccaaggggaaggaaagggagaaaaggtgcggcctcggttctagctcaaggaagttagatctggcaaggccaagaaaaaaataagggcaaaaggtcaaaaaaaaatacgttgctccacaggagttcaaactaggcatgccattgggtgaagatgacgtgcttgccacaatgggcaccgcttggaaggaccttcacttatactacatggagaaatctaacgccaggaagccgagtaaagctaccgatatcttggagagcacgatggaaagccattccttggtccaacaaattatgtcgtggtcgacttcaaggatcttttcgacctctacaggctccgaacggtggacacaagcctccttaagtgctactccttgtaagtattgtcgcccaactcattctggtaataacaatcggtttaacttgcttacaagatcgtttatcctgtgtgtaggttaagttggcaatggtgtcagaagcatgcaccggaagttgccttccttgatccacaagtggtcactgtcacaaatctccagaatgaccgtcaaggaatggtcaactacatctacgacaccttgtggtcctgccgagacaaggagtacattatgtgcgcctataatcaatagtaagtgtgttaactaaatatacacaacaaaatgacacacattccttgagtacttaattaactttcactatattaatgccgcagtgcccattggatccttctggtcataacacctaagtggagtacatgtcactacctgaactccagaattgataagaacgcatataattggaccccaattcaactagcaatagatgaagcgtgggcccaatatgtgcaaagaggagacctcaggaagacaggacatgacaccctcatccacaaaaaagacttcccggtgaag

SEQ ID NO: 28269 - DNA, 1207 bp, Oryza sativa
tataataccacgtctaaggcatttgttcaggaacaaggggaatgctagaatgatgcgatggcacactgaagagcgtcaacaggacgggatgctgagacacctcgccgatggttcgcagtggcgaaacatcgacagaaaatttaaagactttggaaaggacgcacgaaacatacggtttggtttgagtacgaatggcatgaatccttttagagagatgagcagcggccatagcacttggcccattacgatgtgtatctacaacctcctcccttggctatgcatgaagaggaagtacataatgatgccgattattattcaaggccccaagcaacctagtaacgacatcgatgtgtacctaagaccgctggtcgaagatcttaaactgttgtggaagaaggaaggtgtccccgtgtaggacgaggacaaacaggaggagtttaacctacgagtgctactgttcgtaaccatcaacgattggcctgcacttagcaacccatccggacagtccaacaagggggacaaggcttgcactcactgtatggatgaaacagaaagtacgtatcttaagcactgtaggaaggttgtgtacatggtcatcgtcgattccttgcagcaaaccacccggtacggaagaaaggcaagcacattgaacataaggcggaccaccgtacgaagcctaaacatcgcagcgggaaaacagtgtttgctgtggttaaagatcttaaagtagtgttcggaaaggggcctggaagccagcctatagagagcgaagatggtcacgcggcgatgtggaaaaagaactctatattttgggagttaccctatagggaattcttggacgtccgccacgcaatcgatgtgatgcacctcactaagaacctttgcgtaaaccttcttggcttcctaggtgtatatggaaagtcaaaagatacactggaagcacgtaatgatctgaagcgtatggaacaacgcggcgaccttcacccggaaccaaaggagaaaggaagccattacttgagtccagccagctacactcttagcaaggcagagaaggaaagtatgtttgaatgcttggagagcataaatgtaccgtctggatactccacgaatatcaatcgaataataagcacgaaggagaagaagttcacaaacctaaagtcttatgactgtcacgtgttgatgacacaactgctaccagttgtaataa

SEQ ID NO: 28270 - DNA, 1468 bp, Oryza sativa
atttaataaaatttgctattacgtttatcccttatttactaaaacccaataattttcgagtaattgcattatttttcaactttaatattttatgcaattttttctatttagaaacacatatgtaatggaatttaatatccagtgcgcttatcagtagtgcggttctttaccctaccggagtttaaaagaatttggaaatagcgggaaaatatatttagtcccggttgatgagaacaaccggtaaagatatctttactcccggttgttctcattaactgggactaaagatctagaggtatatatattcccgatgtgcgccctcgtcttctctaccaacacttagaaatttttgccccgatcgatctctctcggcttctccttcgcagccactgcctagggcatccccgcaccgacgccgccgtcgtatctcgacgccgtcttgcgcgtgtcgtcatcgccgcctccgctgccgcctccgaccccgacctcgatgcggccggcaccggcgacaacgtcgccctggcagtgccgacgaagccgcgccacaataccgcggcgacacgacacgccgggacgccacgacgccgccgcggcacggcaccgccgcgccgccccgccgccgccgcacccaaagccgcggccgcgctgccccgccgctgctccgctgccgccccgtgaacgaacgaacgtgaacgagaacgtgaacgtgaacgaacgaacgaacgtgaacgtgaacgaatgaacgaacgtgaacgagaacgtgaacgaacgaaacgtacgtgaacgagaacgtgaacgaacgaacaaacgtgaatgaacgttaacgaacgtgaacgtgaacgaacgtgaacgaacgaacgttaatgaacgtgaacgtgaacgaacgtgaacgtgaacgaacgtgaacttaatgttgtatttgaacatacgtaaacgaacgaacgtgcgtgaacgaactttacttaacgtacgttaacgtggacgcacgtgaacgaacgaacgtaggtgaatgaaacgtgaacttaacgagaacgcgaacgtgaacgatcgtgaacgaaacgtgaacttaatgagaacgcgaacgagaaatacaatatatgttacttcgcgtttctcctaatacatctttttgtatgttgcagaaaagacgttgtcgtcgtcgtccctcaagccggagtggttgctagccctcgaaggaattcgcgcaggcaagtgatgtaaatatatgattgttagatttttaacgcaattaagactattagatttaatatacgacacttagacttagcattataattagagttttaatataatattttttgagttttaatataagattattagatttgtaattagacttagtatataattattgactagctagggtcctaatatacgtcacttagacttagcatagttgactattacagttttaatacaatattatttgagttttcgtatacgatta

SEQ ID NO: 28271 - DNA, 2469 bp, Oryza sativa
tgcagaaatccatttatgggttgaagcaagcatctcggagttggaatattcgttttgacgaagtagtcaaggcgttgggctttgtcaaaaatgaagaagagccttgtgtatacaagaagattagtgggagcgcactggtgtttctaatcctatatgtagatgacatattattgattgggaacgatattcctatgcttgaatccgttaagacatcgttgaaaaatagtttttcaatgaaggacttaggagaagcagcatatattatgggcataaggatctatagagatagatcaaagaggctaattggattaagccagagtacatacattgacaaggtgttgaagaggttcaacatgcaagattctaagaaaggcttcttaccgatgtcacatggcattaatcatggcaagaatcagtgtcctcaaacgactgatgagcgaaacaagatgagtgtgattccatatgcctgggcaatcggatccattatgtatgctatgctatgtacacgtatagatgtttcatatgcacttagtgcaacaagccgataccaatcagatccaggtgagagtcactggatagctgtaaagaatatccttaagtacttgagaagaactaaggatatgttcctagtctatggaggacaggaagagctcgtggtaaatggttacattgacgcaagctttcaaaccgacaaagatgattttagattgcagtctggatttgtgttctgcctgaatggacgcgctgtgagttggaaaagtaagatacagtgtctgattctacaacagaagccgaatacattgccgcttctgaagcagcaaaggtttggataaagaaatttgtttctcaactaggtgtgatgactagtgcttctagccctatgaacctctattgcgataatagtggtgccattgtgcaagccaaggagcatagatcgcatcaaaagtccaaacacattttacggcggtatcacctcattcacgagatagtgggtagaggagatgtgaagatatgcaaaatacatacggatttgaatgttgcagatctattgacaaagccactccctcagcctaaacatgaggcacacactagggcaatgggtataagatacgttcatgattgactctagtgcaagtgggagactgttagtgatatgccctagaggctattatagagatgattgtatcacacactatgtttacatatttatctgactttgttccttgaaatagataaactcattattggttaatgaatatgtgattctttcatgagactctttatgttatatgttgctatttctaaaggatccctgatcaaatatcatatatggaacaaatatgtttagatgatcaacacatgtattaattgatgatcatgtctcatggatcatggtatagagataccaaattaataatgtggacacatgttagtgaacatgttgttgaatagacccaacatgagacactgcaagagccatatgtgttgtgtcatcagtgatctcatttagtgttggtgttgaatccatagacctgatattatcatggttcccaacatgtgtagtagcttacttagggacagctaaacgctactccgtaattgggtagttataaaagtagtttttgggtatgctatgaaacatgtagtgggatatgaataatcaagatgggatttgcccctcctatagagagatatctctgggcccctcgatgttgtagattatggaagtgcatgaccatgccaaaggtgattgagtagtcaatcacaagttatataatctatcaacaggttcaagtgaatgattgagctattagaggatggcacatatctagccttgagcttaatcgatatcgtgaggcaaaggggttcatacaagtatacagtagaggttcagccgatatgatctttatgtatgcccggtaggtcaatacgttctgctacgggccactgttgacgcgtggaccgaaaaggagttttcgggttacagccgagtatacatgaacctaaagggtcgcacacttaatgggccggaataaggggattggatggagatccaatatgagcttaattcggatagggatccgaataggagtcctacgggccatgtaggcccgagtgatggatcctatatattcgtgaggggtgtgaccggcggaggcattgcatcacgtgagaaaccctagccatcacttccctccccgagcaaaaaattagccgcacgcgggtgctagcacatctgcgcgtggcgttccgtccttgtacgtgtggataccggtagaggcgccgctggtttgtggtgctgatcggcgtgggagtacggtgaggagaacgcacgaagagcagaaggtcgagctgatgccgatcgactacttcctttacatcgacgcgcgctacttcgcgagagttccttcgacttctcagcgtcttcttccgctgcgcagcgcgtcgagtggtaacgatctatgatct

SEQ ID NO: 28272 - DNA, 2072 bp, Oryza sativa
  unsure (1)..(2072): unsure at all n locations
ggggttttaggggattttccttcgaaccaaatcatcgcggggttaaccttttaccccaaaaagggcacaaaagtgtaaatgagngtgttgtgtgtaagtgagcccgcttcttcggttggggtggattacgttgttttgtagggagggttgttacaataggccaatgcattttttttattgctggagctgaagcaacgaaacttcgagcccagaccaaagccttatggttttgaccccattccatatttctctcctctactcttggctagtcacggcaacgaaatcacgtcatctctcctctgctagtcgtcgcagtggaccttgctcccacctctctccaacccacaactttactcgagtggctgcccttatcatagcactgctagttctctaatattctgtgaaaaatgttaagcatattacgatgaatatattctgccaagaaaaatatgcatgaatatattacgatgcaaaaatatttatgtttgtaaaactacttttatgatatatgtaagttacttttatcatatatatatatatatatatatatatatatatatatatatatatatatatatatatatatatatatatatatattacttttagatttgactaagttacttcttaaacattcataatgctctaaaatgattatttttattatttattctagtcaattctataatttctggactttaaatttaatttttagatagaccatatttttctccttccaacgaatttacttctaatggtgtaataacttacttccattttatgtttgtcaaggttatggataccatatacctaatagtagttaactaaatctcggcaggacccaccacataccatgtcttatacggaaacaaccttcggatataggaggagttccgcataaggaaggatgaatagagttctacatggaaacgataaggactactcggattgtatccatattggtttctctagttctatttggacaagaggacacctatgggtataaatacaaggccccctaggaagagaggggacactgaacaatagatcaagacacaaaatgaacatacaagccaacatgcgccaagacaagacgctggatatcgacttcagagataagcatggctagtcccctacggtgtctacggatactgtcaggagagacatagcgttgtctttgatctcgtcggatgtggattcgaggaggaaggctaccgactacgagtcagcactttagaccgccagatcgacaacagttagataggctaccccaaatattgtactggtgtgattatggtgaataagagcaacgaccggcttcagccaacaggagtagggttattacctgacaattcaggggtccgaacctgtataaaaatcctcgtccctatctcttttcttacaatctagcatatatcctagtaccaacgatccccatactatgcaaataccggaatcgcgacatcaaacatcgacaatgttaagttgcttttatgatttatgtaaattactttaagactttattgaatttactttcataaatgcatttaattaaaaatcttctctacatttttctcgtgaatttactctacatataatttcttatttcaactcagtcataacttagttgcttctaatctatagagagttacaatttaaataaattacttttaaattaataaaatgtttaaatatattcaacatggatcttgttttatcatatattttatgtagagtacaataatataaatatatcttgaagataatatgtaatttaaaagatataagttattaaagatgttaaaaaaagacatgcaccatatactaaagggagaattatatatggaatggagtggtctactgttaggactaaagcactaccatgcgagttcagatcccctggagttgaggccaacttcaccagataggtttgggtaaatctgaaccnctcggtttgcttctacagcttgcatnctttccccccccccccccttcccttgatttttattatgtccattggaagggaaagtttccaggggtccccccataatattaaaccccttccggctaat

SEQ ID NO: 28273 - DNA, 7915 bp, Oryza sativa
taaacagaatacaaggcacattctttccacaaagaacaaatcaatacgtagtgcaataaactaatcaaacatgcatctctttctccacacacaacatgacttgttagagcaattcagagcgacaacattcaacacatttcatcaggagaaccgtatggtatatccccgaggccacgcactggccatcgtcggcaccgcgtgccactgacaagccatggccgctgcgccaggctacacgcctaaggacgtactccctctgtcccaaaaataacttacctaggatgggtcacatcctatcctagattgagctattttgggacggagggagtagaagcaaaacttagattttttttataataattattaagagatatgatctcagccgtagaagaaaaggagggtctatatttggccaaatccacctggtggggtcgtccacaactccaggagatctgaacccgcactctacctagtcacgtccatataggcaagatgggtaagcagatgggcaagacaaattcggatggaaaaaattccaccttgaaatttttaaaaaaaattcaaaaaatttattaattagccaaaagaatattctatacggggaccgaaaatgcaatccaaaattcaagatgggtaagcagatgggcaagacaaattcggatggaaaaaattccaccttgaaatttttaaaaaaattcaaaaattttattaattagccgaaagaatattctatacggggaccgaaaactgcaatccaaaatatgagccagccaaatcctagtcctttaaggcagaagacaattttccacgggaattagttattggtgaagaaatagagtgcaggtatcttctatgattatgctataatctatatatgaacccctcattgattgagcacgttctaggattggaatttggatttgagggcatttcacacatttcccacatttgtctgttatcgttcaaatcacttcatgtgcatcactaaacatatacagtacgtgcgttctcttatcttttttattaaactagtgaacgtgcacgtgcaaagacacgttatcgtaatatatattattgcaaatagaaacatatcaattattaagtgatagttacaaaataacttatcccttctattaaaaaaatgtaattgtaaaacaatgctgtcaccttagcaatctgcaaccaacaaattaatgtttcatgactattggatacatgtgagatccctagctagatatgtgaactaaaagcatgtaggatttctttcaaaaacaacacaagggaaaagaaatcagatttgatccttatgggctttcaccttgtcaaattcagtgtcctatactctcatttgatcataccagattatataagatttctttcataaacaacacaaggaaaacaaaatcagatttgatccttatgggctttcaccttgttaaattcagtgtcctatacttcaaaaaaaggtatcttgttgctgcctctagcaaatccttatgcacattctagttcttgaaaatgtcacaaatatacataacttatgatttttttttcaaaagggaaaatgtcaatatcaacatttgctttaggcttgtacgatgctattgtctttatgatcatcacgattcctcgtgtttttaggaaaaataaacacaataaaatgatctagatttacctacaaaatatcagcatacgtatagaaaaataaatgtaaaactggatcatggcatcttgcagttacagaacaaattgggcaatttatcaaacttgggaagccacacataagagagcagatttatatgctttttagtgcatgtacaattcatacaacagaagttaaacaccattatatttgccaatatattcttgagaagttaaatacatttcctttctatggaatcccaacttcgcctaagcatctgtagctagaagtgctcatctcgtccctttcctatgtggtcttcctcaaaaagactcaccagagatggttgcagcggtgattaactttctgaacttatgtcatatcttacaaagattcctctccaacaagctcatttttgccacataattcctcatatttgagctccctttggtgcatctgcttgttgccctcctccaaacctatggctagaggtgccaccatcccaagtaggttgcctcctcttgcatgcacagatgaaaaaaaaaggtctattaagaactcgttgaaatgctgaaataatccaaagagcaatacatatatagaaatccatattttaattacattgatagcacacattgtgccactggttaaagaacacagaaagtgagaatatctgaatctgtgatgttgaacctgatcatcacctaattctctgatatttatactaccaattagattccccttgactgaccagtaggatgagacagccttcctgatccaaagcacaccaatatatcgtcatcagtataatccttcagaataaagctcatagaccacaacaagttcaaaaacactacacttgaatgcaactttaggtttatacagacgttagtgatgcagtactttgcagagtcaactgaatgcaatcaaaagaggaagttacaacttgtaaatataaaggggtggctgttgatgcgaaaaaacacacactggcctgggagatctgcttaactccagtgcatgtcctaaatcttgctcttgggttcaaaggcgtgccagttgatttgatcttgcaatcaacaagaaggaaaaacaagaaagacgaggttaaatccataaacgataaccgatcggctaagggccgatggcatatcgttaatcattgaaccgatgttactggcattagatcgacaatgaagaataaagcaatataaagttaaatctactcgattggctatagatatcaacgatatataatcctcttctcgagatatatttaagccaagtgattgggatagatcgaacagtaagtcgagacaatataaatcacttatgcttaaaggtactttaagatgaagattatatatacgttcatagcatagccgatcaaatagatctaacatgtatcgactaatactctgatatcactctttattaagatattaaaacagacaaaatatatcaaacgacaagtctaatatactttaatgcaataagatcttaatataaaggacagatttagcatatcaagtgaacatgtaagcattaaaggtaactaaatcaggtaagatcggctgaaaccccgatactatatctattgatgatcataagacaagctagatattgcaattatgaatattacttaatagatcaaactcaaccgatgcagcattaagcataaaaataaatacaagatctaaacaggttgatgaaaacctctgaaagatggtagatatgctatataatctagattaacaacgatatctaactctatcagctgccttccaatgatagatgttggccggtttagggttagattatgatattaataaatattatgaagcatatatgataactcaatgatttacataaccaagattagagtgtcataaagatgtaagcactaatcccgagaacacaagtcgtcatgacaagttttacctcttgttgaagatcgaaattgatgcagctcaacccaaaagcaagaactcgtcgaaacaatgaaaatagaaaaaggtggcgatgcgccgaaagtgttattaaactgtcgttagatgtttacatgggatcgggttatatttatacccgagatacatgactggtccttgccgaacacgactcttatctctaacaaactctaagatacgaacaagtcttcacgatagactcttgccgaagcatatgtctaaataaactttttaaaatatcctaattaatagatacaattgtctatccgtgtgcttatctcaatcatggtaatccttgcacagcacgttgatcaatctcggagacgattatataaccaccttaacgagatcagctacatcggctgtcttctgtctgatttagccgatgcagtcttcagccaatgccctcgtagccgatgcgtactctgtttccagaagacaattccctatcaaatccgcttcgatcccgatgccgaatctagttcatggcttaccaaatttgatcgttaacagtggcctggacattgaactgttattttttttcactcacagatctcctcgctgccttttctctggtacagaacaaaaaacaaatttcctcactgggggattccatcgagcacctactacagaacaaacatgatacctaacagagtttatatccacaatttatggaaacaaacatggtacctatcctagttcctggacaggtttgtgtgactatagaagcattagtctcttcacgggttacattttcttgaccttgagcagcctttccatgagtgggaattacaaatagagagcatgtttaagaaaatggatgaagtattatacttgcttgtggtgtcattcgagggcaccagcctcactggggcatccggactggcaacggcggcgatgggtgtagcgacctgggggcatggaagtgaagtgaggaatcatgtgcatatatgtaaatcaaaaacaatatcatttcaatgacaatgtgagaataaaaataaaataaatagaaaatctagattatcacaagtggagcatcacaggtggtatgtaaaataaaaatataattctgttgtttcattcatacgaaaatttcacatgtccatttgccatgatcaataaattcagagagaagtatttcctctcataacagcacgacaatgacacttcgatagaaaaaagaaattcttgtgaaaaaatccacgtttgttttcattgttccattttcttttgaataaccaaacaccatattaatttgcatttaagaaattaacataaaagcctgagtatggtctgatataagatgctttctttaatgtgtaatactcataatataaagcttatgtcaatttaagaactatacattaatgcaagaagaattgttggtatgtgcagacaaataaaggttagaatgtactaatctaagaaaaggaaattaacatagcactctttgaaatttgaaacaatagggatatgtctcaatttcttagattatacatagttggttagatgttgctctgaagaaaaataagcatatttaatcataaataaacataatagaccatgcagttcttattcaatagaacatatgcatcatgggttaatcccatctctgtagaagcaggtcatcaaggcatataaatacgaattaacattcattgacaaacgtaactaaactctgattttgcttggtgcctatgctttcttaccctgcaatgccatgatgtccctcttatctaccttgacaacgacaaaatccatttgttactccataaacaaaaataataaacaagatcatgataaaaaggaagatgatcaccaataaaccatcattgtaggcaatacatatgtcaattgtcaagtcagtgtgtagtaccatcacagttttagtcaattagcataacttccagtaaacagatgaacagaaattgtgcgacagcaaggtagtagtaaggtggctgctgctcctcgctggagtagccctgataccccgaaggagaatggtttggcaacaagaatctgaatcaatcagggagtcaagcaaaaacctgggtagcctcgtcatgggtaggatagccaccgccaggatcaccattgtatataaagatcagaaagttacctctatattggcctttgttagtgtcctcttctctcgaaagtaatgaaaaaatacataaagattttgttcatttaaattaactaataaaatgtgcattcaagggaaaacctattttctaaatatcatgccagcacgcgcatctacattcaaaggaaagcaacctaagccattgatcctgttcacttgtaaaatcttgacaaatagatattttaaatgaccatcagaatcatgacaagagctagctatatcgtttgaagatatattattttcgtaccaactatatcattttatgaattgggtctggatttttgaatttatcctagtgatcgaattgaaattttctgttttttgtgtgcatttacattcttaaattgattgttcagggtactgatttgttgctacttgattagcccgcaaatcttattgttttggataccatcaagtggctagaggctggagagctaccttaagacacaagaagtgtcgataatcatcatttctcacaacagggcttttctgaatttgtgtgctctgtgatgactgatgaagcaatctgaaattctgaatgtgttcgctgtctgtactcagaaattcaaagaatgtgtattgagtttgtagtgtatttgtgcatttttgccaaaatctgagaatgtctacaactggttcattgatcaaaacgtgagcataggtatctctgattttttttgtcacaacctgaccatgtaattactgccatgattctgcaaaatgtgcaaatacattattcatcactaatttaatatagtcctaatggctgtgacttatctaaactcatttttttcagtgattgattctatatatggactgcacatcatagccataggtacggcaccactggtataatactccctccgtttcaccataagtcattctagcatttcccacattcatattgatggtaaagaatatagacatatacatctatttagatttattagcattaatatgaatgtgggaaatgctagaatgacttaaattgtgaaatggagggagtagaacataaggaggcgattggaggaaagacttaaaagaacaccatatatagcaggatgaacaacaggaagatctttagaagttatcaacgaaacatagccataggttcgctggaatcaaagaatttttttttacctccacgagacgaccagttagctaggataccgccaccttctccttctcttgatcctcattgacttgcataaagtatgtacactagtaacatcgctactcatttctatttctattttctccagttactctctgcccctatctgtagctttcccatcaacattacaaatgtgaaatgtgatgccctgtacatggccaaggtgaattatactctcagaaatctttggtgcctagctaaagaacaaactccagttttcagtttttcaatcaattcccctcccccgtcccaccccctctctctctctgtgttaaaataaaattcattgccgtttctgatcaaatacaaaagaaaggacaaataagaagcggaaggagcaaatcaagaagacgatggacgtgacctggtggcggtgaatcggcgacggcgctagggatggatcggcacggggcagatggggcgacggtgaatgctcgacgacgagcttagggtcggcggcggcgccaatctggcgaggctggaggtcggatatggccgaactggtggaagcgtggacgacaaatgacgcggggcaagtatggcggattggagcggccatgctgcggggcgaagtcggtggcggaggggacaggggcgccgggcgcaacgatgtgcgagggaacagaggaggagcgacggggctgcagcggcttgtagcggccgcaccatggggcgaagtcagcggtggagggggacggggggcgcagcgacgtgcggaggatggcatgcgacggcggcggggttacaaattgcgtgcgtgcttttctgccagtgaaccccgcagcggcttcggcgggcgcgcgcccggaagtcggcgcggaaccccgtgcgtgcaaagaggcggcgaggtaaggcgcgcgactctccaagaagcggcgagctgctttcgcatgaagccgtctgcggcgggcttgccagccgagaaacttttttcgtttttttttcgcttggacgaaccctaacccgctggtaaaccttgtagaacg

SEQ ID NO: 28274 - DNA, 773 bp, Oryza sativa
ctctcaaaaggcaatgtagaaggtttctcctgtttattatttcaagaactcatatcattattctctgggattggtgattgctttctctcagttttatcatttccttggttgagtgacaactttgtacttcccctacagttatccatctccaaccaatcctacaataaagaaaatgtcagtatgttgataaaatattatgtaccctagaaggaaaaaggtgccatccaaacattaccttgggcatcaatttagctgatttgtcagatgtagcatcaacagtattgctgtcttttgcggcgaaggtaaatttagcagcgcagttggagttattaggtaaagactccttaactcgtgacgaagatggtttcaaaagactgccctgtgctgatacttcagttttctgagaaataggatcctcaacatctaagatgtccacatgcttttgccttgttgctaatgtgccttccttctgtgaaggaattatcgtatcaagctgcttcaatatctttgcagccatttgaattgactgtgctggtgcctgaccaaaactgctatcatttgctctgtcatgtacaccacttcgagtaatatcaccaactttatccagacacctacgtttttgactttgtactgagtgttccaaaccttcatcaagtttgctagcatgactaccactatatccacggtggcctgaccgagtttgcaacagtggtgacactctgttgtacctctgatgcattttgcgtatgggaccaacagaggcactctcgtta

SEQ ID NO: 28275 - DNA, 1360 bp, Oryza sativa
cacccggtacggaagaaaggcaagcacattgaacataaggcggaccaccgtacgaagcctaaacatcgcagcgggaaaacagtgtttgctgtggttaaagatcttaaagtagtgttcggaaaggggcctggaagccagcctatagagagcgaagatggtcacgcggcgatgtggaaaaagaactctatattttgggagttaccctatagggaattcttggacgtccgccacgcaatcgatgtgatgcacctcactaagaacctttgcgtaaaccttcttggcttcctaggtgtatatggaaagtcaaaagatacactggaagcacgtaatgatctgaagcgtatggaacaacgcggcgaccttcacccggaaccaaaggagaaaggaagccattacttgagtccagccagctacactcttagcaaggcagagaaggaaagtatgtttgaatgcttggagagcataaatgtaccgtctggatactccacgaatatcaatcgaataataagcacgaaggagaagaagttcacaaacctaaagtcttatgactgtcacgtgttgatgacacaactgctaccagttgtaataaggggtatcctttccagacaatgttcgggcaacaataacaaagctatgtgcattcatgaacgcaatttcgcagaaggtcaccgatccggatagattagaagcccttctgaatgatgtggagttttgagttgatatttccaccttcatttttcaatataatgacgcatctgctttgtcaccttgtcaaagagatcagtattctcgggcctgtgtacctacacaacatgttttctttcgagaggtacatgggcgttctgaagaagtatgttcgtaaccatgctcgtccagaggcaagcattgccaaggggtatggaacagaggaggtcatcgaatttcgcgtagaatttattgaagaccttcgcccaatcggggtacctgaatcacgccatgaagggagactacggggaaagggaactcttggaaggaaagcaataatgacgatagacaacaatttattccgtaaagcccatttcacgtttctgcaacaatcttcattggtagctccttacatcaaggagcacttggctctagttcacgccagaaaacattggtaagtcccatgcatggattacacggcatcacattgatactttccgcgcgtggctatgacaacattttatgggggacgagacgatcaaaccacaactggcctttctggtgagggggaccatttggtcaatcgcgacattttcagggtattagaacaagggggcaccatactatacgagaggcccagaaatggagaggaccaaccaaaacagggttgttggat

SEQ ID NO: 28276 - DNA, 657 bp, Oryza sativa
attgccactgccttgcagaccaaatcatctccacaagagagctcgatgtacgtgcaaataaattcaaaatttcattacgtatcgatttgttgtttaattactaattaatttcacacattcatatagtttattcgtatgagggataacctgatcacacacaaggaatttatcacggtggttcaagaacaactcatgggattcatcaacgaacaaatccttgatgccaagggtgaattctactacgacggaaatacaattcataggtccttagcttctgagatagcgactactactacgtcgaaatagtagctagctaggacatcataatggattgtaattagtacatgtctatttttctatatgcatgtgtacacattttctttaatgtaaatatatattttgggtatatatatatatatatatatatatatatatatgtgtgtgtgtgtgtgtgtgtgttgtgtatgtatatatacacacatatgcatttgcataacatatatatatataaatacatatatattaatcatgtatatatgtatcgaaacatatatatgcatggtttatatatatataaacccatgcagtacagggtcatgcaaaaaaaaaaggtcaggtcgatctaaagatcgaacctttagtcccggtattttcccc

SEQ ID NO: 28277 - DNA, 737 bp, Oryza sativa
  unsure (1)..(737): unsure at all n locations
aacgacaactataaacgattcctagttgttaaacaacataatggttaaagaagccttgccgagcatatgtgctaccgtgggacaatttatacttgccaacagaaggaccagatttaatactgtaaagcggtcaattagcgcgacacgattgatcttgatctgcgcactgattaggtacaccaggatcatcactgtaagaaatccgttgggcttggggacataaatcctagcnnnnnacancntgncncnnnaaanaattatgagcttggtgacttcgggttagcaaggcttgttgagcatgggggagagccacaaacaacacaagttgtcgcagggacccctggatacattgacccagaattcatcaacaaccgctggcctcgcaccgaattggatgtgtacagcttcggtattgtcctcttagagatagcttgtggcaagcggccggcatcgaggcagctgccaaatggagcttcatcactgctagcctgggtgcgtgatttgtatgaccagggcaagattcttgacgcagcagatcagagactgaacggcgagttcaatcatcagcaaatggagcgtgtgatcgtcatgggtctctgctgttcacatcaagacccgatccagcgaccgtctatcgtgcaagctatggatgttctgtgatctgcatacacagagttgccggtacctcccgcagcacatgatacaggacacatgcggtccatgcaagaacaagcttt

SEQ ID NO: 28278 - DNA, 824 bp, Oryza sativa
atattttgggagttaccctatagggaattcttggacgtccgccacgcaatcgatgtgatgcacctcactaagaacctttgcgtaaaccttcttggcttcctaggtgtatatggaaagtcaaaagatacactggaagcacgtaatgatctgaagcgtatggaacaacgcggcgaccttcacccggaaccaaaggagaaaggaagccattacttgagtccagccagctacactcttagcaaggcagagaaggaaagtatgtttgaatgcttggagagcataaatgtaccgtctggatactccacgaatatcaatcgaataataagcacgaaggagaagaagttcacaaacctaaagtcttatgactgtcacgtgttgatgacacaactgctaccagttgtaataaggggtatccttccagacaatgtccgggcaacaataacaaagctatgtgcattcatgaacgcaatttcgcagaaggtcaccgatccggatagattagaagcccttctgaatgatgtggagttttgagttgatatttccaccttcatttttcaatataatgacgcatctgctttgtcaccttgtcaaagagatcagtattctcgggcctgtgtacctacacaacatgtttcctttcgagaggtacatgggcgttctgaagaagtatgttcgtaaccatgctcgtccagaggcaagcatcgccaaggggtatggaacagaggaggtcatcgaatttcgcgtagaatttattgaagaccttcgcccaatcggggtacctgaatcacgccatgaagggagactacggggaaagggaactctcggaa

SEQ ID NO: 28279 - DNA, 711 bp, Oryza sativa
acatgcatatagaaaaatagacatgtactaattacaatccattatgatgtcctagctagctactatttcgacgtagtagtagtcgctatctcagaagctaaggacctatgaattgtatttccgtcgtagtagaattcacccttggcatcaaggatttgttcgttgatgaatcccatgagttgttcttgaaccaccgtgataaattccttgtgtgtgatcaggttatccctcatacgaataaactatatgaatgtgtgaaattaattagtaattaaacaacaaatcgatacgtaatgaaattttgaatttatttgcacgtacatcgagctctcttgtggtgatgatttggtctgcaaggcagtggcaatactcgcacacgtagtagccgcacaagttagttccctacttttgctttgcgcactataaataaatgacaaatggcgagagatctaattaatatacacttgtatgtatttgaattggagattcaatataaatgtagagcatgtgtactcacaggaaaattgaacttccgcctaagtctttctctcatttttccgcggaccaaatgatggaaccgataccaagccctacatggagtttaaagctatgattcgtagtagcaattaattataacaagattcttaattaacataggaatttatgacagtacctgtttataaagtcgaaaaccctgcaaacggagactct

SEQ ID NO: 28280 - DNA, 719 bp, Oryza sativa
agcaattattaacccttattatgcattggtgatgatgaaactctgaggtttagatttaaggaaaaatttcctaggtttatgttaaaacttgcttaaataaatatttgatccaattaactcggttttgcaggtgaaatatgataaatatttgaataattgtgaaatatgtgaatgaatgtaaaatatgagatgcctgtgaatgtgtggttgtgtaaaatatgttaatgtgtgtgtatgtgaatgcatatatatatgaatgggtaatgctggggagctggggatattggatatctgtgtttgtttctgttatttatgcagcgggcatggctagcaaaggcctgaggctagccaaaaaacaaatttttttgtgaattatagccatttgtgacgggccataactaaatgcccgattgagatgaggtgtcacgcccagaaattcccgaatagaattccaagcagaatgtgcattaaaacccccgtccaggaccggtcggggtacacaaacgacaaatttgacatacagatccacgtcttacaaacattataaaagtattacataaatgcagcggaaaataaaaagataactggagctaagccttgacttgcaccgcagcgggaacaccactccacaagtatcctcgacggcacggacgaagcctactcctcggagaagccaccatctgacgcatactcaaactctggggtttggggaaaatata

SEQ ID NO: 28281 - DNA, 2988 bp, Oryza sativa
atgtataccacaaagacaacatcgaaccggatgatctagcacggcgtgcgtccagacgagagccacagccaattgaacctggcacctttcctgaccaggccatcagtgaaagaggcaagcggcgaagatagcccggtcacccctaacatcagctcgggggctacagaggcagagcgcgccgttgccgatatcgagagcacagatgactggcacaccccactcattaaattcataggcagtgaagagttgcccgaggacgacacagaagccaagaaaatatcccgtaaagcaaaagtctactgtatgatcggcaacgatctatacaagaaggcaccaaacggggtacttctaaaatgcgtctcgtccgacgacgacagacacctcctccttgacatacatgaaggaatccgtggatcacatgccgccggtcggacattagtcggaaaagcttttcgacaagggttcttctggccaaccgcccttaaagacgcctgcgacatgattcagcggtgtgaagcctatcaattctacagtaaacacacaaggctaccagcgcaagcacttcagactatccctctcacttggccgttctcgtgctgggggctagatattctcgggctattcccacgaggatagggcggctgcaggttcctattcgtggcgatcgacaaattcactaagtggattgaagcgacacccacgagggaaatcaaggccgacaacgccatcaaattcatcaaagggatattctgcagattcggattgccccaccgtatcataacggacaacggctcccagttcatcagtgccgattttcaggattactgcatcaggctgggagtcaagatctgcttcgccgacgatgaggaggaattttgaacggagggtaatttggtcaaatttatggttgtaatggtgtggaatcaatggtgcgttgatggcgatggcatttctggaagaaaaagacttgtacgatggcattttatggattttctctaatttaaaattttaagtaatactctctccgtcccaaaatataagcattgttggacttcgacaatgtcttcgagatgctacattgatcaacaatatctataaaagtaagatgttttaaataaaaaaagttacacattatgataatttgcttaataacaaatctagtaacatcaaatttacatgattgatctgtttttgttcgtttgctattaatagtcaaaatttaaaagtttgatttgccactattctaagaatgcttatattgggatggatggagaattttttttcttgtatactaaggatgtatgtgaggtgatatttataagtggacgtgccgattggatgggctaggctgcgttattctagagcacagattgttaaaaattgtaaagtaaaattacttgaatcacgtcgtcttaaatttatgagaaaaaaaatgctgcaacaatagatgttgactttcgcccagggatcaaactgccggggagcaacgaactacctttggcgtaaactcacgcgagcacacaacacacgcgatggttcagatgaacacagggaacacaagcaagctttgcggcaacaaatgcccttttctctgtttatctgtgactcacacacttaactgaaaatggatcagagcacggcttaaatagccttacatgcacgaactgttgccggtcttcatgcgcacgcacgcactacctgaatacatgagccactaactccatgcattacgagacccactcgtccaactaaccatgcatgcaactaactatctgctaacttgccgcactcaactaactacacaagctaattactcggtcaactaatcaccaagtacatggctgtgacagatctaatctcctatatgcatgcatcatatatgcaatactccactacgtgcatgacacacatacacgactaactactgcagatatttaaaatatgtaagtcaggattaatgctaacaatagagctggttcatatgaaactatcatttatactacatgtgtagatggataatagatagatagatagcacaaaactatgaacaaaatagatgtgtgcctatcagcaatcttgttgacaaaacaatctaaacaggcgcatgtaaacataactaatattgctattcaaaagagagaattcgttatccttcagcaagtagataaactgaatccttggaagtaaaatacgtacttcgggtgacagtatgcacagaatgatcctcaactggcaggtcggcataagcctgttcttgcatggaccggatgtgtcctgtatcatgtgctgcggaaggtaccggcaactctgcgtctgcagatcacagaacatccatagcttgcacgatagacggtcgctggatcgggtcttgatgtgaacagcagagacccatgacgatcacacgctccatttgctgctgattgaactcgccgttcagtctctgatctgctgcgtcaagaatcttgccctggtcatacaaatcacgcacccaggctagcagtgatgaagctccatttggcagctgcctcgatgccggccgcttgccacaagctatctctaagaggacaataccgaagctgtacacatccaattcggtgcgaggccagcggttgttgatgaattctgggtcaatgtatccaggggtccctgcgacaacttgtgttgtttgtggctctcccccatgctcaacaagccttgctaacccgaagtcaccaagcttagcattgtgtgacacatcaagcattacatttgcaggcttgatgtctccatgcacaatgcatttctcgcagtcatggtggaggtagagcaaagcagagcccagatcaagtacaatcttgtcagttgaattaaacaggttagcaaatttaatttggtacctttgttgccaagttaaaattttctcagggtcgtagagatgcttgtcaaggcttccttgagccataagttcataaacgagaaggagctgtttcttgctgtcgctccagccca

SEQ ID NO: 28282 - DNA, 2628 bp, Oryza sativa
aatgagcataccatgtttataccttctccattggccgttgaaatggtgaatgtggatcacgatctgcttgcaagacatgttacgtgacgttgaggacccagcccagaatgagagagatggaatgaagttcagcaggttggtaagtgattccgagacgtctctgtatgctggatgcaaagcaaaacacactaagttgtcagttaccttggacctaatgaagctgaaggcaagtagcggatggacagacaagagtttcacagaacttttaggaattttgaaggctatgcttcctattgagaacacattgcccgagacgacatacgaagcaaagcaggttctgtgtccactagggttagaggtccgtagaattcacgcttgtcccaacaactgcatattgtaccacaaggaatatacggacttggatgcttgtcctgtctgcaaggcttctcgatacaagcgaaagaaaagtgctgacgaaagaaataagtcaaagaggggtggtccagcaaaggttgtgtggtatctacctatcattgatcgtttcaagagaatctttgccaacccgaacgaagcgaagttagtacgttggcacgccacggagagaaggaatgacggtatgcttagacacccagcggattcgattgaatggaggaatatcgatcgaaaacacaaagactttgatgccgaccctagaaacatgaggatatgtctatgtacggatggtatgaatccttttggtgacatgagtagtactcacagcacttggccagttcttattgcgaactataacctcccgccatggttatgctttaaacggaaatatattatgttgtgcttgttaatccaaggtccaaggcaactcggcaatggtatcgatgtattcctggagcctgttatcgacgatctggagattctttggaaagaaggtgtggaaacttgggatgcatatggtcaggagaacttcaagctaagagttctattgttctgcacaattaatgactaccctgcactcggtaatctttccggacaaactataaaaggaaagaaggcatgctccgattgcaaggaatatacacaaagccggtggctgaagaaatcacgaaagatggtatacatgggtcaccggaggtggctcccgctacgtcacgcatttagaagaaagaataaaatttttaatggtaagagagaacttcagcctgctcctaaagatttgtccggagatgaggtccacaatatggtcaaggacataagcaatgagtttggtaagaaaagaaaacgtagcaagacaaaggagaagggtatgtggaagaaaaaatccatattttggcggctaccttactggaaagatcttgatatccatcattgcattgatctcatgcatgtagaaaagaatgtgtgtgagagtttggttggcctgatgttgaatattcccgggaagacaaaggatgggttgaacgcgcgccttgatctacaggacatgaatattcgcagtgaactccagcccatacgagatgcagagacaggtaaagtgtacctccttccagcctgccacacactgttgaaggatgagaagatcgcaatgttatcatgcttgaaggatattaaagttccatcgggctattcagcgaggataagtaagtatgttaaattggacgatctaaaacttgttggaatgaagtctcacgattgccatgtgctaatcacacaaatcttgccagttgctatcagaggcattctagcaccgaaagtgcgtcacacgatccaacgtctgtgcgccttcttcaatgcaattggacagaaggttatagatccagaagatctagatgggctgcagaccgatattgtgaatacgctctgtcacctggagatgtttttcccactgtctttctttgatataatggttcatctccctgttgatatggtgaagcaaacaaaactatgtgacccggcttttctaagggaaatgtggccgtttgaaaggtacatgggagttctgaagtcgtacgtttgtaacagagctaaacccgaggggagcatcattgaaggttacataaccgaggaggctattgagttctgtgtcaattacatgtccgatgctgatcctatcggagttcctgcgtctcgtcacgagggaaggttgtcacgtgttggcacaattggaaggaaaagaatcaggcctgatcaagcatcgtacgcgtaggctcattacgctgtgctccaacatatggcagaagttggcccatactttgaggagcacttagcgaaaatctgagatgagaacttggggcgatctgatgcatggattaacagagaacataattctcggttcaacgaatggttcaagaatcgtgtgataatgtccacagatgtcccaaatgagacagtacagttgttggggatgggaccgtcttggaccgtagacacatggcaaggatacgatataaatggatattttacaccgtcaaacaagatgacaaaagcacagtgcaaaacaacggcgtccgtatagatgcgttccaggatcaagttgggtcaaacacatactacggccgcattgaggagatcttggagcttaactacgttaagttcaaggtttcgttggttcggttccaattggtgaaattaaat

SEQ ID NO: 28283 - DNA, 1452 bp, Oryza sativa
tgaaaaccaccatcttacagcattctacttgcaagctacttgcacatatactaattaggtgagattgagaagataagtatatctcagctttgctgccaataaatatcgtcggctgcatgccccattacactggacaccactccggctagtcaattaaccatcctgcagctgcaggcacaccaaacacacgcatgcacaataatccacacaagatggccaccggcgtagcctcgatctcctacggctgccgtcgccgtcgccgccatggcctgcgtcgtgctggttgtcctctcctcctccgccgtcgcgccggcggcggcgaagatgttctgctggcagctgcgacgagacatgcgcccattcgtgcgagtacaccgacaccgtcgccacggcgtgcgccccgcagtgcgacggcggctgctcgcctgaggcttgccagaactgcgtgctggcgatgagccaaggatgcttgatcatctgcggcgacgactgccgcacacactgcacttaattaattagcgtacgtaaagatcgagtaaaccatgattgtctccggtttccattatttttaacgttgtctagatcagcgcgtactacgtgtgcatgtaagtcaaattttatcaagtatcgttcaggacttgctgtaataaatgggtgtattttcattgttattgagaaaatgcaataggaggtagcacaacttgcaatgtctttggacttggaagacactattgctacctgttggaaatttggtcataattcaatatattttaatccaaaatattaagacaataaacataacatttgcaatttgaatagatctagtgatagtgctagatatgtacaacattagcatgtttaatataaaataagcatcagaatagataaggcaacgtaacaacattgcgactgatagtagtaggaaatgaagaacgaatggtaatagtaaatcgttatatccccgagaacggtcctccgttggagtttgaagcagtattgcctccgttggtgttgacgggagcctccttctccttgtctccaatgttactgttgtcgccggtgttcgacatgttggcgcagacgatgcagaggaagacgaacaaaagcagtcgcgtgtagcgctccccaaaaacttcgcctgtctacccatgcaggttctcaagcggacggagtttcggaggcacctactcgttccgatcacccgtgtgcgcgggatgaacagaaccggggaaacagagagatagcgcaggaactgaaggagagtatcacgtaggaacagcagcaggaggaagattcgatctttgagagcctctgccttgcgttatatatagagagatctccattaccacacaaataaatctctcatttgttgtgaaggttaccacacattgaatctattatttgttgtggagattacaacaaataaatctctcatttgttgtggatgttaca

SEQ ID NO: 28284 - DNA, 1629 bp, Oryza sativa
ttaaattaaacaatttcttcgaatgatttattttatgaatttagagtaagggaggggtacttcagggcgtgacacttgctggccttggaactcttcaaattcttctcctgcgaaaacggactctccggaaacgtcggaatctaaacagaaaggagcaaaacaccaaaacagcacattaacaagcatgaacagtacatgtagatatttttaacatgtagatctcaattttagaaaaatttagagacttgaaccaactaaatccgagctaagatgaattagttatgaattttcaaagattaaatcggtttaaaacacttatatagattttaattgaattatgacgcaataatgaattatttttgaaaaggaaaagggaattattgcgtcattggctagggttcgcggtgaaccgggtgcacggcggcggttcacaagattgggcggccgagatcgatcctaactacaacggacggccaagatcgatcggatccaccgcggctcacggatggacgacgacgatgacgtcagcgacgacgtcaccaccggcggcatctcgggcgcgcatgctcgccggcgaattacggcgcggcggagcaaacggatgacacctacgcgtagcgggcgacgcggcgaactcaccggtgaccaaaacgacggcggacgatgaccggacgatgtcggcgacgaggaaaaggcggcggcactcttcggcttgacgacggcgacggtgctccggtggttgacagcgacggtgaaggggcggacgaggacggcgacgcgacggcgaccacgatggcgacctccccgagcgacggcgacgactggagcgacagcggcgcacggctggagcggcggcgacgacggcggcgcgaggtctcacggggctagggcgctacggacgactagagacgaaggcaagggtggcgacgggtagcggtaggcttgggggtccttatataggggttggaaggcggcggcgaaggctcacggcgaccggtgacgcgaaggaaagtctagggttcggaggagagagatcgatccgaatcgaactcgaatccacggatttccaaacaaaattagccgacgattccataagagaaaagatagaagggatcccggggatcatttcccctctattaatttcaccggaaacggaaaggggcggctggatttggaaggagacgacggcggcacggcgctagggttcgggcggcggccggccggaggtagacgacaggcctgacaggtgggccccacctgtcaaccgcagcgagcgcacgcgtggctcggcttgacttgggccgacttgggccgaggaggagagagagagagggttttgggccgactttcggcccaaagccaaagagacttttaaaaaacctttttcaatttaaattattcatgaaatgcaattctatttattaaaaatacttccttggctcaaataaatcccagaaaactctaggaactatagaatcaagcaaagttttaataaaattttatctggccccattttatattggatttaataaattattagggaaccttctctcctaggtttttaaattaaatctaaatatttccatttaacacaccaattctatatattggggattttaaggtgtgaca

SEQ ID NO: 28285 - DNA, 8859 bp, Oryza sativa
  unsure (1)..(8859): unsure at all n locations
ttttgaagcagggcgagactactttagctaggagcctcttttccttctgcccagctccccgaaaacaannnnnnnnnnnnnnnnnnnnnnnnnnnnnnnnnnnnnnnnnnnnnnnnnnnnnnnnnnnnagattttgactatgattgggccgaacagtggtagaacctggtgaaccgggcctactactaaacattgattctctctcctaaccactcttaaatatgttaaatacactccatcgatcaaaaactacaagcaagggaatcagctcttattgccgtaaaggaaaaataacccctttcctttatatatagtccgccaagggccttcgccacctattccttaattacgtagtgggaaaatttctctatgtcaattcaaaacaaaacaaacggacgactgaatctaaagtctactagagagaagattggttcgaacgtcaactactgattgctctatccaaccagcacataccgtttgctatgatattgttttgcggatttgctcatattgttttcttgcccgggcattgctgcggaagagtgaaatgaaaaactcttcttgaagaagaggactcttccgcttgatcttttgatacgatgagggaacaggttttatgcgttctttgagcaaatggggaaacaaactgttgatacagaaatctttaactgaactgccgaaggcacaagagagactatagccaggaaggataagcaaaggaatccagattcaatcgattgtttgaagccaaggagcaagaaaacggatgcgcgtgctaacgcttttgcgctagtgcgctcaatccgttgcttgttctcgagctagtccatctttctatacgaatttcttgaaagaatacttctcttatgatctactacgatagtgtcaagcggaggtggagagcacaagaaaacagaaattgctacgttaagcaagtcacttcttcggctgggcatcaacagacaatcaagcaatattggattcaggacgccatatcggaatcaggaaatagccacttaagtcaatagccactttagtcagtccatcagtctttccatattatatttccagtcaagtcagtcaacacttctacaatccagtctcttaacactagctttacttgggaaagtagtgaaagtcctgctgctggataaagatactggaaaaagtctcaagttccactaggcgagatgaaaaagttcagaactgggatgccaaaaagagccgatttacaagcaaaatgaaaaaactaccaaattgccccatgctggctatcaagttttcaaaaatggagtagattttggagccatttacgagggagaagcaattttctttacttttgcacatggttgggacaaatgcttttcaaaaatgacccttgaaaatgccactttccctaaggaatgcaaaatagtaacttttcctactaggtcagatagaatggtgtttttctatactaaaatgagtcaaattccgataaaaaagcgaaaaaagttcttctcacctagtgcaccttggtactttcctgttccgcccttagaaaccgggtaagtaatctcatatgtttgaactgagagagcttcattttccaatagtgccaggacctgtgttccatatccattatcttttcattgtccttcttgtcgaatagaaagcaaatagatgttctgcgataaagcgtatgtcctgtatttctgcctttcattcatcttaccatacttcttatttcctctgactgtaacctgaaccagccagagttcaaattccgatcggaaaagtgaaacatatcttccttagtgaagtagagcgtttcaaaaattccgtgcatcgccggctctcaccagtcccgataatttctataatacatagtagataatttgtggtggtagtttgttcaataataactgcccgaaacgtttgtgttggtgtcaatttgtcatggtctcatggagaatgaatcggtttggactctaacacgcgtgtttttcagcgttaatcaagtcctaacgttttacgatttatcttgtaccaagttcgtagcaaacggatcagcgttttacacggagaagtattacgcacgtcgtccgcgtgacagcgtgatagctcagggtaccttaacttggaaggcctgcaaagatgatcgacaatttcgaggagaattgacaaacgaactagtgacctcatcttgagctgttatctcaagttctcaacgcatgaaaattttgttggaacgaattcaatgcgtggtttatgctggtaaactgaaattgaaggctatcatcaagtcgcagaacggcctgtcagttactaacaacaacagggcatgttttcagcttcagccacagatcattggaatttctcatagacagaatagcattactcactctggacgtttcaatttctattgcagctcgaaacggatgggaagaacaaccattgccaacctttgctttcctgctttttgtagccaacatgacgaatagctactgcaaaacaaacggatggcctgccatttaagaaccagggcgttattgaccagacaaagtttgtcattgtaatatttctgatttggtggaccatcaaagtgtccctacagcattagctatgagtagcattacaattgcaatggaaggttatctagcttattgcctttttcttactacagaaaagggactacatcagtgtgcttaatggagcacttgacatcaacttgaactctgaagtggtgtccaaatggatacctcctacataattcattccatattaactcaaaagaattattcaggtaggctggactcatcacttatcaatatacactactcgtctactccctctgtttaatattataagtcgttttgatttttttaaaaaaattaactaagttaagaagttttactaggtttatagaaaaatacagtaacatttataacattaaattagttttattaaatctaccattaaatatattttaatagcttctttgttttatgttgaaaaattattatattttttttataaaatttggccaaagctaaataaggttgacttaaaaaaaaagtcaaaacggcttatagtatgaaacgaatgttgtatatatcaatgtatctggtgtcgggtgccccatatccaatcaaacataaataagagagatctctgaatgacaacatacggagatacggacaagcccttatctgacaatgatgcaaagcggcatagacaactgcctgatctgaagacatcactagagagaagacaagttcactgaaatgcatcaatgcgagaagtttcagagaggtgaacaatgccactactgttggtgtcattatcatgcaacataagcaagtgagactggacttcactgttgcgtgcacacaagggacattacacaaatgcatatctataaaaaaaaagaaatgcagattatgcagccctacgtaattaaactatctaaaagcaagtagaaagtatgtgtttatgatctgtcattaactcttcctttaatctagccttgctagttgggtgagattaggggagcagaacatagaggcgacaaggagtgtttcactgacatgcagggcctggagcatgaagccgacaggtttagaccacattttagttatagtttagttgctggccagcgaagattagctagatggaaagcaaagacttagcgtgcatgctctgcagtgtgttcctttcagtgtcagaaaagggtcggcgtgttgatcagttgcagttgcagaaggcagataggcagatgcctcgctcttcgcgtcttcgttcggtcggtggaatgtgcaagttaagctaaggatggcgatgggtgaaccatcacgtaacaagacatcaactactagcttctttgcaagttgcagctaatggtgagtatcaagcttcgtcctggcaacatgtggtgtagctcaagtggtcaagccttcttgtgtccgctcatggcaagaatccgttgtgccagtgctgtttgctgaactgaagctgcatggttcaggttcaggttctctctatccaaaactccaaatctgtgagcttcttatcagcaaaagcaggcgtacgatactcagatcagagtctcacagaatgactagctagatctggatcttgggacctcattaattgtttagagattcttgctcatctgtaaagctgctcagggatgggcaagttggccacgcccttacctcttccaagttaaacgacatactactactgctagtacagtactctctccgtcccaaaatgtaactatttctagcacagtgtcttatctcaaaatgaagctatttcttcacctacctcctcctctcaaccaatcacaactattcttcttcacctactttctcttttcaactaatcacacacttcctccaatcattctcacatactttcttaatacccgtgccaacctcaaaaatagctttattttgggacggaggaagtatgtgattatgtccactccatactgaaaagtggcttgagcctctgaatgattttgttcttgctacatgacctggttgttcatacagagtttacatactgcccttgtgttttcactgatcttccagtgcgagagagagaatgaacaaatccttcctacttgtatcagctagaaattcatttcgtatcaaaccttcccacattaggattctttgtatcagctagaaattcatttcgtatcaaaccttcccacattaggattccttgttaatagttgattccgatctaatttcgtattaagctttatcgattccgacctaatttgaactttcgcgaaggtataaccaagagaaattgattaggtccaggttctcctaactttgtcttgatttttttccaactctgtattaactaaatttcaagtttgaacaaaacgtagaacggcccgggtttatgcaacatgttatacagctgaagacacaagaagcaggggttaatgtctagcaaagttccttaaagagagattcaaaaaagtgcacatcgctcagtataacaagggcaaaactgaaaagcaaagatcgccaaaaactgttttctctatatctttagctcatccttggagacatggaatacatgcagaacaaaacaaattcgacaggagctggtatcaggctatcagctagtagagatggcattcaactactgaaaggaacacatcaaaaaattcggttcccttttctctcacttctacacattccacttatttccttgctcaatataatcttaaacaccagcattatcggggttagaacaccctcgcaaccaattgtgtaaaacagtgtaatgcttccagcttaattgatcacataaatcaggtaataagataaattgagcaaataaaattgaccttcttcctttgggtggtggctattgagaaaattgccaaaaaccctcggtcaaccgaatccaaaggttattgcatgcaaaaaagttgaatctcatccgacttcgtggctgtccaaatgacaggcactttttctctggatggaattacatggtgcgctctctgatgactatattttgtggctgatcagaataatgtcagccatatttgttccaaatcagacagcagttgctctttcacaagctttgtagtaaagtgtcttctgcacatagaagagcatgtatgcctgagaggttctgacagtatgctcttcaactctggttacccaggcatcatcacatttgtaccagtgattgtttaacctgagatatgtcacataatggccagcttctagcttaccactatgcatgatcaccgcaaatatttcaaattctgatgaaaattcagaaactgaatctgcatcactagcttctgatggaaatatacggttcccaaatctgcttctgagtatagaggacgatagatatggcgccatgtcaagagaaaaaggaaactgtaaacagtgatcaaccttccttgacattttcttaactgatgaatgctcaaacctcttaatatgaaagcatgaaaccaatggaagcctccgaatggacatttgcttcagggactcttgcctctccttgcaacgttcacagaagaacttctgttcagcatccaaccgctcagcccttgtaaaccgctccaaacatctcatgagtgttgataccttggtattagtgccacctgagcttcgctctccattccgcacatgtacctttgggtttgcaacaccaagagaattgttatatccagcatccaagtctagagagatgtccatacagggttcaaaagttgttgatgtgaacccacaatgtgtgcaggtgacatctgatctcaagatgccagaaaataccctgtgtgcaatgcaacaatctccatggcctattagggaaaaaaatacacataatggttagatctataacagctcatctgcctcaatataaatcatagttcagcctatcaaaagcaagatagaatatgttctccactacaacaaaaaagagaaaaaacacatttgtccaatttgttccccaatatccaaatagtacaggactaccattttccacgacttatcctgttttcgtttttagggtgtagaacctactgtagagtcatcctccaaagaagagtaggagtgacaaataataaaaatagtacaaaagcagccacaaatgttcactatgcaccacactaccagcaacagatggatttagatatgctttttgcttcaaccaaaaataaaaataaaaataaaaataaaactggtattgattcattcttggctcaagggtgcactgttttcacaataaaagggtggatagagtcatcctccaaagaagagtaggagtgacaaataataaaaatagtacaaaagcagccacaaatgttcactatgcaccacactaccagcaacagatggatttagatatgctttttgcttcaaccaaaaataaaaataaaaataaaactggtattgattcattcttggctcaagggtgcactgttttcacaataaaagggtggatattcttcttttcttttcacatatcagttcagttgaatagatggaaaagctttaatttaaatagtagcaggagagaagctaactaccttgggcaagtgatttgtgttgatcatcctttatattttcatggatatggtcaaggatggagataaaaaattcatgtgcatcctgttgctcgtagctcgcaagatttgatgcatgctgccaccagctaacaaacataacgacaataatcagaagaaaaacaatcactttaattcatgaaccagaataaagtagtatgccatgttactgtgcaagtccaagttcgtcaaaccagatcagccgcaaaaaaagacttcacatatttaaatttcacatagatataaactaaagtttaaaaatattacttcggctttttttagaacaccattactttggcttgataattaccctttgtgtcacataatgtcacactatgatcacaacagtttgctgaatacccatagggcataaacaagaatattacgatgaacgaattgtaaaaacatatcctggtaaagtatcagcagtgctagcaataacttatgtacctgccacatacttgtacactatccttcgcagcagcaagatatgatgtcattgcagaaaattttaacttaaattatgcaattcactcatatgacttggcccatatccaatgatagagcaaatagcttcaaatgcacctgataagaaggtgctctgaagaattaaaaactggtcatgcattttggagtacttgtacttgatacatgaacatagctcaacaaattctaagcatgcgaaatgtacttaagaccatatgacattttatcaatcaggtcatgtgcatccaaacgtgaaaccgttaccctttctagcgaaacatatggaacagatctcgcccttttagtagcatatcttgctcacatcatcccatttcatgctaactgataagtagttccaaattgcaacctacataatcatgatctacgtcaaacagtttcaaggcatagcgtacaaacaacactatcatttgcaagagactgatacaattcgatcccaaactagttacaatacatgacgcacccatttcatataacggattcatcttaataactttccaagtacgcaacgaacccaacattaaaaaagcagcacgttgctcaaaaaacacccaacgacatcaacccaatgcaaacagagcgctagatccagacctatagaggaatttggcggggctgtagggcgtgcgctccccggaaaaggcggcggagtagatctcgtcgagatcgcacgccaggcacgccgccttgtcgtttgcctcggcggaacggcgcctcatgggcgtctggcgcgggcagaggtagcggttgtgccgatcgccgaggaagtagttccggagcggcggcgcgtgtagcagagcctggagcacggagttcatgaagcacgtgttgcctaggttgttgagcccgcggagccccgcgggcgcggcggcggatgcggaggtggtgggatcggcggagctgatgagcgcgaattcggccggatctggtgcccaggcgcggtactcgacgcggcggcgcttgcggggcgcggcgggggaaggggagggggaggcggatgccgatgggcagggagggaggaggactgggcgaggacgacggcgtggtcgaagtccggatcgtagacctgatccccgcacgccccgcagaagagctcggcgcggtcgacgtcgacggcgatctggtggccgccggatgtggaggcggaggcgtgggaggcggcgtgggtggggcagaagacggcggcgcaggagaggcaggcgtaggggtaccgagctcgaattcggcgatatagtcattgatttcacaccccg

SEQ ID NO: 28286 - DNA, 5076 bp, Oryza sativa
agtggcatatgtaaggtaaaaaagactctgcatcagcatttggccatttgctttgacgagttaccgtagctgggctctttgggggaaaggtaaatcacgcaaaacattttagcactatgccacgctagccgtatgaatgaatcgattttcacatcaaattcaggtcactctgaatctgcaagcatgaaattggccggtggcatacagcctgaacgtctacgctacaaactaacagaccaattgtactggtttgcagtcggtaagtcagcagagaataaacctacaatatatatcacgacagggtaattaaatacacttcatatcattagatgatttgaacttaaaattttttactattcttctaatatattttttgcgcgttcgaaaaaaaaatctttacaaaacgaaaagggggaggcggcggcggggtggatgtggggatgatggagtggcattgtggcagctagtgatgccgcgtgttgaattgttgatggatggcatttgggtcatggaatgatggaactgtgggctggtggatcgctctggactagcgctgtcaaaaaaaaaaaaaaaaaaaaaaaaaaaaaaaaaactcgaggctcacgagctgcttaggcttgacttatccttggctcgattcgagcttaagcccgagctcgagctgagctcgagcttacaacgagtctagtaatatattttttttgttatttaataaattatgagatcgaagatgttatttgtatatcttgtattggtatcatatatttatttttttttctcttctattaatatgatatgatgaactagaaattaattattttttatagattatccttgaaatatgcattgctctactaaaaaatcaagctcgagagcctaggcaggtgagctcgattgacttcggctcgctgacaaccctaatttggacttcaggtgcaccaccgtgcacactagatcgggatgatctactctttttttttttattacttcatcccagaaacagcggcagagaaaaaagaaaaagaaattgagcccggacaaatttcaatataactagtatttgctataaaaattttacaatcaatttactcatcaatattaaatattaaaatttagtggagtttttatcggtgagcccgggctagccggcggtggctctgccactgcctagaaatgtttttattttgacccactatatatgcatcaatacaaaactaaaaagactaatagtcttcactttagcaaactcaaatacatttgtcatcactttaagaaagtaccaatttatgtgtcccttgctttagtaaatccctatacatttttccccgttttagcatagtctaatatattaattgatcgtacctatcgataacgagacacccgtgacaactttattaattttaagatataccgacctaaccttttgaaggtgtgcgtgtgtatttataggtgtaagtgagcttgcgttgtgaacgcctgcatgagtattgcgtttcttgaaggaaaaatacagagaatgtaagataaatgtgataaggaaaaatgaagtcgttttttagacagagagagtactactcctatgagagagaataaacttaattatttttgagttagcgtgaatattacacaagttattgaagaaacacgagcctgaaagacaaattatgaagacaccaactctatatttcttcaaaagaacaaacaaatttgctgtatcgcgtgtatccaattctccatttctttcttacacctttgtaagttagttgaagtacctttctaaaaaaagtcaattgaagtgttgagccaaaaattcccgttggtccctgaataggtttaggtccagaaatccaaaggatgaaaacaagttatgtttgagagcatttttacggtcctgcaatttatacctcctggtactggtacctgtaggtaccaaaacaaatcgaacagtacaattccggaggggtacaatcgggaggaaaaataacagagtaggtggcgcataggaggagccgtcggggatggtggaggcaacgccgcaacgaaggaggaggaggaggtggcgacggcggagtaggtgtcaccggtgaaggaggcgacagctgcggcggcggcaaagcggcgctagcaaagcaagaggtggtagcagggcggcgaggtggcgaggcgacggaggcggaggaggtggtgacgaaggagatgcggcacaacggctgtgaaggagatggcgcacgcctccagctctatcgttccggtcgtaactcgctcatccatccgtacgtaaaattacattcttgcccctctacctctatttatcgcgaagtaccaattcaggagcagaagtggtacatagcggtacctaactctgttagtcgttggatctggctcgatccaacgaccatgatttggtacctagcggtaccgttggatggtaaaaatcctcatgacaagtgaacattcatgttcactcttcctacttgtctgaaactctagatgccaaaaattcaccaactaaaggcctgtttggcacagctccagctctagctccacctctcctggagctggagctcagccaaacagtttcagctccaccaaaactgggagtggagttgggtggagctctctcacaaaatgaactagagttgtggagctgggtttagacagctccacaactccactccagacccaactcctgaagctaaatttaggagttagagctataccaaacaggccttaaatgtttcacttcacaccacgaaatgacaccccttaagaagaagtgacgagcttctggttagcattgtactgaaacaaacctgtgaactgctttaacaagcaagatcagagatctgacgagatcgctcactgtcacagttactgtacatggcttacttcggcggattaacataagccagtatgccaaaaacggtttgcacaattgtgcagatgaggacaatgacagtcgcactcgcagccaaagccagccatggattgctgaagtggtttagccagagccatgccatccaccgattgatgagactttgatagtgagcttccatagtctggcacagagttttaagtagtagttaccattgaaatcaaaaaccacgtctttgctgagcatggtgaagagatcagacaccctttcatcgctatcaagctggtgcacaatgatttttctctgaataagcagcgtaacgtcctctggcatgcttataagttgagacaagaaaacaatataagcagtgaagtcatctccaaattgagggcaggtttgttcaaacgcaataaggttcctgaaaagactccctgtgtactcatcaacaacaatacacggaatgtccatggaaccattgctaaaccaaatgtctagcagagaatggggttttaatttatcatattcccgtttcttaaactttattccggcttctagatattgtgcagctcgtcgccaacgattaagctgatcccctccttgtgccagatccacttcgttctggaatgatgaatcatgtctattgttttctaggtagtagttgattctgaaatacttccgtccaaaactgaggaaactgtgaatgtactgaggcacaaatttatagttgtgatcttcctccagcttctgactcggttggaagtaaatatgacacaggtgaagcaaatggtgaaagtctttcggtctgtcagaatcagtaattgcttttggataccaacgcaaagcagcctcgacatacttagcaaggtcatctgtcaaacattgtgatgaagcacaattatctgtaacaagttcaaatattgttttcacaataaaaaatggtatctgattttccagcaataataaatcgtgattgacaaacctcacaaaccaatgtccgccctttctgcaatcttgtttatatcctgcgccctcttcttcccccacttggacgctctctcgacatgcctcatcatcctcacccttaggacgctctggctgttccccgcaaacagcccttgcgttttcaatatcttcgctctcattatatacttgtcaattttgcatgaatctctgcacacccccgagagaacacagaatgaagcatccatcaagtaagagcatatgcagaaaggcctcgttatccatcttggtatcttcagaataacagctccttgcacgttttgataaccccaaccgctgttaagtaatccagcaaattcctcttacagttcagtttaacgattacatccacatagccccattttactttctccatactttgcagatctgcagatccatgatggtatggaccaactgatacaatacagggctcgtatgaaaatctgtcaatgtcacgaatatgttgctgaaccttgtaaattaagcatgattctgttccattatcaatatcagtgcccagtgaccaataataatcaagttcttgcgtcatggagttaaccagttcactcatgtttatttgcttgtttttacttctctgaacttgccgcatcctcacctgttgaggtatctttcatggttaaactgatcagcaatactaaacatttactatcgaactcctaagatgtgaaaaggccaattatacagagggaatattatatagttgaatatccggcataaaaataataaagcataatgagcaacttttcatcaaagattgcaataattcaacaatagcacattgattcatcctgagtgcacctaatatctggccagggaaaaaaaagttggaaccaaacttagtaatggtaagggctatgaaaaagtttgtcatatccaatatttaccacacaaatatatggatcacaatttacacatactccatccgtctcatactataagtagttttgattttttttttctagtcaaacttgttttcagaataacataggagtattttcaacacaaaacaaacatattatcagaatatattcaatactaaatttaatgaaactaatttggtattataaatgttgctaaaattttctatacatttatcaaacttaacaaagtttttttaaaaaaatcaaaacgacttgtaacatggaacaagggagtaacaaatactgaatcaaacggaagaa

SEQ ID NO: 28287 - DNA, 728 bp, Oryza sativa
tacacagtattattaatcaaggccgtgaaccctcacgaacctgccttaacccaaggcctacgatgattcagaccgaactggcaacccgaccctgggtcccagctcgtcccaagccaacccaggccaaccattccacattttagttgttaagcaggttttaagaattaaaacactaacttgggtacattgctcggcttgcccataaccgagggcgcggctattcgaataggttatactctgatcagaggtgtacatctttacccacaagacacatcttcctcacgcgtaaccacgtgccacataccaccacggcatatggacggaagacatgacatagtttccaacccatcctagccatagacaagagtaccgacccaaccccacctacggccggaacctccgggacaggtaggcaggattgagcccctagcagcaggacaccagccctgtgccatgacatctcgactaccgggccgcagctcgtgtagccttcatttgtcctagagatgtccatcgacccccgacttcgtccatctccatccgtgtacttttggttataaccagactgagccacaaactaagccttacccactagacatgtgaaagtaccgtagtgctttgcaacagaagccccgaagaccggtccttatattggcgaagtgctactattcaaaccatgcaccccgagcccagactaaaaccattttggggggtttggaataaggggg

SEQ ID NO: 28288 - DNA, 690 bp, Oryza sativa
ctaactctaaatacaaacatgtaatggtgtcaagtcacgcaattgcaaagggaatttctcattatttgaaaagaatgttaagtaggataggtttcacattactaatcgaagaccatgcaaattactgtttttctagtacattatacttcgcaccaggtaaattacatcgtgtttcactttataccgggatgatctaaggtgagttgcactttactctagcatcatatttcaattggatacatacctgtcagtagtattctcaccagataacatatataccagtaccaaattgaacaagaaataggaatgtgttcacttagaaagagaataaaaatgccatcatcaatggggttgcctgtaggctaggactgttaatatggtctgaacaatggtacagagtaggacgaccactgcagccaacacacctaatgctaaccatggattgctgaagtgattacgccagagccaagccatccatctgttcagcctgctttggtaatggtcctccaaaacataggataaagtttgaaggtagtggtaggtatcagaaccaaatatcaaatgtgtgctgagcctggtgaacatagctgacacttcatcgtcattatccagcatatgaacaattatccctctctcagtaagtagagtggcatcctcagaagtgcttacaagctgagacataaaagcgat

SEQ ID NO: 28289 - DNA, 5852 bp, Oryza sativa
aatttgagcgcttatgtagctaataactctgccacctgaatacttgattcattaaggtcgtcacccaatacccggaagtctctatcgttttctttgtctgttaagcttcacagggttgggactccctaaatcaaactgcaatcgctgtttatcaaccactcacgacgacaccgagatcttcgacttagctcccacaggtctcggggcggaagataacgaaagggagacaaagtcctaactaaatcaacacacaataacctcaaccttctaccatccatcatatcagtcgagtcgaggagattcgttcttatctatagataaggcaagagagaacttatgacctcgcggatggagagggattcgaacccccggtattcctatcaatacttcggttttcaagaccgactctttcaaccgctcagacatccatccctgcgctcgcccgccctatctatctgcgcgctggcaggtaggggcaattctatgtgattcgctacgcttgcttgcgctccaccccgtaagctaactatattgcctagcggttagcgacacttttccggtagtacgaatcgctacgcttcgcttctttttcaccgtcggttgctgcgctccctgcgggtaatagcaagagagtgaagaacgaacgatcatcagttagcagtgaatgagtccgacttgagttcgtgagtcaaaggcgtggcaagagagcgagttcgactcgcgaacgacctgcaagtgaaggaccgatcctttaacgccagtactgttgcgagactggtacttgggggctcacgagcaacatatagactaaggttgcccatcactcccttgctcctttttgaaggcccaccgctccccctttctttaagcatctatcccggcttgcattttggggcgagtactacagttcctccataatcacacagaacgcctagcttcgtagagctgctctctccccagtccacaacaaggtgtggaatctggatctacagtgtgttctgactctattggatcaagtcagatactaagccttctactactacttaggtacttaggagagaaaatgctatatttcatagattggactctcttactgtgtttttctcagggcagttcccgagccgggttccctggatccattctgacctaattggatgaatgaagaagggggcgagcagatacgacggcctctttttagccgaataaagctggatctactacatagggaaagattaagaaagcaagagcaagcctactctactatcgattcaaaaggtaaactgcccccgaagactttatcaatgaatggatcaaagaaggaggctctatctatgtcatcgtatataataagggaagaagcccgcccctgatcgaagaatgaagaagctagcccgggtagactttaagagctcttgctctgcctatccctatcgctctgccttctttcccctcgcctctgtaaggagtgatttgtttggacaaagccgaccaggaatccaactgaacgacacgagttactctcccgagcctcctctttattcagaaatgaaaccaagccatctgatctaaccttaggaaggcggtatggattgactataactaaccaaagcgagtgagtgggatattgtgatactaagaaaggaagcaaatgtctcaatctggccaacaataccatttacatcagtcggcatgttctctgcgacgaatctacatttccttttcaatctgtgccttaaactactcccactacttactccacttcaacatcttctcatacaactcttccagtcatctcctcagtctctgcttctcctcttaattcctctcgtccacctcctccttccccatgtccttaacactctcaacaaccgacacactctatgaccactcgaaccacagatcgcactatgaaacctcagaaattccctgatttcattgcctactcatctaccctgcatccattgcctccttccaatcaagagactaaaccaacatgttattcaggggctgttaaacatccacagtggcgctctgctatggcttcagagatttcagctcttgcaaataatggcacttgggtactggtaccacctagtcctaactacaatataattggtaggttgtgggtttacaaaaccaaacgcaagtccgactgtacgattgagcggtacaaagcgcgtttagtcgccaaagggactactcaggaggatggtgtttcgtgattcattgaagctactcccagattctttaagttctttaggtcaaagtctctgcccagagctcggcagtaaaggtgaagtagatcatacgtctgtagttatggataatttcgcatctaggaagagggaattggtagagaagcaagacatattgggtggtattatgctgatcaaaatatctattggagtctttacgagctttatattactacaaggatgatgaccttgtcttttctagcgctaaccatctttaggaaggattattatgatgagatgagtacacctatagcaattcctcataggactgctgatgagtttcttcataggggagactatggaggtcatgcggatgtgtataagctgtgagaattttttctattatgacgttcgctctctgtatccgtttataatgaaatcatccccaatgccgataggtgcagctaaatgggatggtaatttacagggagaggaactgtatggctttctcgaggcatatgtggactgtcctgaaacaatgaataagccattccttccatatcgatcataaaaaagactggattgcttattttccccggtttatcggagtttactattcagagaaacttcaatatgctgatatatttggatataaagtcagacctctttgtggctatctctatgataagggtgatggtttattcgataaccacatggccccttttccctttaacgcaactaggtaacaatacctcgctacctgttgctgtcctttttaaacccgtgggaaacttcatcatcaagtgaggtggaaactacagcttcgattgcattcagccttcctcgtcctaatattgcatgataggccggcgtccaccaccattgacggtcgctatggccacattcggagacttccaaaactgaactggaagatggtacccaaagcttataaggtttaaccggtaaagcttatgagagaagttcgaacctgggacaagattttatcatctcgttcgagaacttctttatgcaagaaatgggctacccgtgtcgaccagtaccctttttactcggtgcagtacccactcggagaacgtgagagtatattcccccgccctcttctagactttatacacttgtaaaaatatgtcatgcgccactggcgccttctctgcttgcttttgtctccctacggtgtttacatacacttcccaccatgtggcatgccattgactcacttttaggacatatttgtacatcttttgtctctatcctagtcaactggtacgcatggcgtaaataaagatgacccgaccacccctgttcaccttcctcaaacccaattcaaatgatggctgtgaaagtcagaatccttcctacctaggaaactctcatcagaatcattgatggtattaactgacggctgtgtggaaggactactatctcgtacataactctgtgtacactccgtgttgataatttgagacctaatggacacatcatacataagaacccgttgtcgagattccatcaatatcttgcttggcagcttcataaacttcgtcttcctcagatcataaggagttttgtcaaatgaaatgctggacaatctacatgagtgaaaggatgtagcattagactctttcgagcagaaggagaagacagacctttatgtatgactctggtgccggcatgataccaaattatgggctttttgtaaatggcttcatgctggtatggggtattaccctattttactcaaaatactgtgacttgtagctcagtccaaaagcctactgcttatggtactgctagtctgttatgtacaagtatcttaccgatgaaaaatgagagataacatgctttttttccaacttttttttctaatgtgcatatatcgtaaggggataacagaggagatgctgaggaaagtgttggggattggaatggagtttttcaagttgccgcccgaggagaaggcgaagctgtactctgaccacccagcgaacgagactagagggcgccttgcttttcgtcctagtcctaaggccaattggagcactaagcccaattactgctttactccgttatttagacttcattctcctagtcctattcctgattgttatttcggattctgtgcctgggtggtatcttcttactattgattcaacctcttcgggcaaacgttgtcacttcctttatttgaaaaaaaaggggtctagaactacagtgatctgataccttcttcccttggtctgggtaggtaggttatgtaggctacaactgttcataggttgttcgatcgcaaaatgccaaataatcgattactagtatgccggatattgcctggaggcccttctccctatgtttgactcatcctagatgggttcacacttgtcgattccggtcaaagaaaaaagctttttcacggtcccatcacaccaatctacgccaagataaggaatgctgggttgccaggaacaaaccctgtgattcaaggttttgcctagaattgccttaaaaaaaatgcaccccattaattgatccctctttagggtagtataagtacatcctcgactatagcacgagtagagtcgagttctcgtactaacctaagagcagatatgccgaaatatttccacgttcaagcagctaattagtaaacgacttctccataacagtttgaagattggctcgcaacgcaagtagcggcaagaaaggagagcaagacttccttttctaaaagaagaaagaactagacttctataagaagattttgataatcgtagatcgtggaatattcatctatcttattaggtaactactttagctgctctcgaaactgaaccatcgtgaatagaactagcgcttaaggaagagtaggatctgttagcaagtcatattcaatcacccggtcttctccttcctagcttttagatagccctgattctttattggattttaatacacttagccgtgtacgtatcttggctaaactcgaatctatagtttatttaatactgatgtactcggtaaagaatcaaaaaggtacttgaagacgactttgaatgggaggaggttttctttttatccccccctaacctgattttgatgtcttcttcgttctcagtccctatggtccattgtaggatgatttttctaaggccttgaattcgttggaaaggtgatcagggtcctctccctggtcctatcgaaccagtgacttctctcctgggattgaatatgttttgcctttccccgatggttccgcattccaatgtgggtaggatttgccaggatgagcggcttatttagcctatgcgaagcacgaagcataagagaagagtgtagcgaagcgagtgtaatacttgtagcgaatataagtagtgtcaaagcctacactggcttagctctgcagatgttttcaggacgaagacggtgatacgataccactcgccagtgatgataaggttcactcatagcataggtggaagatccatccaattttctttatagatttatttgttcaaagaaaagacgcctaaaaatcattcagggctcttggtatcctttaccacattcactttccatattccctttttttagttcagacgctatcatacctcagggaaaataaaatttctatcaacgatt

SEQ ID NO: 28290 - DNA, 6154 bp, Oryza sativa
  unsure (1)..(6154): unsure at all n locations
ctggcacttgatatctactcacttanggcgaattcgagctcggtacccaacatcagaggatcaattgaataaccaactctcccgccccgctgccgctactgctccaaagccaacaaatgcacttgctcatcccaagcatcactttccacaaatagtacccagcgtgtgtcctagccgccgagggcactcctcttgaggaggcagttttcgaatctaatctttctgtctgcccataagagcgggacggtgaattaccagtaggggcaggcccagaattccatgtacgcctattccacgcccctcccccctgggtgaggattagctcctatgatttgccgatggtagtaggatttcctatcacattgatagaagggaaggtcatctactaatagttaaacggaataagattagttacgaggacacctgctaactattagtaaagaaagcaatagttgggccctagtcgatgtgctcttatttgaaatctatagctttttggccgggtaagaaaatgaagtagtagtctatcaggcagtctaattcgtcttctctaaggtcaggcagtgaggcattaagaaagagcagcagcgattttgtcaagcgaatagaaagagctgctcgttaagcaagggatgggtttgtttgcctgtataggtagaagcaccggtgtattaggtatcaaaagaaaggcatctggataggtatttaatcaaatacttcttccctcataccatacttatctacttcgctttatttaatatgtttattgacccgtaaatcaatgttctactctctcatggaaaaccttctttgtagtaatatgaaagcttatcgcaaagcatagaaattaatagagcttataatcaggtcagatattccacttgctcctagaaataaggtaaggttagttagcactttcatgccaactttcatcagcaagcacttatataaggggggtgcgttaacagaggaacttgaattcccgctggaaaagtgaaatagattcagcaccaggcggggaacaactactccttttttctttcctcaatcctcaaacaaaataaaagtattccgttctacttccaattccagctttcgatacacagaaggaaagccatcccaacctagagatgaagccaacaaaccactatctatattttatgtcgaccaacaatcatatgtctgagagtctggtctaactaagcggattggaggcgggcattttcatttcaacgtagcagtagggaaagtgattttggggggttagtacacatgggcagttgggacagttacaggtagttaagtttggtcttattcttatgggcaagtggtcctagaatctctctttccttctctaaagtatagctttacgaaactagaatatgagtaaatatagaaatagaataataagaatatcatatagccgtttattagtaaggataggttttggtgagtagtagttcttggcattagtaagctagcttcactagactatctatgacaggaaattcggtaaatgcacaatatcttttcaatgaagaaagattcataggaaatgaacaatagaaagagtactattcttcagttactcttttttcttgtcttagaatagacaatgtgtcaatggattagctgactttactatgttcctgtcttcaagtataagtgagtcgatgtcaacgaatagttgcttattgcactactcagtgaatgagatatagcatatataatggatttttcttttccttttactaacattctgcctttattctacttctttctcgtctgtgtcaatgagaagtaagagtattctcgtactacgaagaataggcaaatctttgatttggaagagttttttactcatatctttttttcagggaaatatgcctttaagaggaaatgagtgactttctgccggagaatagtagtcatctgtactcgtcttttgtccttccatacttactaagcaaactaggtcacacctggacaactagggaacataagcgggtgatctaatgattcagtggggaaagctgttcataaggaccggtgagatggtactcccctgtggtatcccaataaccgtattcccatgggcatttcctcaaaaataggctattttgagaaaggaatctattagctgcacaagtccagagttgtgtgtacccctagtgaaagagtggaggagttcagacgcatatcgataccaaagtgagaagcctcttaatgatggagaacctgcctctgccaaatgcccaatacaagcaagcagggggagcggattcccagagagaattcccgtgttactctgatattagaaatagaggaactagaacgaagctctacaaagttcacaactcaccattgcaaccgtaggtggatacgcctgctggatggagtcagcaaaacccaaagcaagatagaacgtaacggagactttccggatccctcaacctcctatcgatatgtatgaggcttcgccaacttagaatactgaatttaggcaagaccaacagctacttcatctcctgatttcagcgttccgtctttacgtcctgtggtggggaagtatagtgcaatctacgtccaaccatgggttctatcagaatatcatcggtcttaccacaacattctccattcctgaaaattcctcattgggtagattctatcaaaaaatcccagttccactttattagcctatccttatatgctccaaggattcagcctgctactatatccaatccaatccatccgagttgtcccaataaagcggatttcactttaatacatctccgtgtactttccttattggtcttactcagatacttactcgggttattacaatatggacatagtcatttattgcccagtccacttatctttctccttttctttacggttaacagggtcaactaaccaaaaacctttgctgttcatcaccagttacggatcgtaacaactatcaccatcaccccgatcactccgataactgatacccagtgccgcgagtagaatgacaatgaagcgagtctagaggtaccggcaagttctcctgtgaaaagaagtggaactaaacaagctagtgtttttaatatgaaaggaacgcgggtcatacccgtacaagttcagaaagaaatcctgggaaaagacgagcagataaaagttctcttgcccgtaaaaaaggcttaaatgagtgtttttttatttgagttccagggcttttcaacgattagaaagctctctatgacggcggctaagtcgaggagtaggcacacaagagtgctttttttgggggctcaacctgtataggtactgtgtaaggttagctctattgggcgccgcacttacttattgtaaaacatgcgccagaatgcccaggcatgaaaactatatatgataatatggtttttaacaaacttgtctctctttatattctaagaattgtcagcccttgtcattttacttcttacgcgggatttatggacaaaagttagcccggattactaaagatctttgttgcgggaaaaggagggatttgctgagttcaaaagcaagagtacttcagtgaaaaagcacaaaattcattcccagttcaaagtgatacacaaacagcttgttgctaatgaattcacaaaataaatggttgctaggtaaatcgtactttttgcagtcacatatggcttgtaactattctcggtgttatcttacaactactcttcctttctctccttcggaagaactagtctttgaagcaagagatgaacatattgtgggtggatcttcttacccattgattggaacatcgtaaaaactccgaagatccttttcactatagttagtgacgtatccaaattctgtatactattggtggacgggacattccccgcttccttctgctttgttttcacgaagcgagcgctttcaacaagcttcttttctttggtaataagcaaaagtgtgtaaagtcctccgttttatcactgggaaagctttgttgtcttcgttttctttctgccgtagtatatcaccgcatatgatctggcctttaaagtgggttagtaagaaaacttacctttctgggtaagtgcccttttaatgtttaagagctagttgagcagtaaaatagaaataagagctgctaaaacaatatcctttttcttaaagttcctacgatgctagtttttaacaggcatatacactcagataatgcagcaagagttccccactaccaagtaagctctttctacttgttcacctagatgaaaactacctggctttgtttggctactttttttattggctagtgtgattttatatcttaggctagactcgcttgagctgtcttacattagtggggctatatgtgaatcgcagaggtctgtaaattaaggcaataggcgggcacatttgaaatgcagcagtagtgagctcctatagaaaatcaaaaattcaataaaaggtcataatggtcggaagctgttcactacttcagaaccatccagaaggcaagagaaaaaagcacctgaggtcaggtgtttcttaggagttcaatatgtttcatgtgtgtttttgcaaatcttttttcttcactggtcctgcacgcttgataaaaaggatctggtgtctatgccattttggtaaaccatatagatcttgcccaaacaaggagtaggggctagcttgtaagccacgacttagtactacgaggatttgggcagagtttcacatatagataggtcgggatgaagatgagaaataggttcggttgtgaatctgggtcaagaaatgggggttatgcgccagcctatcaagcaagccgaataggcgcgcctggatgatcaattccttggttttttcttacctgaccgagagacggggccgatagagcatattccggacaagttggttcgattcgcagttcactttctataagataacaaaacagcagacccgccccatgcttttctttacactgacccagcattcccctttgcatttcttccaggcacaaagggattcgtttttatgagaagcgagttgttctaggctgggccgatccctacccgttttgatctgacagcggacgaacagagaaacgtgggtctttttctcgcattttagcgatcaataccgaatcctcatctatgcaattcttgtacttatttgatgaaagacaaagaaagagatcaggttatttatgatcggagaaaaggaaacgatcaaaccgcctacacctattccattggttaactattccggttctaatctggaatcgtagtgagagtatctagcatacatttgtacattctgaactaagttctactaatttcttctaagatagtggtgttctcattcccgcttgcactaacgaactgtgatgtttacggatgagaagtaggctgttggacagatgatgcttgtattgccagccttcatcggctccgaggtgtggccgggtgagcagtctgcggaacgtttcactgcctggcccccagggtttctgagtgctagggaacctccttagaagtagctatattggaataccccgctgacttcagattctgattggctggaggtgaagacctaagcattggcttacactgactcctctatcaaaagaaagggtacaggcactagacaaattacctactggtaatgtaaagggaggaccagagctgccacatagggcagttttacatcgatagcaggtaaagacagatagtcagacctaccaatatagttaagttggacccgaaagacagcttcacaagaccatgcaatagtttacttgttcttttcttagcactttatcgaagatatatcgctgattataaaaacaaattggcagagcttgcattagtgtaaaatcaaactaaacatgctattgggttaagaagaagaggttggtgaggatgaggaagatccacaggaggagttaagcaatagtgcaacagaaaagcaattagaacctgaagaagcattaatctccatgtttgctatctcctctgaccctaatctcttttgtttgctactatgatcaatttggcatttcgatcatcttttgttttgaaggtacttataacaaccaattgagcatatatctgtacatgctggtacgcgtgatttagtactagagacacattattacctaatg

SEQ ID NO: 28291 - DNA, 7210 bp, Oryza sativa
  unsure (1)..(7210): unsure at all n locations
atgggttaagaagaagaggttggtgaggatgaggaagatccacaggaggagttaagcaatagtgcaacagaaaagcaattagaacctgaagaagcattaatctccatgtttgctatctcctctgaccctaatctcttttgtttgctactatgatcaatttggcatttcgatcatcttttgttttgaaggtacttataacaaccaattgagcatatatctgtacatgctggtacgcgtgatttagtactagagacacattattacctaatgctgctgataatgtactgtcttttatagttacaaacaacctatgtttccatctttttaaagctgtttactagttatctgtccgagaaacaaactatcacacaattaaagcccgcaatgcacagaacataaggcacatacataccactttagcacactttacagaacacgagtgcaacataccaattctagaaaaaacacataaacagaatccaaacaaagccacttaagaataggcaagggacacaccgtccacgccacctacttgaagagcagaaaagagtatagttagtgtaaggaaagtattataggaaagaccctataagttcagacaatatgctacattctatgatatcctattcaatccctaggttagcatgcgttgctcgtcgtgctaataaatcctctcttcttaaagcccaagtaggacaaagaaatgcaagtaaataccctcgattcattccttttatgcgagtgggaaagctagctagaaatcaatgacaaggagtagagcctagagcaaaagggcctggtgtcaggttagttaaagcaagaaagtcaatgctggtgcttgcttattcaatccttttttctctcctcctttgtgctaatcactaggtcaaaaggaacccttaatatggagttttatacttgttcttacttgtgttagtgaagccggatagttcaacttgcctgcccaaagtcaatctatgaaaagtcttccttataggcgcacccagttgtaagagagtagaagcaatcggagtaaataaatcccatagtgaaatgagcgttagatgttgactagacaaaactagctaatacatgtagtagggtaacttttccttttttcttggttatgtgaaaagggagaaaactcgctacactttataggaaatgaactactcttaatgcaagctagtcgagctggatgagttgttaggaatggctcaacccaggcagcactaaacctttcttttccaggcaaatctctcacttcaatctttctgggctagctatgttctcggaccccaccagagtaggtttcaccatcgagtaatgaagatgttaacttctagtacaagcaagcaaaatctaatgcccgagaaagagggaatggcattgaggcttcatccttggaagaagacgggagtgctactagggacaaacagagttctggggccagaggaaggggaacaaaaggtagaatatgcgggttatcgtagaatctctgagtggcgatgccctctactacctaatactaaaagaaggggactttgaaagccaaagccaagaaagaccatatcaactactctccaaattgcaggataagtcacagaattcaaatggaagacagaaagagaaggaaattcaaacctaatggccaaacattacgaatccaagacagaaagacttatagccataaaagaataacaagagaacaaaaacaactccatattctactggcctgcctctctgatctactatccaactgccatggaagcaccactgaagactggcttctctgaccttccacccgatcctgggcgatcccggatcgacaagctgacggtatggattccctatatatggatggtaggaacgcttcaactgcagagccctgaatgcgtcagtgaggttcctctgtgagagaaagagaggttgctaatcttggatcagacggcgtgttggtattattgataaggcttggattagcaaattagcaccgcttgagtttaggtattcgaaatagcgaaatacataaattatctatctcaagtacgtctccaacttatcttgagccatcagtcagattaaaagcagcgccctgccggtagctcctgacctctgttcctatgggagaaagaaggtgtggctttggaccccaaactcttccatgacggccttcttccactcattttattagcaatcaaacctcttccctgctcttgcactgaggtaagcattcaaatagcaaagcaagggaaaaaatatggtatgtatttttttaatctacatacagagaaagcggatgtgcccttattagcgcagttgaaaataaaatatataacgcgtagttgcaagctttctttcgtgagctagctatgtttgcttcctcttttcctctctgtttcggatgtcaacccaatctctgattcaagtccataagttccttttttatagctcctgttgctcttctctggctaggatctcacttatatggcctttttttttcttttatatattatatagtaagcttcaatagatagcgtagtaggtgctgtctctatttactttctttcttacgcctaggtgctaccttttttccagttccgtaagtcccatagagttattttttatctttgattcccaaacgctgcgcgcaagtcaagcttacagaattcctgccggggcgccttctttcttatgccagccaagtagcaatcagaaaaccaatcaatcttccttacactacgacaattcacttgaactaccaacatcatgagtgacccaggccggtcgtatatgcgtcatttctcctcatccttgtctctatttgttaattgctcgctacccgtagtgggccttgagtaggtgtcacaccctgaaaatttcaaaatatataaattgttgtttaaatggaatttttagaaataattttaaaagtcttgaagagaagatctagttttaattaataaattccaatataaaatggggcaagataaaatttcattaaatactttgcttaattctataattcctagatttttctgggatttatttgagctaagaaagtatttttaataaatggaattgcatttaagaaataatttaaattgaaaaaggttttaaaaagtcttcttttggctttgggccgaaagtcggcccaaaatcccttctctctctcctcggcccagccggcccagtccgcagccgcagccgcccgcgcgcgagtgcgctgtcgctgacaggtgggtcccacctatcgggatcgtcgtctaccttcggccgccgccgccgaaaccctagtttcgcgccgccgccgtttcctttccaaatctccggccgaattgaaagaggggaaatgatcctcgggatctcctctaccttttctcctttggaatctttggctaaatcgttttggaaagagttggattcgagttcgtctcggatttgttcttaccgagctttccttcgccgttgccgtcgccgtgggccttcgccgccgcctccgagcccctttaaaaggaccccggtgtcttctttacccgccgccaccctcgccttcgcctctcgtcgccggtttcgctctagcgccgtgtgccctagcttcgccgtcgccgccgccgctccagccgtgctccgccgccgttccagacgcgccgtcgctcgggaaggacgtcatcgtggtcgccgtcacgtcgccgtcctcgtccgccccttcgccgtcaccggagatcgtcggagcttcgtcgccgtcgacaacccgaaggtttccgccgtttcctcctcgccgccgtcgtcgtccgttgttcttccgccgccgttttggtcaccggtgtgttcgccgcgttgtcctctacgtgctggtgccctccgtttgcgtcctcgcgccgccgttcgccggcgagcgtgcgccgtccgagccgtccgctccgtcgagtcgccgccgctgtcggtgacgtcattgccgacgtcatcggggttgtccgccgtgagccgccgtggacccgatcgatctcggccgtccgttttggattggttcgatctcggccgtccgttcgcgtgaaccgccgcccgtgcgcccggtccaccaaaaccctagcccgctgacgcaataaaccttcttttccttttcaaaaataattcattattgcgtcataattcaatttaaaccgatataagtgttttaatccgatttaatctttaaaaattcataactaattcatcttagctccgatttagttggttcaagtctctaaatttttctaaaattgagatctacacattaaaaatatccacatgtactgttcatgcttgtttatgtgctgttttagtgattttgctcttttctgcttagattccgtcgtttccggagagtccgttttcgcagaagaagagtttgaagagttccaaggccagcaaggcaagtcacacagatcccaaacaaccctttgagcatgttgatcctatttaaagctattgtttctattcaactattgcatctattttcgaatgtcattgggtggaattgacctattctttgttatggccctttcgtacttgattaccttattccttgataccttgggttattacaatttgactagttgagctttatttatattgtttcaactagatattagatataattgcttagccctgcttagaaacattagtacacattcgggataactaatgactcattattatttaatgatggtttcatgatagttcacgatggtcaatcgtgattagttaattaattaatgtgccaactaaaacctggtaatggtgggttgtgagcacatggttttgttggtcgtgctcatgacaattaaggaccggttcacgagtttcggttgtgaaacattaaccgtgccaaccacaagccagcatgggcaacggctttatcttttgtatagcatggttcattgcggggcaccagactgagaagtggcggagataagcccacgggggtcgctggggagtccatgccttgtttataagggggtgattatgatccaggaaggtgcgctgcagtggattgtgttatgcgaggggtattgtcacaactcctttccgaggtaccgtggtggtattgaggcacatggtgacatgatgtggggttgtgtcttgtgggtacagtggtacacctctgatcagagtaaaactattcgaatagccgtgcccgctgttatgggcgggtctaacaatgtctttcgtgattagtctcacacctctcatcattgtaaaagatgcttaaactggtaataatttgattagctcctggtttggaatggtatattcctggtttggagatagaactgtgcagccggggtggttgttcagaatggttgggcctatacaacagggtatgttgtatagcgttggattaatattgtttaattacttaactgttttatcaaattctcaaaagtttgctaaatgctgcttttgcaaatgcaaccctattatgccattctttgttatcctgtgcacttgcatatttgctgcgtggcttgctgagtatgtcatatactcaccttgcaatcattcatcagaggaagagttctacaatgaggctgatggtgtggaggattaggtgtagccttggtcaagctgcctgtggagtggagccgtctgcgccgtttatttattttccgctgcttagatctttattgattgagaggaactatctacctctgtaatgacattttattcgcttattaattagagtaatatttgtactctattatcaatttgttattgtgtgcctcggctgattcctggacgagggttcacacacatgtaagcgtttggaattttggatagaaattccgggcgtgacagtaggatttaagcacgggtttcgaaccgtctacttttccttatccttatgggaatttaagagagagatcactccactgagtaaccgagagagaagattnnnnnnnnnnnnnnnnnnnnnnnnnnaaatagaggcaacgaaccaccaatccattacgatgcccgcaaagaaaaccaacgcttaagacgctattggagactagcgtagctattattcgaagcttattaatttctttactgcgttcaaggcatgaccgcgtgataggtgtccttttccccctactcaagaagagttacatctaagttccgatcgtgatatgacaaacaaatcttactttttctttcccaagctggcgcataacctctggactgataggaagatcgatgacccgcatcctacaacttcaaagaagtatttgtatcacacccgagcaatggaccggggaaggagtttcattcatttacggagtttggaagcaaggacaatccaggatcaactgctatctgaagaagtggaatggatctgattacccattggcatctgcattgacgcttttgactacccctactctgtgtcttttgcgtttccttattcatgtactcatgtctatttctatttgtatgatactgatattgcaatcgatctatcccttggtcctcccaatcgaattgttaagtatgttttttccctttcgagaaatggtggcagtaccaaatgccgaattagcagctataccaaatgatcaatgcctctggggtttaccttctcttcagctctccccggtttcaccgatgtgttgggcactgaacacttttcaagatccggttttggtaggacgaagatttttcactttcgtgaaggtcgttctgaggtggaatcgaaccactctgttaggatttagagtccaacgcgcaaagctaaagaggatttcgagtcctctgctctaaccagccagaacctagaatacagggattgtgataccgaacacccacacaatctcgatttgacatgacagagagagagatggcgatggcagtctctctctctctctctctcttctttttaacggatattattgacaggaaaaaaccaatgttcaatacatacttcagatcttgaatcaggcctcgaagaattctatggcaattcatactttcttaagaaataagagagaatctcctggtagaggcggctatgcctcccaagcgatctcggctgaaggtatctatactcatccttcagctttattagacccctctcacttggttgacaaccaatgagccccttatgtaggagaaactcatgtacgccttttcgaacctcttcgggacctgttgtgtctgccctcgatttagccgtcttagaatagaa

SEQ ID NO: 28292 - DNA, 905 bp, Oryza sativa
tgaagtttatatgctctttaattgaatatttgcgaatttcttcatttaaattttaatttaaaatcggaattattgcgtcagccgaggggagagggcgcgcggaccgggtccacgggagtggggcccacgcggcagcctcacggtccacggtggaccgggtgcacccggctcacaccggccggcgccgtgggtcccacgcgtcagccgcacccgagggcgcgggcggcttacggccgggccccacacggcagccactcgacgcgcccgagggcggccaagccagcgcggccggcgggaggcggcgtgtcacgcccagaaattcacgaaccagaatttctaagctgattgtgcattaaacccctgtccaggaccagccagggtacacaaacgacaattgttgacatacagatccacgtcttacaaaaatataaaagattacaaatgcagcggaaaaagataaaagcgagctaagcctgaagacttgactcctgcagcgggcgactccattccacaggcaatccttgacggcagcgacgaaaccaacctcttcgagacatcttcaactgggaaggacttcaactctggtgtgggggaaaagagagcaagactgagtactacccactgtactcagcaagtcataccggaagaggaggtatgatgcaagatatatccaagggaggctaaaggttcttttgcataaagccggcatttcaaaacagtagttgaaagcagtaaaacagttgtagtaattaatccatattaaccaatcactgtccaacgttacaccacgaaacaaaaggcacaaaccaccacctaaactaatcagttccaaaagctaactagggtgaaactaatcacggggtaccgagctcgtattaggcgaatagcaattgatctcacccctt

SEQ ID NO: 28293 - DNA, 6796 bp, Oryza sativa
tgtcttgtgggtaaagatgtacacctctgatcagagtataacctattcgaatagccgcgccctcggttatgggcaagccgagcaatgtacccaagttagtgttttaattcttaaaacctgcttaacaactaaaatgtggaatggttggcctgggttggcttgggacgagctgggacccagggtcgggttgccagttcggtctgaatcatcgtaggccttgggttaaggcaggttcgtgagggttcacggccttgattaataataccgtgtagctttaggatcgtctttttaaaatggctttgggcaactaagtgacttttaaatgctgtttactgcaaaacttaacccctttattattaccccttgtacccccttgcattaatcatgcatctgccggtgtggcttgctaagtactgtggttgtactcattcttgttcaatctttccccccttcagtaagagaagcttcggagaagatgtcttaggtggagtcctggcttataccccagttgagcgcctgtgaagatggagccgtaggcccgctagtccgctgctgtttatttttgtttgtcaggccgaagtgcctttgtaataatgtaaatattatcgatataataaagatgtgccttttgtatcatgtttgtttggtgtaccccggcttttcctgggacggggattaatacactagcgttcgggaaaatgtatttttctcggtcgcgacaagctggtatcagagccatctcgactgtaggataagccaagtggataaaacctaaggacatattttataaataaaactatttgcgaaagttccttctttctccttcccctaatgctatttgcaaaaggtttactcccttcttccttcttcggatttcaactagtactagatggtcaggtcagtgaagaagaagacatcgtcagttgtttgccgaagctccggaagactgcaggatccgttagcgaagtggaggaagcagtgaagccaactgtgaagcaggagtgaagatcttgggaacccgtcgcagaacctaagccaccctctagtgtttcgtttgtcgtgtgtttccttgcttgtgtgtgtagcgcgtggtttgcatcagtgggttgtgatgtaaccatgctaggttgtttgcttaatcaacttgcagaataagcctaacatacatcataacagcaaaagacttagatctgttaaggtcctatccttagtttctaatctgtctctcccctttgttttccctctctccctctccaaacctttgcaacagatggctgacaatgagaaaggcaataaggtcagaagtcaggacattggtacctcaagctcccgagtgaatgaagcaccagacaccagttgtgtgacactggtccaacacctgattaaccagaaccgattgcttatagagatactacagcagcatcagacgccaattctgaacctgagtcaaatacaacctcaagtgcagttggaggcagtccaagcactcacaccacaagtcagcatgccgccagcatcccgaaggacccatggtgacgtgccacatgttgactcaaaagaagcaagtatcatttgttttatgtgtgatgagcaagggcactatgcaagggagtgtcctcagcagaaaagaaaaacaccaatgcgaaccgaagatgaagtccgtaagatgatcattaccagcatagaatggcctccaccaggaatgacaaaacgtcagagaagaaataccttccgaggtgcaccacagttgacagagcatcttttagctaatggaggtagggtgtctgatagtgaagattcagatcaagtctcctcagatgatgaagatgagaagtctccccaaggtttcaaccagaataaaatggaacgaaaggcatgctctcgttgtggagaaatcggtcatgttgccagctcgtgtgccactacatgcgttcattgtgaggaagaccatccacccgacaggtgcccaacgagcaggatcacttgtttcttttgtgaaggaactgatcatgtaccaaaagattgtcaattcagttttctgctgacgaagaagatggccaaccaacccgccagttccaacggagagaagcatcaaggcaacacaaatcctcgtcaagattacagttttagcctaactccagtgccaggacagaggaatcaaaatgagaaaagaaaatgccgagtccggaaagatatttgttgcttcaattgtcaaggaatgggtcatttcgccgacaagtgcccaaaaccgagaaacatagctgccagcacctcagtccacgcaactccctgcaatcagaagcttgctcctcagcgaattgtcatccatgcatcccgaagcagtcctatagcccccgttgcaacagctccaactccagcgagtgcattaccacaaggtgtcaatgctcaacttcagccccagccaccagttgacaacacagaggccagtatcggcattgtacctttggatgttccagcacagcagccaagaaatcaagtacaagataaagaacccaagccaatgggaatgagaaaagcatcaacgaaacctcaccagagctaatccaaattgtggttaaccaaaccaacatgttggcaacagcctttcaactattacagaattggaacaacccagcaggggcaaccaacgttcaagtacctacagtccagcaacagtgcaagttatcagaatttctaaaaactgagactccaacctttgccattgccgtcgatcctatggaagccagtgattggttgcgcacagtcgagaagaagctggggttggttcagtgcacagaccaggagcgggttgtcttcgcaactcatcagttggttggactggcttcagaatggtgggatagctacgaagcatcacggccagaaggacataccatcacctaggacgagttttcatctgtattcaagatatcacatgttcccgcaggaatgatcacactgagaaaacgagagttccgctacctgaatcaagaagatttgaccgtcacagagtacctgcacgagttccatcgtttggctcactatgcaccggaagatgtggaaaatgatgaagacaaacaagagaagtttctccaggcgttaaaagatgagatcgcagtgcaactactcctagaggaatatgaagattttgagaaacttgtggacaaagccatacaactcgaaagtgagcataatcggatgaagaactgtaagaggaggattgtcagcatcccagtatcttcatgtggtaaccaaagacagcgcactgagccacttcagatcatcggatcttctgttgcacatcaagagtttccgccccaagaagatggacacaatgcagacaacaacattagcaatactaatgatgatgataccaccaacaaccatgctccatgccccattagtgaccactcaaaccaagcgtgcaatgtcaacatcattcaccaaggtgtcgacgatagtatcgatgatggcacccaaaatgacaaccctagcaattgtgactctgagaaagactccaatggtgatagcaactatggtaccactgatgccaatgttagcaaggatttccaaccaccaattccaactccaagtcagaatgatcgtccccagacggatagctcagcaaagaagacgttgatttgctacaattgcaaagaaccaaggcattactcgagggactgcctgcaaccaaggcaaagtcgacctccacattaccgccaagttacacaaagcagacatcccaatcgtattgtggtcactggagcaaacaccgtacccgtgaggcctcgtgttaatcagaacccatagcagaaacaatgtaccgatgctaagcacttttccttttaggcagtgcttagtattcatgtaatgagggagaaatgtgtaatacagacaagttctatgaggattcttttggaagatgcggatatgtgattatgtgtataattgcttactgataaaggagacctagggtctcattccagaggaactatgttctaacctcgagttaataaccaaccggatgatggaaaagaaaatcaagtgattaaccaaagagacatttgtttggactaagtgtttcagatgtgtcttctttggatcaaaggcaacaaccgtcagtctagcttttgatgaaccacttgaaggttctgtgaaaggcagcaggctcaagtaccacattgccccagaagcatcctcaacacccggagcgaagagtacctggttgagaaaggtcgaaaggtgattaatggaagggatcggaaaagatgtttggttactgggaaaagaagtaggtcgaaaggtgattgataaaggataacgagaaccacgatttgtgtcactcgaggaagactcccgatagcaatcaaccctacaacagttgccctgtcattaaagtaggtgaattcacgagtaagagagatgaccacaggtagaagtacttctatggggacaaggatggaaacttttgtgacatgaccaagaagtcaagaagtaaaacctgaacagtggaatctaaagctcggttcaaccttgggctttgtatcagatgctactagaataaaagcacttgcactagtatcgttcaacgcacttttctagcaatcgatccatcgagaaagaacacatcaaggctgaaggtgcaaaggaatacgttgaatgctaaatgatgacaacatgaagagaatagtggaaagtaaactgaacataaagaaagtgaatccgagttgcttgttcgtgagagctattcccagttatgaatcaagtgatatgttcgaagataatctacagaggtcagattaaaatcacatctaacaacgaagcctcagatttggcaagataatgatcagacaataagaagtccagcagtaaaactatttgggaaggcgtcaaagtatatcaagtgggataagttggttctcttgggaagcataattcaaaggcaaagttatcgacccttgcatcaaatagaagaagtagctatcacccggagaccaggaaaactaatatgaggcagttggtggcaagttagaagtaaatgacaagcatggtattctcatgatgacaagcatggtatcttagtaatgacgagctgatctcgacgcatgacatgaagtgggtaacttgtatgaggttgacgccaaagatatgaatgataagaagttctagaactgaagccccatcctcgaccgccacagcctagtctgagtcagttagaggtgcaaccagggaaaagtcgggtgaagagaagattccatctgcaacaggagatcgagccaagcagtccagagtggagaagttttgttaggcaagtttgttatagaagacggagcggaagaagtcagacaagaagagaagaccgcccaacctatcttcatgctagcctcctcgaatctcggggacgagattcttgtaaggggggtggatttgtcacgtcctgataaattcatcccgaattaaaaatcattcgctaaaaggaataatagaattaattaaaattcgaaaagaaattgacaaacactaaaatacgtacaagaaaaattcaaatgtggcccggagaatttttgttaaattctccttggtctaaaaggagccctcaaattttagtggaattttcagagcacaaataataattattaagaaataaacaaagttaaaatgattttataaaaagaaaaaccctaaaaagtctttttctcccccctccccctcttgggccggctcggcccatctccttccctctctctcctcctccccgcggcccactcggcctctccccgagcgcgccgctgacgggcgggcccgcccgccaccctcgctgacgggtggggcccacctgtcatccctatcctcccgccgctcccgccgccctgcccgcgccctagcgccgccgctgccgcgaatcccgccgcctcccgccgtccccgcgcgcattaaagtggggggaattattccccgcgatcccctctctctttccccccatttctccctctctctcccgcgttcaaacgggcggatttgcccccgcaaatctcgccggcgccattgatgacggccgacctcccgcgccggtttcctcccttccccggccaccctctctcgccccggctctatttaaaccctccccgcacctcctccgtccggttccgcctctcgccgcccttcctcctcgccggatttgagctcgcgacgtcgctctctctttccgccgtcgccgccgagctccggtccgccgcagtcgtcaccccggaccgcctcccacctcggcgccgcctccttcggcttcgccgcatcctcgccgacctcgtccacctctccgtttcggtcgccgaccgccggagcgccgtcgtccccgtcgacccgagccgcgccaccacctccctccgctccggccgcctcctccgtcgccgccgtcgccccagggtgagccgtggaccgtcgcctcctttcccccttccctcccttctctcggccgccgctccgccgcgccggtggtcgccggcggcgaccatcgggacgcgggcgcgccgtgtcacgcccggaagttcccctcccttgctctaaattcataaaataaatcgtccgaagaaattgtttaatttaacctagagagaaaccctaaattaataaatgcaaatattaatcggaatcggcatgtggaatttttcttggattctacatgtcaaaatacgctaacaggatttttagtggaattttcagagcattggaaataattttaaccaattaaaattgagcttgtgcaatatataaatccctggaaaatcctttcttcttttct

SEQ ID NO: 28294 - DNA, 5658 bp, Oryza sativa
ttcagtagtcttatagcatgttttgcttgtgtgctttgtttgtcgcgtagatttcgcccgtttcgtcgattcgtggtttcgcgaagacgttgctgtggttccatcagtgcgagagcaaggcaagtcatacattgcaattgatcatattgtacctaatttacaaatgtcccgcatttctattaaatattgcattgttttacaatatcatgtgggatgggtcctattactcagctatatgttgtttcccttatgccattgataacttgggtattaaaatgactagatgttggtttaggagatgcttagccatgcttagttcaactagtgcacaaaaggggaccacattaaagcatagacttgattattggcaatagctttggattagtgccaccgcaatggtgttggctaattaaaatacactacatggtgggctgtgggtgcatggttttgctagacgtgcccatggcgattaaggaccggttcgcgggatgccctggaagaacttatcgtacttaccacaagccagcgtgggcaacggctgggcttgtagtgtagcttttctctagccgacgtacccaggcgagggtgggcgtgatggagttgggtcggccggggtgtccggttgatcggctgccggattcaccgcggcacgaaaggggggctgcccgttgcctgctggggacgggggcgaaccctaaggtgtggtgcgatcggttagagggggttatacgaagggtcctgtcacggcctctttccggtatgtcgtggtggcatgtcggcgcacgggaacgtgtcgtggggctgtgtcttgtgggtacagttgtacacctctgatcagagtaaaactattcgaatagccgtgcccgcggttatgggcggtcgaccagattcaccgtgattagtttcaccctagttagcttttggaactgattagtttaggtggtggtttgggcctgttgcaacgtggtgtaacgttggacagtgattggttaatatggattaattactacaactgttttactgctttcaactactgttttgaaatgccggctttatgcaaaagaacctttagcctcccttggatatatcttgcatcatacctcctcttccggtatgacttgctgagtacagtgggtagtactcagtcttgctctcttttcccccacaccagagttgaagtccttcccagttgaagatgtctcgaagaggttggtttcgtcgctgccgtcaaggattgcctgtggaatggagtcgcccgctgcaggagtcaagtcttcaggcttagctcgcttttatctttttccgctgcatttgtaatcttttatatttttgtaagacgtggatctgtatgtcaacaattgtcgtttgtgtaccctggctggtcctggacaggggtttaatgcacaatcagcttagaaattctggttcgtgaatttctgggcgtgacaagttggtatcagagccgaccttgaccgtaggacaagccaaatggaaaccctaagagccctctgaaaccttttcatctgcatatgctttttgcacttggatttgtttcgggaaaaattttggggttttgttcttttgagtttgtgggaaaaatcttggtcgcttatttaattggatttctcgactagggacagtctagggtttggtaaaagtttatttggagtttatttgacagtcagttgggaatttatcgggtgatatgcattaggtcgtgtctatgttcgatggggcaatgttacgcgcatcatttttcatgcatctagtttatgcattaagctatagtttagtcagtcgcattagtgtctttatccgggttcatgaaaaatgttctatgcatacaaatcatcatgcttggctagtggtttgggccatttgttgcttggtttaaatttggatttgagcatgcattgattcctatcccttgtctaccttagaagtcagacatgttcttcgatcgcaagcgccgctccgagcttcagagtcgccgcccttagctttatcgtcttcttagtctgtttgcgtgctagtttttgtgtttaggtttgttgcttgtgggttaatcggcggtcgatatcatgtgtgagtggtatgacagccttaattaggaattgcgtgcctctttttcagtgttttaatcaagattaagataattgcacttaattttataagaaagattagtttccgagccatctgttttcttcctttctcttatttctacctatcctcctccagatggtgaagacaaggaatgatccccgtgactccaacgacgccagtggcagcgaagagcagaccgatggagctcatgtcagtggtgcatctggcagcagatcatctccaccgcccgaaaacccaacagtcactcaaatgatgacaatgatgatgcaacagatgcagcaacattaccatcagatgttgcagcaggcgcaacagaaccagcagtttggtcctccaccatcacacgtgtccaaactgttagactttcttcgtatccagccacccactttctcaagcaccaccaacccaatggaggccaatgactggctccgtgctattgagaagaagctgaacctactgcaatgcaacgaccaagagaaagttgcttttgctacacaccagttgcaaggtcccgcttctgcctgatgggataactacgtggcgacccgtctagatgcaacggaggttacttgggcagagttttgtcaaagcttcaggaaggcacagattcctgaagggattatggcacaacagaagagagagttccgtgcgctccagcaaggaaccatgtcagttacagagtacttgcatgagttcaaccgccttgcgcgctacgctcctgaagacgtgcgcaccgatgctgagaagcaggagaagtttttgtttgggctcgatgatgaattgaccaaccagctaatctccggagtttatgaggactttgagaagcttgtggacaaggctattcgtcaggaagagcaacgcaacaaaatggaccgaaaaagaaaggcagctcagatcagctttcctcaggggaacaatcagaagcctcgcttcatgacgggacaactaggtgggccttccaccctgatcgtctgtcagcaccgtccctatcacccgagtaacttcgacaacgactacaacggtggcagtcacaacaacagtaagcagcacaaccacaactcgactccacccccactaatggcaccagctcagtcagatccgccagctgtgtcagttcagtcagaacaacccaagaagggggctgtaggaaagccaggaccctgcttcaactgtggcaagcacggccattttgctggcaagtgtccgaagctgaatcgcactggacccaggttcatccaggcccgcgccaatcatgtgtctgcagaggaagcacaggcagcaccagaggtcgtgttgggcacgtttccagtgaactcatatccagcaacagttctctttgattcaggtgcctcgcattctttcatttccaaaagatttgctgggacacatggattatcgatagtagaacttaaaataccgatgcaggttcatacccctggaaatgatatgaggacagcacactactgcccctcggtgactatagagatcaaaagatcaccgtttctatccaacctcatccttctcgaatctaaagacctggatgtcattcttggaatggattggttgaccagaaacaagggagtgattgactgcgcaagccgcaccatcaccctaaccaacgacaaaggggagaagatcaccttccgttccccagcatcgcagaagcccgtagcgagtctgaatcaggctgctattgagggtcagacagaaacagtggagaaaagtcccaggaagttggaggatattcctatagtacaagagtatcctgaggtgttcccagaagacctcactacaatgccaccgaagagagaaatcgagttccggatcgatttggcacccgggactactccaatttacaagaggccgtacagaatggcagctaatgagctagcagaggtcaagaagcaggttgacgaacagctgcagaaagggtacatccgaccgagtacttcaccttggggtgctccggttatctttgtggagaagaaagacaagaccaagaggatgtgcgtggattatcgcgcccttaatgaggtcacaatcaagaacaaatatccgttgccaagaattgatgacctgtttgatcagctaaaaggagctaaggtgttttccaagatagacctacgatcaggctatcatcagttgagaattcgggaagaggatattcccaagacagccttcaccactcggtatgggttgtttgagtgcacggttatgtcctttggactcaccaatgcaccggctttcttcatgaacttgatgaacaaagtgtttatggagtttcttgacaagtttgtcgtggtattcattgacgacatacttatttattcaaaatcagaagaggaacataagcagcatctccgtctggtactcgagaaattgaaggagcaccagctatatgccaagtttagcaagtgtgacttctggttatcggaggtcaaatttctgggtcacgtcatttctgctcaaggcgtggcagtggatccatcaaatgtggaatcagttacaaagtggaccccaccaaagatagtttctcagatccggagttttcttggacttgcgggctattaccgtcggttcatcgaaaatttctccaagattgccaggcccatgacacagttgctaaagaaagatgaaaaattcaagtggtcagctgagtgcaaccaaagttttgaagaactcaagaagaggttagtctctgcaccagttataattctgccagatcagacaaaagacttccaagtctactgtgatgcatctcgccaaggattgggatgtgtgttgatgcaagaaggcagagtggtcgcatatgcttcgcgacagttgcgtccacatgagaccaattatcccactcatgaccttgagttggcagcagtggttcatgctctgaaaatctggcggcactatcttattggcaaccgctgtgaagtttacactgatcataagagcctgaagtacatcttcacccagcccgacttaaatctccggcaacgaagatggctggagttgattaaagattatgacatggggatacactatcatccaggcaaagcaaatgtggtagcagatgctctgagcagaaagagctattgcaatgcagtatgtaccgaaggcatgtgtgacaaattgcagcaagatcttgagcacctaaatttgggcatcgtagaacacgggtacgtagctgccctagaggcacggcctacgctcgtggatcaagtcagagcagctcaagtaaatgatcctgaaatagctgagctgaaaaagaatatgagggtcggaaaagcccgagatttccatgaggatgagcatggcacaatctggttgggagaaagattgtgtgtgcctgacgacaaagaactgaaggatctcatactcacagaagctcatcaaactcagtattcaattcatcccggcagtactaaaatgtaccaggacctcaaagagaaattctggtgggccagcatgagaagagagatagccgaattcgtcgcactctgcgatgtttgtcagcgagtcaaagcagaacatcggagg

SEQ ID NO: 28295 - DNA, 1187 bp, Oryza sativa
atgtgtttgcatggggtacctaagaagattgtatctgatcgagggagtcagttcacttcaaaattttggcagaaactgcaagaagaattggggactcgtttgaatttcagcacggcctatcacccgcaaactgatggtcagaccgaaagggtcaatcagatcttggaagatatgctgcgagcgtgtgcgctcgattttggtggagcatgggataaaagtctaccttatgcggaattctcttacaacaacagttatcaagccagtttgcaaatggcaccgtttgaagcgttgtacggacggaaatgccgcactccgctcttctgggatcaaactggagaacgccaattgtttgggacggaagtattaactgaagcagaggagaaagtcagaaccgtcagagaaaggctaagaattgcccagtctcggcagaagagttatgctgataaccgccgaagagagcttactttcgaagcaggggattatgtgtaccttcgtgtcactccgctcaggggagtacaccggttccaaacgaaaggcaaattggcaccacgctttgtgggaccatacaggattttggaacgccgaggtgaagtcgcttaccagcttgagctcccatctaatatggttggaatccacgatgtgtttcatgtatctcaattgaagaagtgtttgagggtacctgaggaacaagctagcttagagcacattgacatccaggaagatctgacttatgtggagaagccgattcgtatccttgagaccagtgagagaaagaccagaagcaaggtgatcaggttttgcaaagttcagtggagccaccactcagaagaagaggccacctgggaaagagaagatgaattgaaggccgcccatccgcacctcttcgccagctcttccgaatctcggggtcgagattccgtttaaggggggtaggtttgtcacgccctgaagttcccttcccttgctctaaattcataaaataaatcgtccgaagaaattgtttaatttaacctagagagaaaccctaaattaataaatgcaaatattaatcggaatcggcatgtggaatttttcttggattctacatgtcaaaatacgctaacaggatttttagtggaattttcagagcattggaaataattttaaccaattaaaattgagcttgtgcaatatataaatccctggaa

SEQ ID NO: 28296 - DNA, 1612 bp, Oryza sativa
  unsure (1)..(1612): unsure at all n locations
ccctttcgagaaatggtggcagtaccaaatgccgaattagcagctataccaaatgatcaatgcctctggggtttaccttctcttcagctctccccggtttcaccgatgtgttgggcactgaacacttttcaagatccggttttggtaggacgaagatttttcactttcgtgaaggtcgttctgaggtggaatcgaaccactctgttaggatttagagtccaacgcgcaaagctaaagaggatttcgagtcctctgctctaaccagccagaacctagaatacagggattgtgataccgaacacccacacaatctcgatttgacatgacagagagagagatggcgatggcagtctctctctctctctctctctcttctttttaacggatattattgacaggaaaaaaccaatgttcaatacatacttcagatcttgaatcaggcctcgaagaattctatggcaattcatactttcttaagaaataagagagaatctcctggtagaggcggctatgcctcccaagcgatctcggctgaaggtatctatactcatccttcagctttattagacccctctcacttggttgacaaccaatgagccccttatgtaggaggaactcatgtacgccttttcgaacctcttcgggacctgttgtgtctgccctcgacttagccgtcttagaatagaaaggtttcgcagattcagattaggatgcactgaacacttttccagatctggttttagcggcactgaaaaatctttgattcttgtctcgtttcacttgcatttgctttcgttctaaagtggaatcgaaccactcactccgtttggatttagagtccaaagggcccaggcccagcgaacgaaaaaggatttacagtcccacgcccactgccctgccttcaccttttgattgctttatttttatacgattttttgagcaactagcgcgaaagctgttgcgcgttagcgcatttggaaccacacatttttatacgattttcggatcatttgattttcgttttgaaaactttaaaaccttatcagagaggggccactaaggctggatgttggcttcaagaaatctcctttagccttaccccgggctttgaccatgtctcccgaacaatttcagtacatatggcgcaagacgattccacatatatatcgaggtcggaataggatcgggtgttttcacgtctcaccgtagtgcccggtttgtcttgattggtgattgataaacaagaaggaaaatggaaaagtagaaaatctacataagcttccgttgaggtccttagtttagtcaagtaggcgagggcatttccatcacgaaggattcannnnnnnnnnnnnnnnnnnnnnnnnnnnnnnnnnnnnnnnnnnnnnnnnnngaagaccccaccgtggtatgcgccaataagaccaccaaaggcctttgtggcactagtggtacacagaagtcatgggtgatcattggtccgatgcttcgggcgannnnnnnnnnnnnnnnnnnnnnnnnnnnnnnnnnnnnnnnnnnnnnnnnnnnnnnnnnnnnnnnnnnnnnnnnnnnnnnnnnnnnnnnnnnnnnnnnnttcccgagttacagagaacaa

SEQ ID NO: 28297 - DNA, 2567 bp, Oryza sativa
  unsure (1)..(2567): unsure at all n locations
ttatannnnnnnnnnnnnnnnnnnnnnnnnnnnnnnnnnnnnnnnnnnnnnnnnaatatgcaagtgcacaggataacaaaggatggcatagtagggtttcatttgcataaacagcatttaataaacatttcagaatttaataaaacagttaagtaataattaaacaatattaactgtcgcgaccgagaaaaatacattttcccgaacgctagtgtattaatccccgtcccaggaaaagccggggtacaccaaacaaacatgatacaaaaggcacatctttaatatatcgataatatttacattattacaaaggcacttcggcctgacaaacaaaaataaacaacagcggactagcgggcctacggctccatcttcacaggcgctcaactggggtataagccaggactccacctaagacatcttctccgaagcttctcttactgaaggggggaaagattgaacaagaatgagtacaaccacaatactcagcaagccacaccggcagatgcatgattaatgcaagggggtacaaggggtaataataaaggggttaagttttgcagtaaatagcatttaaaagtcacttagttgcccaaagccattttaaaaagacgatcctaaagctacacagtattattaatcaaggccgtgaaccctcacgaacctgccttaacccaaggcctacgatgattcagaccgaactggcaacccgaccctgggtcccagctcgtcccaagccaacccaggccaaccattccacattttagttgttaagcaggttttaagaattaaaacactaacttgggtacattgctcggcttgcccataaccgagggcgcggctattcgaataggttatactctgatcagaggtgtacatctttacccacaagacacatcttcctcacgcgtaaccacgtgccacataccaccacggcatatggacggaagacatgacatagtttccaacccatcctagccatagacaagagtaccgacccaaccccacctacggccggaacctccgggacaggtaggcaggattgagcccctagcagcaggacaccagccctgtgccatgacatctcgactaccgggccgcagctcgtgtagccttcatttgtcctagagatgtccatcgacccccgacttcgtccatctccatccgtgtacttttgtttataaccagactgagccacaaactaagccttacccactagacatgtggaagtacggtagtgctttgcaacagaggcccgaagaccggtccttatatggccgaggtgctactatccaaaccatgcaccctgagcccagcctaaaaccattttgggggttttgaatagagggggcggtgtgaatccaattccacaataatccaacaattccaaagtgtccaggtgatgagaatatcccaaagtctagagttgtaaaaccacctaatgttacctaattaaacagcgaagcatctacctaaaatcatactagtggtaccgtaagtagagtatccactagttggggttttgtttaatctagggtgaacaaggtaataataacaataacaataataataaggtcataacaaaggtaaataggcatggctaaataaaacagtgataacgcgggaatttaaataaagcgacaatgcaataatttaaatcaaaataattttataaactgggatttaatatgttcaaggatgatgtgacttgccttgctcgctttcccaaacgccggcttcaacttccacgaagagcggatcttccgaagctgcagcgtctacacgaccaacagaaaagaaaaggcttttactctaataaactccatataacaagcagaaacaaagcacaaaaatgggttcttgacttcttaaggaaaaattagagacttgaacggtccaattccgagttcaaatggccaagttatggccatttgaagtttatatgctctttaattgaatatttgcgaatttcttcatttaaattttaatttaaaatcggaattattgcgtcagccgaggggagagggcgcgcggaccgggtccacgggagtggggcccacgcggcagcctcacggtccacggtggaccgggtgcacccggctcacaccggccggcgccgtgggtcccacgcgtcagccgcacccgagggcgcgggcggcttacggccgggccccacacggcagccactcgacgcgcccgagggcggccaagccagcgcggccggcgggaggcggcgtgtcacgcccagaaattcacgaaccagaatttctaagctgattgtgcattaaacccctgtccaggaccagccagggtacacaaacgacaattgttgacatacagatccacgtcttacaaaaatataaaagattacaaatgcagcggaaaaagataaaagcgagctaagcctgaagacttgactcctgcagcgggcgactccattccacaggcaatccttgacggcagcgacgaaaccaacctcttcgagacatcttcaactgggaaggacttcaactctggtgtgggggaaaagagagcaagactgagtactacccactgtactcagcaag

SEQ ID NO: 28298 - DNA, 1912 bp, Oryza sativa
ggggcgcgtagtaataagatgggccggggagtatctggaggagcgtaactccggcctgtttgggagccggaaaaaaagaagggaacaactgggggagaaaacagaagagggggatcgcgaggggaataatttcccccccacattttaatgcggccagagaacggcgagcatactgcatgtattttccgcgtagtgagtggacctagtggctcggcaaggtcggcgagatccgccggaagaatagggattacaggttggccccatccgtcaggaagggtggaggcgggcccgcctgtaagcggcgtgcttggggagagccgaagtgggccgcggggagtaggatagacagggaagcatatgggccgagccggcccaagaggggaaggggggagaaaaagactttttaaggtttttctttttataaaatcattttaactttgtttatttcttaataattattatttgtgctctgaaaattccactaaaatttgagggctccttttagaccaaggagaatttaacaaaaattctccgggccacatttgaatttttcttgtacgtattttagtgtttgtcaatttcttttcgaattttaattaattctattattccttttagcgaatgatttttaattcgggatgaatttatcaggacgtgacattaacccaacgctatacaacataccctgttgcataggcccaaccattctgaacaaccatcccggctgcacagttctatctccaaaccaggaatataccattccaaaccatcccggttggcacggttaatgtttcacagccgaaactcgtgaaccggtccttaattgtcatgagcacgaccatcaaaaccatgtgctcacaacccaccattatcaggttttagttggcaaattaattaattaaccaatcacgattgaccatcgtgagctatcattaagacatcattaaataatagtgaattataagttatcccaatagtgtgctaatgtttctaagcatggctaagcaatcatatctaatatctagctgaaccaatatataaagcccaactagtcaagttataataacccaaggtatcaaggaataaagtaatcaagaacaaaagggctataacaaacaataggttaatttcacccaatgacattcgaaaataaatgcaatagttgaatagaaacaatagctttaaacgggatcaacatgctcaaagggttgtttgggatctgtgtgacttgccttgctgtcacgcctagaaattcacgaaccagaatttctaagctgaatgtgcattaaacccctgtccaggaccagccagggtacacaaacgacaattgttgacatacagatccacgtcttacaaaaatataaaagattacaaatgcagcggaaaaagataaaagcgagctaagcctgaagacttgactcctgcagcgggcgactccattccacaggcaatccttgacggcagcgacgaaaccaacctcttcgagacatcttcaactgggaaggacttcaactctggtgtgggggaaaagagagcaagactgagtactacccactgtactcagcaagtcacaccagaagaggaggtatgatgcaagatatatccaaggggggctaaaggttcttttgcataaagccggcatttcaaagcagtagttgaaagcagtaaaacagttgtagtaattaatccatattaaccaatcactgtccaacgttacaccacgttgcacaggcccaaaccaccacctgaactaaccagttccaaaagctaactagggtgaaactaatcaaggtgaattttggtcgaccgcccataacctgcggcaccggttttccaattattttactctatcagaggtgtcaactggacccacaagaaacagctccacgacaagttcccgtgcgccgaaatg

SEQ ID NO: 28299 - DNA, 2199 bp, Oryza sativa
tttccgggcaaaaaaggccccagccaaaaacttttataagttttgttaaccaggaaacaaaaccctttttaattggatttaaccccatttatttgatttctgaaactttaaagggcttattggagcccggataaattagtattattttttaaaaatatttgtgttttttccattaaaagaaaaccctttaactatttattggccaaaaatccccccagggcttaggtaagcaagggtggggaggcccccaaaatcgggcccctgttggtaacgggtacaaggggaaaaggaggggttctggcaggcggggccctcggggcagttgcacaagccgggaggggcgcggctggtggttgggctcggcttcaagccggccggccggttatggcgagggcggcggcgcgcgcgcccggttgccagcgacggcaaccgacgacgggaggcggcggcggacggcgcaaagacggcggcggcagccgaagcggcggcgcgagcgaccctagcggcggcgctacacggcgggcggcgcggcaaagggagagagaggaagagagggggagaccgatcctcaccgaggggctcggccggcgcgagggaggagcgacggcgaacggcaacgacgagagacggcaggctgccgccgacgggctccgggaggacatagagaaaaggttgggaggggttagagagagggaggtggtccatggcgcacgacatacccgatcgaaggcggcggcaatggtggaagctcaccggagtgcgaggagatgcgagctccggcgatggaattggacgggagaacagcggacgaggtggacctcgggatggcggacgcggcggtgccgatggcggggtgcggcggcgaccctagcggctgctagaggcggccggagcggtggagatgtcggcggcgggtgggcgcacggtgctagggcgatagggagctcgggagcggacggcaaaagagggaaaaaggtggagagaggcgcggtggtcggttatatagaggtggggaggccggacgtggccgggagcggcggttccgcggcgacgacgtggagaggtggaggaggagagagagggggagagtattcaaatcgaatcccgccctctcgagcgcgcgcacgggccgtgagatgcggggagagggcggcgacgtgggcgtgcggtacgggcggagtgggcgcgggaaacggggaaaccggcggcgtcggtggcggtttcggcggcggcggcgccgtcggctggaggaggaagaaggggccgacaggtgggccccacctgtcggtgacccggagagaggagggagggagtgggccggcccagctgacaggagggcgagcgcgcgggaggcgaacggactgggccgacggcccaagaagagagaaaaaggaggaaaaagaaaaagaagaaaagattttccagggatttaatattgcactttgcttattttaattggttaaaattatttccaaggctctgaaaattccactaaaaatcctgttagcatattttgacatgtagaatccaagagaaattctacatgtcgattccgattattatttgcatttattacttagggattcatctctaggttaaattaaacaatttcttcgaatgatttattttatgaatttagagtaagggaggggtacttcagggcgtgacacttgctggccttggaactcttcaaattcttctcctgcgaaaacggactctccggaaacgtcggaatctaaacagaaaggagcaaaacaccaaaacagcacattaacaagcatgaacagtacatgtagatatttttaacatgtagatctcaattttagaaaaatttagagacttgaaccaactaaatccgagctaagatgaattagttatgaattttcaaagattaaatcggtttaaaacacttatatagattttaattgaattatgacgcaataatgaattatttttgaaaaggaaaagggaattattgcgtcattggctagggttcgcggtgaaccgggtgcacggcggcggttcacaagattgggcggccgagatcgatcctaactacaacggacggccaagatcgatcggatccaccgcggctcacggatggacgacgacgatgacgtcagcgacgacgtcaccaccggcggcatctcgggcgcgcatgctcgccggcgaattacggcgcggcggagcaaacggatg

SEQ ID NO: 28300 - DNA, 740 bp, Oryza sativa
tgaaacacatcgtggattccaaccatattagatgggagctcaagctggtaagcgacttcacctcggcgttccaaaatcctgtatggtcccacaaagcgtggtgccaatttgcctttcgtttggaaccggtgtactcccctgagcggagtgacacgaaggtacacataatcccctgcttcgaaagtaagctctcttcggcggttatcagcataactcttctgccgagactgggcaattcttagcctttctctgacggttctgactttctcctctgcttcagttaatacttccgtcccaaacaattggcgttctccagtttgatcccagaagagcggagtgcggcatttccgtccgtacaacgcttcaaacggtgccatttgcaaactggcttgataactgttgttgtaagagaattccgcataaggtagacttttatcccatgctccaccaaaatcgagcgcacacgctcgcagcatatcttccaagatctgattgaccctttcggtctgaccatcagtttgcgggtgataggccgtgctgaaattcaaacgagtccccaattcttcttgcagtttctgccaaaattttgaagtgaactgacttcctcgatcagatacaatcttcttaggtaccccatgcaaacacatgattcttgaaaggtaaagctctgccaacctttctcagtataggtagtgtgtacttggaataaaatgagcaacatttggtgagtcgaatcacga

SEQ ID NO: 28301 - DNA, 1363 bp, Oryza sativa
  unsure (1)..(1363): unsure at all n locations
ctcttcgttttgtaaaattttttttttgaacgcccaaaaattttttaaaagaatagtaaaaatttttaagttcaaatcatctaatgatatgaagtgtatttaattaccctgtcgtgatatatattgtaggtttattctctgctgacttaccgactgcaaaccagtacaattggtctgttagtttgtagcgtagacgttcaggctgtatgccaccggccaatttcatgcttgcagattcagagtgacctgaatttgatgtgaaaatcgattcattcatacggctagcgtggcatagtgctaaaatgttttgcgtgatttacctttcccccaaagagcccagctacggtaactcgtcaaagcaaatggccaaatgctgatgcagagtcttttttaccttacatatgccactgttggcaaaaatgccaacatacagcatgggtatgatcatgcattcatgcgctttaaagttcaagtcttcaagaagcctctacgcatgagagaatatcagacgaagaacttgctggtagtatctcccaagtctccgtgaagtgataagagtcaactctaaattattcgcatctctctttgcaaatggtgtaatcttgatctctgtttctcaagtatagtttatggctgtgtttagttttccctatattcccaactttccatcacatcatatcacataaaaaactatacatgtaaactttcaattttttttttaaactctcaactttcttcaaactttcaacttttttttaaaaactaaacacaccctatataaggtttcgaattcatataattttgtgtaatttccgttcgtgttagcccgaactttgataggatgaccgtcgcctgaatttgctgtgcctagcgctacacaccacagtagtaacctgattacctgatcagtgatcacccgcgccacgcgcccatccaagatcgccgtgcacgcctctgctcagcgcgacccacgagtccacgagaagatatacgatccaccaccaccatcccgaccgtcaccttcacctcacccccgcgccatcaccagcagccgccggcactccacccccccatccccgcaccgctcgccttccactcccgcgcccaccggcttattccccacattccccgccccgatgaccaccccgttcgagccgncgccgtgcccgcaccttgccgngtaccggcacaccacgcgctcccttcgnttnctncgncgttgcctccgcgtncgcccgctcggnncgcccgagatccgccgcgagcctcgcgagctcccccggtggttcccctgcttcttccccaccttctcctngtnccggctttacgccttgctctnctgcgccgncgtcttttgcccacc

SEQ ID NO: 28302 - DNA, 717 bp, Oryza sativa
tctggttagcattgtactgaaacaaacctgtgaactgctttaacaagcaagatcagagatctgacgagatcgctcactgtcacagttactgtacatggcttacttcggcggattaacataagccagtatgccaaaaacggtttgcacaattgtgcagatgaggacaatgacagtcgcactcgcagccaaagccagccatggattgctgaagtggtttagccagagccatgccatccaccgattgatgagactttgatagtgagcttccatagtctggcacagagttttaagtagtagttaccattgaaatcaaaaaccacgtctttgctgagcatggtgaagagatcagacaccctttcatcgctatcaagctggtgcacaatgatttttctctgaataagcagcgtaacgtcctctggcatgcttataagttgagacaagaaaacaatataagcagtgaagtcatctccaaattgagggcaggtttgttcaaacgcaataaggttcctgaaaagactccctgtgtactcatcaacaacaatacacggaatgtccatggaaccattgctaaaccaaatgtctagcagagaatggggttttaatttatcatattcccgtttcttaaactttattccggcttctagatattgtgcagctcgtcgccaacgattaagctgatcccctccttgtgccagatccacttcgttctggaatgat

SEQ ID NO: 28303 - DNA, 1286 bp, Oryza sativa
atctgacggcactatttattggcaaccgctgtgaagtttacactgatcataagagcctaaagtacatcttcacccagcccgacttaattctccggcaacgaagatggctggagttgattaaagattatgacatggggatacactatcatccaggcaaagcaaatgtggtagcagatgctctgagcagaaagagctattgcaatgcagtatgtaccgaaggcatgtgtgacaaattgcagcaagatcttgagcacctaaatttgggcatcgtagaacacgggtacgtagctgccctagaggcacggcctacgctcgtggatcaagtcagagcagctcaagtaaatgatcctgaaatagctgagctgaaaaagaatatgagggtcggaaaagcccgagatttccatgaggatgagcatggcacaatctggttgggagaaagattgtgtgtgcctgacgacaaagaactgaaggatctcatactcacagaagctcatcaaactcagtattcaattcatcccggcagtactaaaatgtaccaggacctcaaagagaaattctggtgggccagcatgagaagagagatagccgaattcgtcgcactctgcgatgtttgtcagcgagtcaaagcagaacatcagaggcccgcaggactgctacaaccccttcagatcccggaatggaaatgggaagaaatcggaatggatttcataacaggtttgcccaggacatcatcgggtcacgattcaatctgggtggtcgtggatcgactcaccaaagttgctcattttattccagtacacactacctatactgggaaaaggttggcagagctttacctttcaagaatcatgtgtttgcatggggtacctaagaagattgtatctgatcgagggagtcagttcacttcaaaattttggcagaaactgcaagaagaattggggactcgtttgaatttcagcacggcctatcacccgcaaactgatggtcagaccgaaagggtcaatcagatcttggaagatatgctgcgagcgtgtgcgctcgattttggtggagcatgggataaaagtctaccttatgcggaattctcttacaacaacagttatcaagccagtttgcaaatggcaccgtttgaagcgttgtacggacggaaatgccgcactccgctcttctgggatcaaactggagaacgccaattgtttgggacggaagtattaactgaagcagaggagaaagtcagaaccgtcagagaaaggctaagaattgcccagtctcggcagaagagttat

SEQ ID NO: 28304 - DNA, 2431 bp, Oryza sativa
tgatcaggttttgcaaagttcagtggagccaccactcataagaagaggccacctgggaaagagaagatgaattgaaggccgcccatccgcacctatttgtcagctcttccgaatctcggggtcgagattccgtttaaggggggtaagcttgcatgcctgaaggtcgactcttcccttgctctaaattcataaaataaatcgtccgaagaaattgtttaatttaacctagagagaaaccctaaattaataaatgcaaatattaatcggaatcggcatgtggaatttttcttggattctacatgtcaaaatacgctaacaggatttttagtggaattttcagagcattggaaataattttaaccaattaaaattgagcttgtgcaatatataaatccctggaaaatcctttcttcttttcttttccctcctttttcctttttcttgggcccggcccattccctccagcgccggcccgcttcacctcccgcgccgaccttccctcggctgggccggtccaagccggcccactccctccctcctctctccgggtcaccgacaggtggggcccacctgtcggccccttcttcctcctccagccgacggcaccgccgccgccgaaaccgccaccgacgccgccggtttccccgtttcccgcgcccactccgcccgtaccgcacgcccacgtcgccgcccaccttccccgcaccttccgccagctcgcgcgcccgcaaacggcgggggatttgaaatttcccccactctctctctcctcctccatttcccccacgtcgccggccaaatcggccacctttccggcctcgtccgcccccccgagcccatataaaccatccccgcactcccctccacctttttcctctttccgccgctctctcccgtgccctccatcactcccgcaccgctacacccgccgccgccgccttttccactcctccggtcgccgctcgccgccgctggagccgccgccgagccaatttgccaccgccattagcttcgccgccgccaaagctaccccggccgccgcatccccatccaatcccgccatcggggcccgcttctctccgcgcgccggtgagtaccaccatagccgccgccgtcggccatggtttccgcccgccgtagaccaccctctctccctctaacccctcacacttcctctcttagggtgtcccggagctcggccgccgttcgccgtcgcccttcggtcgctcaccgtcgtcgtttgccgtcgtttcctcccgcgccggccgaaccccggtgagaactccctctctcttcctcccgcgcgcgccgccgctccccgcatgcgcgtcgccgcgatgcaccgtcgcccgcgtcgccggccgccgtcgtcttctcgccggccgccgccgtcggaggccgcttgccgccgccgccctcgccataaccggccggccggcttgaagccgagccgagccaggccgcttttccccccccccccttgtgacgctgcccggtgggtcccgcctgccagccgcccctctccctctctcctgtgcctctgtcccgtgggtcccgcatgtcggcgccgccccaccccttgctgacgtcagccctgggatgaattattgcgcaataaattgattaagggtttttcttttatagtaataaacacagtgaatcttctaaaattcataactaattcatccgagctccgattaatcccattcaagtctcagtaaattcataaaaatgtgtagaatccattaaaaatggttttgcttcctgtttcagtagtcttatagcatgttttgcttgtgtgctttgtttgtcgcgtagatttcgcccgtttcgtcgattcgtggtttcgcgaagacgttgctgtggttccatcagtgcgagagcaaggcaagtcatacattgcaattgatcatattgtacctaatttacaaatgtcccgcatttctattaaatattgcattgttttacaatatcatgtgggatgggtcctattactcagctatatgttgtttcccttatgccattgataacttgggtattaaaatgactagatgttggtttaggagatgcttagccatgcttagttcaactagtgcacaaaaggggaccacattaaagcatagacttgattattggcaatagctttggattagtgccaccgcaatggtgttgcctaattaaaatacactacatggtgggctgtgggtgcatggttttgctagacgtgcccatggcgattaaggaccggttcgcgggatgggtaccgagctagaattcgcctgtagtgatgcgatgtcaatcacttgcatttgtgttgtttattgttatttaggtaatgcagtgtatacaatcaaatctaaactgaatacacacacgtagaaggtataatgcagagcacagatgtgacaatctatagtgttacaccctacaa

SEQ ID NO: 28305 - DNA, 1607 bp, Oryza sativa
attatactaatgtatataccttgcggcctgcaagcgtgggccaaacccaccgactaattatgctgtagatggcttcattatgcttgctggtgacacattgcactgggagtgagacatactcggagtgatttacccaacagatgctattggagagaatactgattctgggcccgattcacgttgaagctgctcagctgcagcaatggatgggttgtttgcaccatggtggagggatgatgcaagaggcatatgtataggaatcacacggttcactaacaaggggcacattgctcgagcagtgctcgagagtatgtgctttcaggtgaatgatgtcctcagctccatgcacaaggatgctggggaggcaggagaagtgaagagtgcagaaggggagttcctgctgcgcgttgatggtggtgctactgtcaacaatcttctcatgcagatccaggtaataatccttctcacgagatttaaaaagaataataaatactctgctagcttttccattggaacagtggaacatttactatcacgcagatgcgaaatttctgggttgatgagcaactacgtttaagagtaaaataattcaaataggttatcaacgttgatgttaccaccacctgaaatgttcatgcttatagttgtgcttttgacttggtgaaaatgaatgaaatgcaagatgttggctctttgtgtccctctttctatttaagggtaaccaaagcaccaattgttaccttttgcacataatgacctcttacttctgtgagtcatacttgacatgattgcagccacatctgtacagcactatgctatcaatctcaaacaggaaaaaaatatataagtactgtcttcatctgtaaacaaaacagtagtgctatgaactgttatttcaaaattcactatcttattgataactgatctttggctaatttacttatatcctcctacagtacagcttactgaaattagaagcttgagctaattagttaaatcctcttatagtattgcttactgaaattgtcttgaaaaacaatctttttaaatgcactgggtgtaattgtagctgtagcttagtgaaacgtttctctttgcaattgtaaaatctctccaaattcccataagatcactgattttgcatgcacacctgcaggctgatttattgggtagccctgttgtcagacctgctgacatcgagacaactgcccttggagctgcgtatgcagctggattagctgttggagtctggtcgaaggaacaaattttcgctggtttgcacaaggagaacaccagagtcttccgcccgaaattggatgaggcccacaggaggaagagagcagactcctggtacaaggccgtttcaagatcatttgatttggctgacctttctctttagaatgacgagggatttgtgaattacttctggattgtataaggtgcttagcacttgttatgtccatgaataagttggtcaatggaacatccttcaaaagaattagttgattccccacgctttgctgctggaattattaagtaattttcaatatacttttttaacaattgagataggagtaaaaagaaaaaataatgaaatgtcagtgttt

SEQ ID NO: 28306 - DNA, 11154 bp, Oryza sativa
tgggttgtaactttatgaaaaagctttggagtgagtgggttgtaactttatgaaaagtatagatttatcttcttggtatttatggcagaatcagatcatattgttacaatcacaaatttaaaatatcaccaatttccaccttttggttttgatcgtgttgtgaacatgtagtttacagtcatgcacacgtctcctggagcatacaaatgtttgcattgtcactatatggagatgtagcattaagaaattccaacaattcatgtacaaattctgacgggcgaacacttcagacttcggagcgagacaaaagaaagactattaatcagagtttgaaggaatctcttatgagaaccccctaatcctttttccatagtagttattgcaacggatacggaaataaaagagtttatgttgtgttgttttgagatatcgacttaaaaagaaacttatctcaaactatcgatatgtggaagagtgcattgttatcgatgtgaattggtttttaaagtagttaagatatactatttagaagacactgagcaataattgctataaagagtcagatcaatgtgttcgatgttggattatcaagcctacatcttacaattagtgctatcgacccaagtcttgataagcatatgttcgatgttgcattattgcatatgctcgatagtactaaatagggggtgtttaatgcagtggtgtaaagtttagcgtgtcacatcggattttatatagggtatcgtatagggtgttcgggtactaataaaaaagctaattataaaatccgtcagtaaacaacgagacaaatttattaagcctaattaatctgtcattagtaaatgtttaatgtagcacaacattgtcaaattatggagcaattagatttaaaagattcgtatcgcaaattagttgcaatctgtataattagttattttttagcccacatttaatacttcatacagttcaaatgtttgatagaacaaggtgtaaagttttgagatgggatctaaacatggacttttagtgcttttcacaagtacgtattgctctggtcattaataaactacaatttttctcattttccgtgttcagcagcaggtgaaatagagaagatttgtctagttttctgcgctcatactttttaaactattaaaaggtgtgttttttaaaacaatttctataggaaagttattttaataaatcatattaatccatcttgaaaatttaaaatagttaatacctaattaattatgtgctaatggctcccttcgtatcttctcaatgtttactttttctctcctgtcaaacactcccggtatactatagtttagacatgaaattttggaaggtcacttatggtgtggtggtcactatggttcaaatgttggtgtacacaaatagtatgcatattatgcttttaacagaaaattaatttaatgaggttagagatttatcgagtatgtgttagaaagtgcattcgtgcgtatgtgaatgtggtttgtcttacgtgtaattaaaaaattaataggtttttctgaaattttaatctaatttggacattgagatctataagatttattagggtactgtccagatttattgcgctgtgatatgttctattcgatgtggaggtagacaggtagtatatgattttcaatttcccctattcaaacaggcttgcaaccactggggaacgatttttttttttgacaacaggcaaatgcattacccgggctttagaaaaagcccaagagacaagggaactgttcactttgatgtcaaaaaaaaaaccttaccaaattttggcattaccaaaattttggcatagttaccagaattttggcaggatttcttatatagttaccaaaatttgatagcaaactaaatgtagccacttttttttgacaactttcccaaaatttgataaggttgaaaatggcatcaaagtgaacaagcccaaggtctttacttgggaacgatttgtgcccagccggccgagaaatttgataactcgagaaatctctcccagccagtcagcccggttctgtccagcaggcagcagcgagcaagagagttggaggcgccgccgtggagaggagggcaactgtggccatccatcacggtggagacggatctacacgcactcccaccgtcccacggattgaatctaccgatgcgggtggcggtcgaggagggaggagtgatttgccaccgtcctcctccccttctgagaaattggacattctgccactaccaatagtaggttattctgcggaatggcgtcgttaaaatgccactttcaaccgatgccaaacatttattttgctatttcagccatttcataaaattttcaccatttttcacacttcaactgaccaagatacccttctctcctgcagtttctttcacctcctcctccggcgaacatgtgggaagaggcaaggctgtgcgaggagaaggggaagagacggcgctgtgcgaggagatgttctggacaccgtcgccggcaagagaaggatgaggcggccatcctcgtgaagtgcgagcacccgggccgcgctgtagcggccgacgcggcgaggcgcgagcgcttcgaccgcatggcggcgtctgactcagcggccgcagcctgccatttgtggtcggcgtttgactcgatgacgtggcggaaggatcctcttgatggactgaagctatactccggcgacgagcactactggtccgtgagctcttcttcttcctcctctcctcctcttgatacacatgtccatcctccattcttgtttcatggctgtttcttgatttgattctgctcgtcgtttgtgacaaagcatgcgtggtgtagtcggtcgggttcacggcggcgccggtgttcgccgcggccgggatttggttcgtcgtgttcggcgtcgctcaccgctgcgtacgtaatttctccggtcacctcgccgccggtgagtaaactaaccagccgcgccattgttgcaacgtggggtgcggcgtgctgtacgatgggcaggggcggttcgacgggagcacaacagcgacggtggagtacatgacgggcaggggcggcgagcgaggtgaatatcttggcgatggagcacttcttactgttgtcccctcctcctcctagcttttgcttccagccaacgttggtcatagcggtggcgatggcgtcgtcgaggctgagcggtggtcctcgcttgtgacggtgacgaggtggtggaggtcggagagaaatactgcccggaagggtattttggtcatccaggtgtgaaattaggtagaaatagagagaattggcccaaatgccaaaacaaatgtttggcatcggttggaagtggcattttaacgacgccattccgcggaatggcattgtggcgaaacccactcttggcagtggcttaatgtccaatttctctcccctacttgcccccggtccgtcgcatacagatgccaaccggctcattcgcggcgtctcctctccctcgccccgaggtcgctcccttgtaaccactctctccgcatactatatcttctaatgcccgctcgttctgattctggagatacgacgactacttccctccgaggcaattcactgggtaaagagaaccgcaataatcctggtaggttcttcatttttatcactgtttattctaaatattactatttttttctatcctttcatgactgctggatttaatcactacttcctctgtttcacaatgtaagtcattttagtatttctcacattcatattaatgttaatgaatctaaatagatatatatgtctaaattcattaatatcaatatgaatgtgagaaatgatagaatgacttacattgtgaaacggagggagtagaaaatatgtgtcaatttgagggagtagaaaatatgtgtcaattcgatataaaggattgtgtggaactgcaccgtgtttatgagaatacagatataaaaataaggttcagcgccttttgctgtctttgcgaggggtgatcgggtgagacatcaaaggatcagtaggagtgactaatacacgagaatcatgtgaattttgagtgatcagaaatatataaggtcttatggtcttgtgcatgctgtctcaacgaaactattactggcatgtatacaacataggttcttttttttcaatgttaagtccattttctttaggcaaaccaaccctcctccaagaagaatgatccctaggatacgattagccggccttgcggttgcaaagggatttggacatcccccacgctgacttcctgccttcctgcattgggttagggagctggtcagtaatagcccctaggaggctgtgggctcaactccaagccaactcacattagtaactatttgtggatgagaaattttacagttcttgagaaagtatatagagataccaagagtttgcactaaaagttttggtacttcgagatacctagtacctataggtacctcttggtacccttttaaggatggtaaaactacccatttgtggataatcatccttcttagaggcactatacaacaactccaataagaaaactgaatgctgtgttaatgatgggaagtatcagggagagcaaattgtgttgcaactttgcatgcttactcttgttattatcagttatcgcatatcgcctccctcttcacgtttgcgagaaaatgaggttattcgtaagattcattgggatattttatcaaactaagaggaaccttttcaccacatggttttctattgatgtctatccatcttatattgtgccctgttcttcaaaggaaaattagctgatgttttcttcactactttttttttagaattacacagtacaacgcagacactcataacgcacgcgcactcacccctataaacacacgcacgcaaaccctacccctatgagcatcttcgtagactgggccggcaaattctggaaagattgacgaacgcaaaccctacccctatgagcatcttcgaagactgggccggcaaattcttttttttttagaattacacagtacaacgcagacactcataacgcacgcgcactcacccctataaacacacgcacgcaaaccctacccctatgagcatcttcgtagactgggctggcaaattctggagagattgacgaacgcaaaccctacccctatgagcatcttcgaagactgggccggcaaattctggagagaatgacgaagtcaccacaggcgcttcgctgtcgacgggtacgtcgtctaccactgaaaccacaacgccgttaaatcctagaaaattcgctcctatggggagtcgaactcaggacctcagatgctactgagactcttgtaaccactaggctacaggcccttttacttgttcactactttcttataagttataagggaactatacaggtacgaggcatgctaattttgaatttctttcctcgaatacttagtctattcataaaatcatcctgtaggaaagtgcagttggattttttatattgtcatgtcaataaaaatgactcctggcaaaagcagccaatctgatttagtagatatggagaagatggtgaattctatcactagagaaatagatctgtactggtctgcggttgagtctgatgaaggaaataagctatgctcaatccacaaagtgccgcaacatattcttgaggttgataggaatgcttatgagccaataattctatcaatcggcccatatcaccatggagctcctaagctgacagccatggagagagaaaaatggaagtgtttagactttattctcaagttgaattgtgaattaagtttgcaggattacataagagcaattcataaactggagaagcaagcaagatgttattactctgaggagataccaatggaaaaaatgatgtttgtgaggttgcttttgcttgattcatgcttcatcttagtaaaagttgatagaactgttgtagcagcaatgcaattaaaagaggtgccaacagatgttactccgggaagtattgctgttaaagatggtctaaactctggtcaagaagttgaaagcaactgtcctatgcaaagacgtgaaactgagattgcggtgcatgaaattgaactaactaaatctcattttgatcatattgagtccaaaagtaatagaacggagcatgagcaaaatgctgactatgcatctggttgcaataattctggagattggtatgctaactatgcttggcatgatttgttcttgctggaaaatcaaatgcctttcttcattgttgaggcagtatacaatttagctttaagcaaacagagcaaaggcctttcttagagacaaaattgtcgaatgtgtagaagatatcctgcgtcaatttccaaaaggcattgaagaatctaaaaagcctaagaatttttatcatttgctgcacttatgtcatatctacctgcggccaacccataagtgtgttgggactaatcaaaatcactcaaaggtacggttttttcatcatctagtttatttaggacagaggtatgttggttctaaccaaaaggaaaatgaggaatcccgactgctaactcgccagaaggattgcttccaagatgagcaattaccaattcgatggcgtcaagcagtacaataccatgaagcaggagttcaactgaagaaaagggtatacagcatctatgagaaacattctctcttggacataaagttcagtaatggagttctagaagtcccatgtcttactatcgatgagaataccgagtctctgttcaagaatttaattgcatttgagcaaatggattctcaatatgaaaactatatcacagcttatatcgcttttatgtctcagcttgtaagcacttctgaggatgccactctacttactgagagagggataattgttcatatgctggataatgacgatgaagtgtcagctatgttcaccaggctcagcacacatttgatatttggttctgatacctaccactaccttcaaactttatcctatgttttggaggaccattaccaaagcaggctgaacagatggatggcttggctctggcgtaatcacttcagcaatccatggttagcattaggtgtgttggctgcagtggtcgtcctactctgtaccattgttcagaccatattaacagtcctagcctacaggcaaccccattgatgatggcatttttattctctttctaagtgaacacattcctatttcttgttcaatttggtactggtatatatgttatctggtgagaatactactgacaggtatgtatccaattgaaatatgatgctagagtaaagtgcaactcaccttagatcatcccggtataaagtgaaacacgatgtaatttacctggtgcgaagtataatgtactagaaaaacagtaatttgcatggtcttcgattagtaatgtgaaacctatcctacttaacattcttttcaaataatgagaattccctttgcaattgcgtgacttgacaccattacatgtttgtatttagagttagaattataatgtgtgcaattactgtgtttgttgtttaaaataaaattgtacttctttcaacatttttgtatcaatcaataccactggaatctaggccactacaatcaacagtgtagaactaatttttgctcataaccttcgtaatttctaatccttgagagcaaacttgatgatttcttttaaccttttatgtactttagtttaatataacaaacataagaagtcttttaggaatatatagctctcttgtgcagcattgcaatagaaactactcacaattttacatgatggtatgcttgcatgtgtaatatttgtactaaatttactaccctccattgaaactaacatcattttctgggacttctattctacatattaagcaacaggacaaattatttatttagcaatagtgaactaaagggtttgttcagattgatgccatttcaaaccatatcatttttttggtagaattgccgaatatgcgcatccatttagtttttttttgtcaaactttgataaatacataagaaattctgccaaaattttggcaatttaaaaatttggtaagatttattttggctacaatctggacagcccctaagaatattgtgggggtccctttattttcccacgtgcatgctttaaatagaatctactagatatttgattccccctagttcgctatgctaagtgcatttgatcgaaactataccatgtgactagagttgggatcacattttacattactatataaataggcatgcgagctgcttatttcatcatctcgttttcacttccttgcagcgaaagatggttgtcaaagcagcgttcgcagttgccatgtttttgctcacaaccaatatgctcgtttctgttgccacacggtctccggataacctcctaaactcttttcctgaagaaacgggtcacgtctactcagcgtcaactgtgcagaagatgaccgaatacaagcccacgactggttagcatttcattgttctattacaatcgcttaatctttttttttctgattctttcgactcgcttaaatgttagagtatttgcacacctcatacctgacgctggactctctttttcttgacagctcaaggtcccggattcagttccgaagagaaaatagtcatgactgggcccaataattttgtctggccgacgcgccctgcaccgtgcagctcacgaacctgctaaatcaaccacagcttttgctgcatgcgacgtcgctgagatgatcaaaatatctttctatatctgccattttctctgtattgtcgaactgctgatgaactatggtcggaacgcttaaataaaaagcaaaggaagagtgagagagacacaaaattcttgttttacgatcttatcaccactcgtttactatgtttccgtttaattaaatgtggtattgcgatggatgataaaactagttataacccaacgatgcctcctggatgatccatgtaatggaccgaatggtagccatccaatgcagaaaaaactggcaaaatagagttgaacaatcgtagattcgtagtcaaactggtgattgaaccgtttttacggtagcgctaaatcgctaatcgcgcagtgctacgctcgattagtagcgcgcctcatggagcccggtttctcgttttttttctgttttccaacacgcacaacaccgttttattatttttccgccgcactccactcttcttcacataataacagagtaaaacaattgctccaatcccctctagcactctccaacaccgttaggctgtgttcttttatccatttcctaacttcttcttcctcatttttcgcatgcgtgctttttaaataattgaacgatatgtttttttaaaaaaaaactatagaaaacttgttttaaaaataatactaacatatttttcaagttattttagtttatgtgtaattaattatacactaatccccagaggtatgggttgggaatcacccataccccaacccatacctctcaacaccaaaatccccatttcgcgcataggaatgtgtcacgctcaccatgcgaccagccacgtggcacgctgggagaggcgagtgggtcggcgtgcacgtgggcgaggggagatggaacgacacatttttttatacattgtatatgtatatatttttatacgtaaaaaattatgtatgtatataaaatatatatacacttcacatacatacatacgtatatattttgtatacgcgtatgtaaaatttatacctatgaatataaaatatatacatatgtacagtaccagagaggggatgcgcgggggaggggtgtttgcgcaggcacacattagagcaggtacaatagcaagttataagccagttataaccacatatcgagaagaaaagataaaagagagagaagaaagcggctacagatttgtagccggctgcaacacggactccaaaacattatgtgtgtatgataggtgggaccggtattaatggtgtagtatatttttatagttaacaattatatgaatgtgctattagattaattatagatgatttggagtcattaattggctatagtattatacttgctcttagccccctctccccagtccccacaccccacagccttattaattatgctcccacgaaggaggtatggagtattcggttcaatcgttttctataatcttggaatttaaccagaccagactgaaattaagggtggagctcattggtccggaggacgactagtaaaatatgttttctaaaaggcctatagtgtaacgcgtgtcgggatttggcctgctaatatctccgcctcttcgcgagctctaaacgggacgaaatatattttgcaaaacctgataaaatttgctctatgaaactatatatttgtgacatttacgacatgacactataattttttagaaacatggtacaaatgctggcgtttataacacgtgtacactcacacgtacactttacctttataagtagcttcaaaagacttggtcgatatatcttgaaattgataaaagtcactatgacgtcttactgtcgatgagtacgtcgcctgccactgaaagaataattaaccgtaaatacgagtacccgtgtcaagtgtagaacttgtacccaggtcgattggttctaccaagtaacctaattacttcatccgtttcatattataagactttttagcattactcacattcatatatatgttaatgaatatatatatatatatatatatgtatgtgtgtgtatatatatgtgtgtatatgtatatatgtgtatatatgtatatgtctatatatatatatagacatgtatatgtctatacatatatatatatatacaattacatctcacgagaagcggagcgttacaattatacagtacaacgcatacactcacaacacacgcacactcacccttatgaacatacgcacgcaaacactacccctatgagcatcttcgaagactgggccggtaaatccatcctggagattgacatcacccaggcacctcgctgtcgacgggtacgtcgcctaccactgaaagcacaaagccgttaaatcttgcaaaattcactccatgggaagtcgaacccattacctatggtgctactgaggctatgtatttaaa

SEQ ID NO: 28307 - DNA, 1880 bp, Oryza sativa
cttgagttttcgaagtcacccttcacatgaccctcggtttcgattaaaggtggctcccattaaaagattattaggccataaatcggaccctcatatcaactccagaactcatcgggttagttctcttagacggaatctattaagtaaagtccgctcattccgcgtaattttgatttttttggtttgtatcctttcctatgccttaaattatgcattttgtgcaaaaaaaaagtttatataccaaaaaacgatgcattatcctcgcaaaaaaaatgatgcattatagtaattctttcgaaatattttttgcaaagtacttttctcaactttatagtagttattgattcatttatacctcaggttgctataaaagaaacagattattgcatcaatttcagctatctcagacgcggccgatatcttccatgtaaattcactgtgaaactcgtgcattccatctgaaaacttacccttcattcctctttccccagtccccttctttcctcgcctcccctgagtcatcacagtcacaaacgtcatgcgcggatcgggcagtgagcgatgggagcccacgagcgaccgtaaaattagccatccgcaaccgcaagagataatgagatgtgttgatgatcaggtaccgctcctaattggcttaaccaatcaatctatatgactgtagcccgcctggatccggctgatccgaattttgctgatactttttccggaagattttccagctcccaagagaaatcctaccgaataaacgcatttctgtagcatcgtcgtccgtatcatttcgtcgagggattacaggcacctgtaagcaataaccctacctttcctcaacaggctcgcatcccatcgtgagaatttcgtctgcgtttcacaggttccttcgttctcctttatattacccgtcgatagtaatccccgtttaattctaatacgtttatggatgaaatatgaaaggaaaagagatatggcatctattgaaatgagatggagaatgtcttgaatatcgatttttgttttattttgtcgtatacttctgttcaaggatggagattgaaacacagaacaaacatgtatgagtttaaaataggaaaaatgctaaaatttactgctagtgcataatttatatacttaatactcctatattgtttcttccgtttgattcagtatttgttactcccttgttccatgttacaagtcgttttgatttttttaaaaaaactttgttaagtttgataaatgtatagaaaattttagcaacatttataataccaaattagtttcattaaatttagtattgaatatattctgataatatgtttgttttgtgttgaaaatactcctatgttattctgaaaacaagtttgactagaaaaaaaaaatcaaaactacttatagtatgagacggatggagtatgtgtaaattgtgatccatatatttgtgtggtaaatattggatatgacaaactttttcatagcccttaccattactaagtttggttccaacttttttttccctggccagatattaggtgcactcaggatgaatcaatgtgctattgttgaattattgcaatctttgatgaaaagttgctcattatgctttattatttttatgccggatattcaactatataatattccctctgtataattggccttttcacatcttaggagttcgatagtaaatgtttagtattgctgatcagtttaaccatgaaagatacctcaacaggtgaggatgcggcaagttcagagaagtaaaaacaagcaaataaacatgagtgaactggttaactccatgacgcaagaacttgattattattggtcactgggcactgatattgataatggaacagaatcatgct

SEQ ID NO: 28308 - DNA, 739 bp, Oryza sativa
tgccatttgcaaactggcttgataactgttgttgtaagagaattccgcataaggtagacttttatcccatgctccaccaaaatcgagcgcacacgctcgcagcatatcttccaagatctgattgaccctttcggtctgaccatcagtttgcgggtgataggccgtgctgaaattcaaacgagtccccaattcttcttgcagtttctgccaaaattttgaagtgaactgactccctcgatcagatacaatcttcttaggtaccccatgcaaacacatgattcttgaaaggtaaagctctgccaaccttttcccagtataggtagtgtgtactggaataaaatgagcaactttggtgagtcgatccacgaccacccagattgaatcgtgacccgatgatgtcctgggcaaacctgttatgaaatccattccgatttcttcccatttccattccgggatctgaaggggttgtagcagtcctgcgggcctctgatgttctgctttgactcgctgacaaacatcgcagagtgcgacgaattcggctatctctcttctcatgctggcccaccagaatttctctttgaggtcctggtacattttagtactgccgggatgaattgaatactgagtttgatgagcttctgtgagtatgagatccttcagttctttgtcgtcaggcacacacaatctttctcccaaccagattgtgccatgctcatcctcatggaaatctcgggctttt

SEQ ID NO: 28309 - DNA, 712 bp, Oryza sativa
ttcggtccattacatggatcatccaggaggcatcgttgggttataactagttttatcatccatcgcaataccacatttaattaaacggaaacatagtaaacgagtggtgataagatcgtaaaacaagaattttgtgtctctctcactcttcctttgctttttatttaagcgttccgaccatagttcatcagcagttcgacaatacagagaaaatggcagatatagaaagatattttgatcatctcagcgacgtcgcatgcagcaaaagctgtggttgatttagcaggttcgtgagctgcacggtgcaaggcgcgtcggccagacaaaattattgggcccagtcatgactattttctcttcggaactgaatccgggaccttgagctgtcaagaaaaagagagtccagcgtcaggtatgaggtgtgcaaatactctaacatttaagcgagtcgaaagaatcagaaaaaaaaagattaagcgattgtaatagaacaatgaaatgctaaccagtcgtgggcttgtattcggtcatcttctgcacagttgacgctgagtagacgtgacccgtttcttcaggaaaagagttaggagggtattcggagaccgtgtggaacagaaacgagcatattggttgtgagcaaaacatggcaactgcgaacgctgctttgacaaccattttttgttgcaaggagttgaaaccagatgatgaatat

SEQ ID NO: 28310 - DNA, 715 bp, Oryza sativa
tactgagagagggataattgttcatatgctggataatgacgatgaagtgtcagctatgttcaccaggctcagcacacatttgatatttggttctgatacctaccactaccttcaaactttatcctatgttttggaggaccattaccaaagcaggctgaacagatggatggcttggctctggcgtaatcacttcagcaatccatggttagcattaggtgtgttggctgcagtggtcgtcctactctgtaccattgttcagaccatattaacagtcctagcctacaggcaaccccattgatgatggcatttttattctctttctaagtgaacacattcctatttcttgttcaatttggtactggtatatatgttatctggtgagaatactactgacaggtatgtatccaattgaaatatgatgctagagtaaagtgcaactcaccttagatcatcccggtataaagtgaaacacgatgtaatttacctggtgcgaagtataatgtactagaaaaacagtaatttgcatggtcttcgattagtaatgtgaaacctatcctacttaacattcttttcaaataatgagaattccctttgcaattgcgtgacttgacaccattacatgtttgtatttagagttagaattataatgtgtgcaatactgtgtttgttggttaaaataaaattgtacttctctcaacatttgttggataaatat

SEQ ID NO: 28311 - DNA, 712 bp, Oryza sativa
atctgaagtggctcagtgcgctgtctttggttaccacatgaagatactgggatgctgacaatcctcctcttacagttcttcatccgattatgctcactttcgagttgtatggctttgtccacaagtttctcaaaatcttcatattcctctaggagtagttgcactgcgatctcatcttttaacgcctggagaaacttctcttggatgtcttcatcattttccacatcttccggtgcatagtgagccaaacgatggaactcgtgcaggtactctgtgacggtcaaatcttcttgattcaggtagcggaactctcgttttctcagtgtgatcattcctgcgggaacatgtgatatcttgaatacagatgaaaactcgtcctaggtgatggtatgtccttctggccgtgatgcttcgtagctatcccaccattctgaagccagtccaaccaactgatgagttgcgaagacaacccgctcctggtttgtgcactgaaccaaccccagcttcttctcgactgtgcgcaaccaatcactgccttccataagatcgacggcaatggcaaaggttggagtcttagtttttagaaattctgataactggcactgttgctgcactggaggttcttgaacgtcggttgccctgcttgggtggttcaattctgaatagttgaaagggtttgccaacttttggtttgttaaccacaatttgaata

SEQ ID NO: 28312 - DNA, 705 bp, Oryza sativa
  unsure (1)..(705): unsure at all n locations
cttctgagtggtggctccactgaactttgcaaaacctgatcaccttgcttctggtctttctctcactggtctcaaggatacgaatcggcttctccacataagtcagatcttcctggatgtcaatgtgctctgagctagcttgttcctcaggtaccctcaaacacttcttcaattgagatacatgaaacacatcgtggattccaaccatattagatgggagctcaagctggtaagcgacttcacctcggcgttccaaaatcctgtatggtcccacaaagcgtggtgccaatttgcctttcgtttggaaccggtgtactcccctgagcggagtgacacgaaggtacacataatcccctgcttcgaaagtaagctctcttcggcggttatcagcataactcttctgccgagactgggcaattcttagcctttctctgacggttctgactttctcctctgcttcagttaatacttccgtcccaaacaattggcgttctccagtttgatcccagaagagcggagtgcggcattttcgtccgtacaacgcttaaacggtgccatttgcaaactggcttgataactggttgttgtaagagaattccccataagggagacttttattccatgctncaccaaaaatcaaccgcccacgcctcgcagcataatcttccaagatctgattgaccttttcggtctgcacatcaattg

SEQ ID NO: 28313 - DNA, 682 bp, Oryza sativa
tataggtgtactcatctcatcataataatccttcctaaagatggttagcgctagaaaagacaaggtcatcatccttgtagtaatataaagctcgtaaagactccaatagatattttgatcagcataataccacccaatatgtcttgcttctctaccaattccctcttcctagatgcgaaattatccataactacagacgtatgatctacttcacctttactgccgagctctgggcagagactttgacctaaagaacttaaagaatctgggagtagcttcaatgaatcacgaaacaccatcctcctgagtagtccctttggcgactaaacgcgctttgtaccgctcaatcgtacagtcggacttgcgtttggttttgtaaacccacaacctaccaattatattgtagttaggactaggtggtaccagtacccaagtgccattatttgcaagagctgaaatctctgaagccatagcagagcgccactgtggatgtttaacagcccctgaataacatgttggtttagtctcttgattggaaggaggcaatggatgcagggtagatgagtaggcaatgaaatcagggaatttctgaggtttcatagtgcgatctgtggttcgagtggtcataaagtgtgtcggttggtgagagtgttaacgacatggggaaggaggaggtggacct

SEQ ID NO: 28314 - DNA, 60172 bp, Oryza sativa
aaatgctagaatgacttacactgtgaaacagagggagtagtactgtagtcctaatacactaaaagataccatccaagtaaaagttggagttatggtttaaaagataccataagaacagatacgcatgaccacatgcaagttagatgatcaattatcatgacagatcagaccttcatgcttcattgaagtccattcagaacatatcaggatgttaaagacttgtataaaagaaaggttacactagaccaccagtacaatactccctccattccaaattgatctacatatttcataggtacaccaagaccaagaaaaactaataactctctcatactatatttactctagcaacaaactcaatgcatgcaccatccccactatttcctagccaataggaaatcaagatattgcatgtgggttataaatacttgtatgcatggatgcatgcatcaatgtccatttactccaatgcacaaataacgaatagacttaatgaatgaacacaaatatgtagatcatttaggaataacctcaaaaaaactatatgtagatcaatttggaatggagggagtagttgttaaaaggccaactccctaaatcgttggtcggcattcaaaggaactcggttaatccctaaggcatgcaaataataatatgaagtatcacaactagaaaaaataatttaaacacaataagagattgaacacattcctgctatcatgattagaacataacaggactgaaaactgacaaggacaacaccctggaagtatcatgcagccactgtattttataatctgtagatgtatacaacaaggtcgttgcagggtaaattgaatgccatttttttcatgaataagatctgcctctttcatcttttggcacaacatgtttacttgtatggtgataagagtacaaggactttactttggtccaacggctagtagaggttatgtctttactttctcgaagcattgatttgaactcagctatcacagcattgcgcactgattgaactttctcttcaatcgatttcaccctgtggaaaattggaaatgcgtcaagtatagtacatgaactaatatgatttaaaaattgatattcaaaaatgttaatagaagggtgtgcatacttctcgttgaaaagagcatccctttcttttcggtccaaggcttcaaaccttggatcagtgccccattttcttttgaattccttgtaatccttattggagttgatgtcctgcattttatgtattaagatggtatgaccctaaaaaaaaagcaagtatacaggacagaaaactggatccatttggcaattatcgcacatcaaagtaagttcatgtgaaaaactcaaacaacttttcagaaagtatcaataacgaacctcggatgcttcttctagtaactgtttatacgcctccactgcagctctctgagcagctcttttctctttccgctcctcgtcagcacgtgtccgaacatactgctcaaatgtagaccgtctcctcgagtgacttggaatagcctgtgacggacaatctagtataaacatcatattactaaactaaggaaaaagtctacttaacacctagggcatgtttggaaaaagggttaggaaaatgttatcccaccctccaaaggacaggatataatctctaccatcaattcatctcacctcagtttatcccaacccttcattcatttctatttcccaatcccaccctccaccctaaagcataaaactacatattatgcatttgtgcctcctgaacaatgcaaaatgctgaactgtttaaataactgctagtgtggttttgaaggtagtttggccacatgacctgtgtggcatggagtggttttgaccatagtcgctgaggcaccgcttagatgttaaggaaaattcagggatcaaggcatccctccaccttgtgggcacaaccaggggagagagagagagagcagaggagaaggcaacatagacagtagtgcatccatcctaatgtggatttgttctaccatcctccccaccgcctcaccgccagtgaccttgctgtcttagcatcgcccaatccagcccatcatcctcatcctattgccaagtttagtgttccattgcttagcaccgatttactcctctcccttcccttctgctctgcctttgatatagtgccatgacaccattgctgctcgttgttgtggcagctaggttagaagacacaggggagccaggctaggaggctgcgggagtgggaaaggataacatgtggactggtttggtgctttacatgggctgttaggtttgagccttagtgtgtaatgtgttgtttatagcccatattttttatcttttcttcttttcagctgtgtataaggtatggccttgtcttacgtgttgccttgccttcaccttaccacttaggctgtaaggcggtgactttgcctcaccttatcaccttagcagccatggttttgacaaataagagatgatatctgccttcctcgcaaactcagcaactaaaaatatttcaattagttctcatgccactctcggaacccccatgaatgttttgcatggcaaaataatcttaactgtataacacatggaccttgattaaaaaaaaaattagccttaagtgatggctatgtgtcagccatgtcactcgccaggtggcaaaactaccttcaaaaccacggcatcttaggggttatttagatcattttgagtttagggagtaaaatgcttcgttttatactgaagggggccaagtagaccctgtcctataatttataggattagcagtttagcactgccactgtataaaggtacgacacagcagtaggccaataaaagtaaagtatatttactaaacactataaaaaatgaagtgttactgtgtaagcatttagttcttctaagtaggacacatcaaatacatagtccagtttttttttcctaatcggctggaattttgaagtctcataaatcaaatgaatgtgcgttatgttttttcccaaatttcctgaacaaaagttaacaggcatctatgtacaacttactaagatcaagataatacatcctatacgagtaacaaaggtaaataatcaaccaccagaaactgcacatgacatcatgcattacaggtgaaaaatgtttccgacacccaaggtaaccatagcataattttacaacaggtcaacagcataagtgatagtatgccaagtcataggcaacgctaagaaaaaaaattaacaagtctacaaaactgtacaaaatgccaagaaaaacaaaccttaaaacgtggatcaaacactatttttgggagttccttttcccactttgaaaatggcaatacacctctttcctttaacatctcctgtgaaattaaaaaactcatttaggtcatgcaatccattcgtcaaaaaatcagctagttctattcatgatttcatatagaactgaggcacagctatcctaattatccaactacacaaaatagaaaaccaaaagctgtctaagaaaattataaagcaaaccgtaaattgcagaccactacaaaacagtaatgaccaaacagaactaatgtaaagtgataacatggaaaatttcaatgacaaacaaaaggctcagtcagaagtgaaaataccaccttaaactgacgagtacactcctcttcacttgggccatgttcctcatcatctgaatttgaagaggaatctgacatattaccatcaccactgttatcttttgatttctcgccgctaattgagacttgatgtcccataggtgcagcatcagttgttttagacccattcagctcggatgcactagatggagtagcaagaggtgaaggcacactggaagcgccagcatcctgcaatttcttctttattaaatccaaagcagaagacgatgcaggggcaactgtttgtcgaagtggcaacgaatcacggccacctgtctgtacagcaggagtatcaatatcaatacttatttcctctttattccctatcgtgccagcatcttgcagcgaagttgaacttcctttcaatggaccagactcggcattcttgatgagctcagccacctctggtggaagctgccagctgctaacctgttcagttttagaaatgagttatatacttatatataagttcttgtgaagtcgtggcattgaaatacctacatagacattcaatattgagattatgtcataatataggccttacctttagcttattatcatagtaatatttctttccatcacttgtcgttactatgctccagtcagtgccagccagtttgtccctgtcgaagtgaggtgtttaatttttcatgtggcacgaaatttatgagcaagaacagaataacagatcaagacatttatatgggtaaagagggaaagagcaaaagccaaaaataatagcagcattcataaatattgcaacttctactttttgaaaaacatcacagacctgtttgagaaagctcaattctagattttttttttctttagctaattaaggaaacatgcaaatttattcatcaacttggtgccatatgagaacattaatgaatgaactactagaaggctttgagcaacaaaatatcattcatatatgctcgaaatgaaaaaatgatctcacatagtatcattctgcataattagacttattttgaacacaatgagaacatatgtggtcaagtaacttagaaagcggctaacctacaggaaattcccgaccattccgcctatcgttttgttttgtacagactatgaaaaggaaactaccagtataccattttcatccataattctggaaaaatacggtatagttctgacaacccatcagaataaaatataccttagcctaaacccttgtgcatcatcatggcatattttaaattacttacacccttctttgaatgttcaacaacaattgcaagtgatgcgaatttataatgtaaacatactgtgatttgcttgccaatagttatattccaatagttccaatgttgttttgatttccatctctatgttttcaattccgttttcaagaaaaatatggttctggaaacgatttttccaaccattctcgtccctagttgcatgagcatgatgacatttgtggcctataaagtatttgttaaacaagcaccatagatatacaactaatcagccgctacacttatcaaggcctagttcggtagagcaactagttgtggcaacttcctcgttttctgttagtcccaaactgctaaacggtgtgttttgtgcaaaaaaattcaatatagaagtttttcacaaaaatcaaataaatccatttttcaaatttacaatggttaacacttaattaataatgtgcattagatctgccccgttttcttagcagtcatcagctccagccaaactgttgggacaaactaagcctaaataatgagtaccaagcatgttaggtagtcttgcagtcaacaccattttcagtttcagaaataccaaattaaagcaagatttatagtagtttcaaaaatgcaagataatgttagatctttttctttttttaaaaaaaagtaaagctttagggatttcttgtcttactatccatgtcaaacatgaattttgctaactttttggctattgtgcaggttaccagaaatcatgtaacaatgtcaccaaaatcggttgtcccaaataagttgtagcactcctaattgtgtggaaaacagaaaccaatttcaaaaggtgacttaaccagttacaaccctcacaagagaatatataatttctgttataaaatctgttaaagatagcaaagaatataggaagttctcacactaacgtaccaagaaactggaactggctgggctgcgaccttctcaggctgcaggaaaacgaatgaaataaattagttaaattgtgatgctaaattgctatgccgtagactagaattaagtcatattacttgatacagctattcctctgtgcaactacctcccctttataaccaggtggtttttgataagttgattctccagtcaaggcattgtaataatatacaacaccagcctctgtcttgtgtgcagaccatgaatctgaatcctgaatggcagtagttcttttgtcctcgagctgatcgctgttttggcttccctgttctgcagcatacaaaagatcacaagaattaactggaccactaatactgatcatcaaattaagtaaaactgtcccagttgatgaaagttaagctaacgcacgagtgggctgctcagatccaggatttgctgatgatagctccttggaatccctgtcagttgttgagacaccgggtggttgtatgcttggcaagtatgcagtcacagaagaactcccaaccatcggcctaccaagaggccctagaagaccagatgggtatgattggaaggggggttgctgaaaaccagtaggctgtgggggatatccccatagaggctgaggttgaaccccatgtgctgaaggataggaggggtacaactgttgctgaccaggctgttgaaaagcagttggagactgcgatgtttggggaaaaggagaagcagatggagtcataggtctcccaaggaggcttggtggagcagacaagattgtggaaggttgtccaggtacagaagcaccaatggccccaaaaacctccgggcgagttggaagtgatggatttgttggcatctgaacagtgattgaaggacttccagcagtacttgttgatggtgggcctgtcgacaactgcatggtctggggactagcctctgggacacttcgagtatcagacctggaagtgctaacatctgagctcccctgtaataattcaaaattattagtaaattgatcattataacccacgcatataaaagaaagttggtcgaagcatatacactgtttgaaggtaactgagatgcctggggctgtgcctgttgtgggcttgcaacaaaagtattgatggatggtctgggtggacctggaaatggcaagcgaatagatccaggaggatttggtggcatagctcctgctcctggaaatgctgaacttgggcgagctaaattcataggagctggaggttgcaaggatgatggtggaacaaaccgtgaaacttggacagcatggtttgtgccctggaagaaaagaaagcatcaacagtcagtcagtgagtcagagaagaggattcagatcattaagtaaaatggacaaataaaaatgttcaatattaatgctagcaataaagacatgaggaattacggtgtcaagttgaaactgctgaccagtaggcaagccagcattagcatgcgagactacattatatgaaaaagacggcctgttcccaaaatattgccctgggacaggaggctgaagagctgcagcagccactgaaggagccatcatggcctggaaggaaaagagaagacgaaagtttcacatggggggattccactctgacaagtaaagccatcatatggtacattaatccaacttaactttgttgagttgtttgctatgattgaataaaacaggaacaacaatagtcctctatttatatgtgttttgttattttatatgaattgtactccctccgtttcataatgtaagactttctagcattgtccacattcatgtagatgttaatgaatctagacacatatatgtttggatttattaatatctatatgaatgtggacaatgctagaatgacttacattatgaaatggaggaagtaccagattatgctgagacattaaagagccatgtaacttctgctgcataaacagctttcaggtgaccaattatgatgaactgattactaacagttttgtgaccaattttggttatatatcgatatgaaaggttcaacagttttgtgtgcaagaacttatcagcttaataacatttcacatgagaagagaaagactaatctcacaacattttgtatcagagcaaaacgtaagcaggcatgtttatcatcagatcaagataaaagcagagtaaaatgagaacaaaaattataaacacaactcgtactgctgctgcgtatatctaaacaagaaatttcttcagataaagtatgagctagccatcggctactgaagctaaacaggagttaacaaaatctgatatgaatcttcaccgccactaggaactataaatgctgcaatgtgttgatcagcaaattaaacggcagctgatatcaacttttgaagcccacaagagttcatagggaatctataaagcagaaattctcattttctgcagttgtatacaaataatagcactaattaacgcaacagtaagtcaccgctcataatctgagctgaacaccacaaattggtcccaacaacgctatataacattgcttctcattcccaaggaaaaaaataaaacgacatttcgtgcagttaaggtgaaaacaaaaaggtatggagtataatataattgcgatgtgaagcatagagggtgcacgataccctaccggaggggaagctagctgctgctgggccgcaccactgcccacctgcggccggggtgacggcctcggaagaacgttgtacgagaacgccggcgccggggggctcgcgtaagcgggcgacccggcgaactgcggccgcgggggccctggagttgcaggagacgccggattcgccggcatagacggcgccgcaggaccggagccggaggtaggagcgggagcggccggggcgtctccctccaccgcactatccaccaccgccggtgtcgttgccgccgcgacgacgccggaatcgaacggtccttccgattccgacgccggggcagcggacggcacttccgccgcctccgggttggtcgcgtcggaggcggccgtcgccggcgtcgccatgggagaggaggagtcggggggcaaggcctagggtttttgcggcctaggcgagcggagccggatgttgcgagaggggagcagtaaccggagcgagcggccgaattgagaattgggggatgcacgagcgttgacacgtgggccgtgggctggatctgggccgtgggctgtaatgggcgtcaactcgtagtttggccttggttttactcatgaaaaatttatgattaatcatatcttactatataaagttgatgtctaccaatctttaaaagctcaacatgtaagtgtgccacatcattacccactgataattattatctagagtattttaaatcacatgcaagcatgtcacatcatcatccactagcaattactccctccgcctcataatataagggattttagaggtatgtgagactatattatgggatggagggagtattatatatttcctccgtttcataatgtaagtcattctatcattttcatatttatattgatgttaataaatctagacatgtatctatttagattcataacatcaatataaatgtgggaaatgatataataacttacattgtgaaacagagggagtagagtattttaaatatcacgcaaatatgatataccatttatatatttttagaactcaatagacaattaatgtcaaatcattatctccacgtcattttcacattatttaagcatgtacatataccatttctataatatacaacatgcatccattcatatatcccgcgcataactcaaggtataaactagttaattattagggcatgtacaaagatgcttattaacggattctctccgttgccatgcagagtaattttggttgccatgcagagtaattttggtaacatagagaagagaaaggggaggaaagagaaacatgattgctacgcacgataatagctcagagtcaactattagcatttattaaagaaatttttgttgtatcaggtggataaaaggaaagaagagtaataaaaaaatatttatgtgcattaatgcgaaggttaagagattttgttgtctcaactattgcaggaaaatagtctctaagtgagtatgtattaactaagagctcatatcagagtatacctttgtacatgcccagttccacaaagaaacgattgtgtacagcaacagtcttaaaacaattgtatacagtaacagtgaaaaaatactgcatactgtggattcagtagtagaaatatcaaaactgtatgcaatgttgtcttttctaatccacaaagaaagcagtacagttcagtagtagaaatatcaaaactgttagtgtaatgctgtcttgtctgatccaaaaaaaaaaagagtgcagtacaacgtcatattgcagtgtcagcatgtatgtgcatggaacacttgcaattcgggaaccctcaaaactctagtctattctctaaaaatagaagaggaatgccctaattaattctctggccagaccaaatgctcgataggctcttcactcacttgccaagctccttcagatagttcatcaaatagttgactgtattcccagttcgagaacccaaggaaaaaccacaggttctcagcagattgctcccctgatttgattcgtctggtgacctgggctgtggcggctacgtttccataatacacaccgggtataacctgcaagtacccatcgaaggctactctggaaaggctcacaaggtaatagccctgcaccacaacaggtccgccgtagaaaagcggggcgtgcttgatcggctccatggagccgtccagattcttgaaggtgtcccagcttaagcgcttgttgatgatcaagccatgaaagccctcacgagagtcagcggatacgatgagcacctgggagttgtcaaatggaacggcagacccgagcttcgaagttgcagtgagcacggaacctgtgaggacacgtgcctcgttcctctctgaatgacttggtgaatgggaaccaacatcgttgctgattttgtcgctgttatcaaactgaattgcctgtggtgcatcaccttgcacgaccgttttcttcttccacagaaatcctgcgagccaaaaagagcgcaggcattagaatattccttcatcacagtgatagtggacagtgaaaacactttcttattaatctttggtgcaacatttgggaatgcccaggtcagctgcgaacggttggtttatatatgaaatgtgaacaatataaaggaattgagaaattagaataacaatgtcagaaaatatcaaagccattagtcacatggtggttcaatcaagcagaccactgttcacgtcgcattccctggggttttcagcacttctaacaaggtagtctaccatcaagcagctacccagccaagacactaatatacatcgtatgctagccaacaaaaagacagtggagtggacacttttgagagtggcaacaacagcgcatcctgtagtaacaaacactactatagtaagacaacatatatcatcgtactaggttcatttattttttaaaatttatgagttatgagatttttgcactaacctttatattccaacaggtggggtgaattgctagcatgagactccaagaattcaaataaattagaaactgaaattcctctttcatatgatattgcacttttgttctctgccggaaaaaacaacaatgtgggataacgctcctcctgtgaacacatgaaggttacattagtattgtcaatataagcacttcaatacaaaaatggtaaggtgaagcaaggcccttcagtaccaaaaaaatagaatagattcataagtatatttaattagatggaccatctatttatttttaattcaagcttcagtactgctgaacagaactatggtcattataacatctccaacagtctaatgacaaggtcattcttaagactcaaatgatgagactttaatagtttaatcagtccaaataaaccaaaacatacttcttgaatgactgttgccgataccggtacatttattacgaacaatgaaatgagactatttcggggtaaacaacagcaataagtatggagaacttctatctttttttttattagtcaggagacagagcaaacttcaataaatggcaaatatttgattaccttgccaactgatttcagtaaatgatggcattcatttgatgtgcagtctattagataaatagctggaaaacccttcatggtagattcttcttctttctctgcaaccaaaaagatgattcatcagtgccacaggtaattcacgtttgaagtgccgtaccatataaacggtgagctccaacaggctatagggttatcttactatggtgtgacacatgtatgattatatataggaaatgcattgcatagtgctgcctaaaagtttgctagcatatgttgcattacattctggtatgatataatttgattgacgggatgatcctaaaattcgaactaaacaaagctaaatagcaggaaattttaaatatttctgagactaagtttaatctaagttctcagcatgatattggtgaatatgttattaccttcaatctgcaagtcttgagcctgtaaaaattgagaatttgaactcaaaaagttcttgaatgatcgatatacctcacggacaacaagctctgttcgctggcaaaatccgcaccaagagttgctgaaaagcaccaatacatccttcttccaagcagatgaaatattttcagtgtttgaaaacggcagttcactttttgaaacacaaccttcaaatccaaagaccaacatacaaaaattacttgttgtcaactgggggatggaatctgcctcgtggaaatcacggttaataaaaggtggtctcagaagctccttcgaacttatgacagataaggctgaacgataatatggagatagacttcgattcataaaatggtcgagaaaatttgctaaagaagggtaggtaaattcaatctcatctggaaagacataatgcttttgctgaattgggtcaattattacaagggatggcattctcgatccaccagttaaagtttgcagaagcctataaccaccatcagagaagaagagtgaacccgcaaaatgttcatcaggtatacttggagtttcctgctctgtataatatgtgttatcgcccacaaggctactggaagagcttaatgctgcatgcacaggatatttgctatcactttcttctgatccttcatctagaataaataggttatcctcataaatggcatcctcaattcttcgagattcttgacccaggactgaaaacacagcatcttgctgatttgctgatcctgacttctgttggttaaaattcacatttgtcccatcgggttccaaaatgtctaaagcttctctaactgtttcctcatctttgtgtttgtgtaatatatgaccaacttcattgctggaatgcacatcagtggagacctcttcctgaagatcagcacttgtatctgaagcctcagttttatgttcttgttcctccatttttgtatcactacagtcaagatcttctttattgatcttacagaaatttttaggagcattgctactgtgcacatcaacagaaatatcttcctgcagatcaaggcttacatctgaggcctttgttttgtgttcttcctccacttctgtatcactggattcaagatgtttttcattgttatcacagtaatttgcaggacctttctcaagtttaatgggtgcttgtctatcattgatatattcagcttctgttgccctgttttcatgaacagaatcttcagtgtaatcatcattaccaccgtctgaactggcacatgacccttcatttctttcaagttgactatctcgaattgacagagattccaccacttggacttcagaatcatcagacagcttctttatggcaacatcttttgcaacaaaacttatctttgttttctttgacctatgtgctggtcttgttttgtgtatcagttttgttagaatatcatataatggattatcggtactaccttggctatcacttctgtacgaaatactttctccatcattgaccaccattactgacattttctccccaatttccattaatttggaggcccaatcattcagcctagttcgttcagtatgggcagatctacctgtgctaactagggaaggaacagctttagagctcattctggatttaccactagttagaccaccagtactgaaatgagatggataatttttctgcacatattcccttagtagtttgagggatagtttgctttcatctctgacttttgaagaatctgacaatctatcaataaatagaatagccgatgatctacttgcaggaaaggtagcgataccacttgcatcaatatccatctacacatatagcatgcaactcgaaaggtcactggataggtcattacagaaagaaagaagaaactcatagaatgcatccaggacatgtcatttctatataatacaacattatgtcatcaagataattgcatacttctaatatatgaacagaagtattctctttatgtgcagcccaagaaaatttttcaagaagagcaacacatttgcaaagagagaaacatggttcaaaggatttgaattggtaagcttggaatagaatataaatgcaagcagctatgagctatcttcttagtccattttcaaccaatatcgaatagagttgtaagaaaagtaataaggatatgcacattgttatatctgtcactcagttacatgacagttgtcagttgacaactttttatggaaagaagttatgaaattgtttttcacctacctcgttaatgttaagattatgataagattgcagtaggcttcttaggtcatcaccttcttttgcaacaattgaacaattggtgcaccccagataatgaacactgaggaaccatgtctccgaattgccttcattgataaactctgatgaaggtaatgatgatctttcagttataaggccaaatctaactttctctggaggaagaaaataatctcttgatagagcagtaagctttgcatagaaactttcaaactgttgaagcttttccgctgtacacaactttctattttcatcagttgtaatcccattttgatctgacatgcttccgtttgctaaggtaaatccacctttccaaggagagccagcaagctgaaccccacctccaaaaatcagttcttcatcctctataacctgttttcatctcaaataagtatattttcagggatgtttctcctggtatttgctgaatcttcgtagttcagatagatatttcatatttcttctcaaagaaattagcagtgtaattaatcagagataaatgtgatcctctttgctacacttacaagctctagtggcccatccgattctcctgttagtgccttcccagaaatgtcaactgtatgataagtgatacaaatgagcatagcatgcacatgctggaatggagtggaaccattatcatttattcaaaagttaaatgataaaggtcatggagcaagtcatgcttgaaatggattgagagttaaagattaaagtagatcaatttgaacgaattcataaaaggagaaaacaaaccaaatactccttggagccccacatgaggatacttttaccatcttataccatatttgcaccccctgactcctggcttttgtggtcttataagttgcatgtgcatttggtatattaaattatttagtaataattaacttaagtcagaatagaataaccaaactaggccatttatttcttttagaaagggaaaaaatcgtgcccactcatgttcagggaaagaactacttgacctactgcggctatcaaacacaatcttaacaaagcccctaaaaaatatagcagcgagagaatacgtaatagttaaatgaatcataaagagtggatcagaattgacgaaccattttctgtgtgatttttggatgaagtgccctcggttctgttgctcccaccatgagccaatttggaaaaccacccacagaattcagatagaactacagctttgtcagttgattcaacaaaagcctccacatcttccttcgtatgcaaaaccacaaatggggcctctgcatgcttgagtgacataatatagtggactgaagacaatatctcacgtgcacgaagcttcccttcatatttgaatggcaacgagcgttggtagtatatgaactttattccttctgtggcaccaagtacatccgttagcaacttctcagaatttctgtacacagccatcaacttgagatgcccgagctcctgctcatcggcagcaaccaaaagttctatctcggccatcagtgatcttgactcgccataccctacagattatcataaacaaaaacagtagaagtaaggactttgcgcgcaaaaagatcccatacaagcctttttcctttgctggatactatgaactcgctgtaatacaaatgttcgcccgggtctttgggggtaaaatgttgcattttcatagaattaaattcgcaattatgagagcgtttagcttaaattcgcatttatgagagcatttaacttattaaactacgcagagctgactcaaaactcaaaagggaataaagcatatattaacagaagtgtaggatcttacaacggttgagcatttcagactacaaaattgtcgcggtttccgtaatcaatcaactcagcagaagtacagaacaaaatgtgttcctagtcccttatcgtttatataattcgacacatggagattcacatttccgctaagagagaaaaactcagctctccaaattaaccgcatagtgcgaccacgcgactcatcggagaaccagagctctcgactaggaacggatagggggtgctcacatggcatggtgacgacgagcaggatgtgggggtgaagccggatctgggaggagaagttggccctggtcaggacctgccattccgcgcgcccggaggcggcggcaccggagctcgccgccgccgctgtcgcagatgcccccagctgcgacgccgcgaggagggagaggaggagcggcaacgccgcgccgaggagggggaggcgcatggcgggcggccgtccgtcctcgcgcgcggcgggggagttgtgtagtagcgcgagcgccacccccgccgtaggagcccacgactttcgtctcgtgtcgtgggtcgcgggctcgcgaagaggggctcgacccgaccgctggagttcgcggggcgatactctgctgtgtgcccctgccgtcgaaggtccccccccgagttacgaaatcatcccaaaacgagatataaggccaaaacttcaactttttcatcacatcaaaacttttctacatacataaactttaaacttttccgtcacattgttccaatttcaaccaaatttttaattttaacgtgaactaaatacaaccaattaaaactggtcacaatagatccttaagtagttttgaccccggttttatcctacgtagtggctgagttagcgtgggacccacgtgggtcccacatgtcaaagtgaaagtgtcgtttttgtgagtttgttagattggcggcgatgctgcggaggatggtgttcgatccggacggcgccgccagcggggaggtggggagggttcgaggcggcggtggcgcgacgctgttcgccgtgccaaggttgtgtttgttgggctggctgcgaagcgcggggtggcggatggcggggaaccggcgttgaggagcccaacgtcgctgttggaccccaaggcactcctgctccggtcgccgcggtcgccgaagacgtggtatgacgtttctacccctcatatgccatgaattctacttgtacttgtgaggggtagaaacgtcatatcgcatgcgtggctgggtcaatagcgatcgaggtggacggaaaaacgatcggaaattgacagaagtgttaaaaataggaacggggtgaactttgagtgctattaaagtgaaccggtatcttttggtgctataaaatcgaaaacgtaaacttttgatgctatataaccaattttcctaaatatttatgagtggggggacacttcttacaattagttttttttcttcatgtgccattccaatctccaaccgaagaaatccaagaataagcccatgcttaaatcgaaagtcttaagaggcaatcgatcgctctaagagatcggtccccctccccacgttgatcacccccttctccatgtggtttcctttttggcacagtattactttcctattttagtaaatttatacaccttaaatttacgcatctaaagtttagagacccatagtttacaagtcaaaagtttatatatccgattcaaaattgaatttgaattcaaatattttttatatatagtatttctatacatctaaagtttataagtcaaaagtttacatacccgattcaaatttgaatttgaattcatatattttttatatatagtatttctatacatctaaagtttatacacctaaagtttatagacccaaagtttataagtcaaaagtttacatacctgattcaaatttgaatttgaattcaaatatgagtttatagacccaaagtttataagtcaaaagtttacatacccgtttcaaattttaatttaaattcaaatattttttatatatagtatttctatacataaatttttctaactttattttttattatttttttaaaaaaatttatggtgtagtaggaatagaagaaggagaggaggaaaaggggaaagagagcgtaagggggatggggatcgatcgcctattagccacaccctgctaaaatgcaccaataagtgtgtaggttagttttttttaacagtatgttagtatttgaactatgataaaaatagagttatgcaaattaaattttggttgtttggattgaagctaattttatcaaatgagaatgttggcaactttaatagaaccacttagatgattgatttactaccactttttatccccattggttatctattaaccgattggttaagttgaatcataccacgtttggaagtgttaacacttgcggttttggccctaccaaagttttatagggtggaaaattgatatggattttttactttttatcttcttagaaaacttattctaaaactagacaaaaaaaacttattatagaaatgatctttttcatggcgccaatatcattgacgcgtggtccaacatgacggcgtcatcccctagccccgatgaaagctaagtcaactaatttgaaggggaggacatatttgcattttttgaaaaaggtcatatttgtaataaaaaatatttacaaataagtcctcggcgacaatgtcattggcacacaaatagatcctcagcgcaaggatattaacgtcgttcctcttcatgttagtgacttagctttcacccaggggcgagggaaataacgccaacgccattggtgttgtcacgttgcactgctcaacgttgatgcccatttattaagcatttgtcaagttgattcgtaccatccatgaaaggtcgtgtgtttcgcgaacgatgaaaggttgtgttgtttagcaagaatcatcttgcttatgttgcttgtgaatgtccattgcgattgaaatacgacgaaagatgagttggttggttttacttcatttgtttcacactgtgcgctgaatatatgtggaacagagtgagtaaacatggatacatcacgatgataaaattgataatgataacatcaaagagatggataaaggttgtctcatgattgttcaatctcgaagagagctttaagccatgtgatcgacattcgtcaggtcaagtgatggagtgctcgagaggattcagggaagcaaaagctttcatccacgtgttcgagggttcttcatgtgtcagttgatgtgtaagtcaacaaacagtacatcacaccacattgcatagagcgagaaggtcccacatatcatctcactccataacatttcttacacgtgggccctacttgcacacgtaccccctccttgcagacagtcagacaccacaagccatcgtccggtgtgctgcacccacgccgttggcgccgaaccttttctcgtggccccccgcgtttccgacgacccaagcaaggtattccaaaaaagagagaaaaaaaaaacaacaaaaatcgcacgccgcagaaacccccacagccacgaacgcacgggcccaaagccccaaagcacaggtgtccggtggtggggcccacctgtcatggtctcccccgtcacagatcccctcctgctctccccgcccgcgacttcgcgactcttatcatctcttcccctcttttcgttccaatccacaggaggagaggcgaggagaggagagcgaaggagcagaggcgaagcacgagtccaatccaaacccgaaaaattcgcgtggcggccaagccatcgacgcgagcgaaacgcacgagcgcgtcgcctccgcctccgccgcgcctcgccatggcggcggccgtctccacggcgccgcgcgcgccgctccccgccggagccgtgtcgtcctcctgctgctggtagtcgtcctcctccgcgtcgatgtcgcgaaggtgggatccgagcccgaaccctagcagcgacagcggcagcaggttgttcctcgcggcgcggcgcggggagcggctgcgcgtgcgccggcttgcgggcgccgcgcccgcaccggcaccacgccgccgcgtttcgtccgtggtgcggttcgacggcggtgaaagcggcgtgcggagccccgacgacgcggacgccggcagcggcgatcggcggaggggctgggacgcgctgttccacgacgcgttccagggcgccgtgcggcggtggagcgagtacgtcggcagccactggcccttggcgcctgccgggaaggatgctgggctcgggaagagggttgagagtcgtcgcgaagagcaggttaggggcgaggtggaggaggaagaggggaagtggagctgggagaggtggaagcagcacttcgcgctaatcgaagagagcgagcgcctcgtcgatgagctgcaggtatatctctcgcacggagattaattcaatcaattcatgtcatttacaaatcacgtgctcttaaccataagtttcaaatttgttgattccagcagaaaatttacgtttttatgtaacatcgagctccagacgtgtacttgtagaaatgcatctgtttaattcctggaccaatatccggctccgtcggttggcttattctaggaataagccaaacggcatatttacaaatggaaaataatttgtgaataaaacttttatatacgtactcttagcgacctaaaagcaaagtctgaaaaataaacttcgatgaaaaaaacctcaaaatcaacttcaaatttaaagttgaaaattcaaattttggccgataagcataagcataagcataagcaaaaagatggggctgagcatgtgtgactgtggactggtcgtggattttgttcatctggaaactaccgtgaattaaacttagttataggagggtgtgctggtggacttcacgatggtatcgatatttctatttgctgtccatgttatctacaagtaacctgaggaaccttagcatagtgtaaacaatatgtccctagaggcttgcattatggaagctaaagccttcttttgttaaggctatatggtttgatgtgctcagaaaatgtgctttgtactgtgagttagactttgtatgtaggcaaagtagacaagttcccgttctccttatgctgaacatagccttacaagtttcctctggagctactattaagttgcataattcaacattgaccattactgaagctaatccattccaatatcaggaagagagccagttacaaacttatctcctcagttcagtggtgcttatacattttaaatgtctgacaatttagttttaaattgtcaaacatgacagtttggtgatatctagaattgtttgaaaccaagtactccctccgtcccaaaatatagcgacttaggactggatgggacatatcctagtacaacgaatctggacattgctatattttgggatggagggagtctgttagatgcataatatctggatataacggtataacctcctcaaacatagcagatggaacttagttgtgtatgaggcagattcaccatatcaattgtgtgcttttgttcatacatgtttttctccccaatgtttttgtgttacaccatcacatatttcctgattgttgtatattgcatttcagctacaactacggactgctgtttatagagaggacttcaggagtgctcacaaactgaagttggctattgcggctacatcaaaaaacgatactgtgggcagagcaatttctgacttaaatgtaaggagtatctcttttttaattgcataaacagcaaatggcacttttgatctttgctaaaatggtgcacagttgatcctatacaagcttataagaggactaatggctagcactattgttgatttgatggaaaataataaataataactaacaagtttggtactagctgaaataaccaatttatggaagaacaacgtagtcttgcaccccaaatttccccaagctaacatatttgtacccactgtattattcagcaaaagatgtctaacttctactgataacagaaggatgtaaataaattgcttttgtaggtagagcaatgaatccaaattattttccatggccaaaatagtgggaacatatttgataattacaagataattgaaactcttttctaatctttttggcatgcagagtgcaatagaagaggagcgctacatggatgcaacttatattagagatcatgctggcgcaggattggttagtatcgcaaagtttttacttatgtttcttttgtatcgctatattatatgcatgcaattatgaaatacctattatgtacctgttgccattcgagttaataattctggaccaggtattagagagaaaacagaccagtaaatcagaataggtacaatggattcaagttaatttagctcaactgctcaagcattagcctgagaggttcctattcatttaaaattattatatgtaaccatttcgagtcatttctagcattctagcaatggcttgctgtatgtacactaaatctactagcaaaatgcccaagctttgctacaggacagaagaaaaaaatcataatatgtcatagctaaatatttttttattcaaatatcttagtatcacttgtttgaaccaaatgttggactattccactatattagaaaatatcagggggaaatttgtaaaaactgcaaaaacaatggcagattcactgccaccatcactagaggcttttaaaaagagtatagatgtttccctgttattacagcataagaataacaatttgattcctctcgtgttttaagcaagcaagcatgataattaaattatatttcaagcaaaatttgaccattttagttacttatcctgacggtggcattaaggctcatactatacatataataataattttaaatgaatggtttagaggttgtgcaagtccacactgtattttctactttgatgtcttgtggcctatgttgtttgtctggtgaatgccacagttagaacttgtttgagaccgagcatggcacctatgctcgatcaggagaatctatcctcaggctcctcaagacctgaaccacttctgtttttagaatgcgtggtgtgatgaggaaggaataataataaacataaaatataagtgtgctgttatgaaggttcagctgtatgcatgtagtatttaagtgttctgtaagtgttctatttttttgcccttatgttctgtagtgcatgcttatccatttctatgttttctttttcttctttccatctgcacaaaagaatgccatcaactgatcctttaaagcacctgcagttgggatggtggtctgggatttctggaaatttgtctgatccatatggtcttataattcgtataagtgctgaacatggtcgatatgtggcgaaaagttacgataccaggtaatagttgtcattttttatcattattatctgcattcttaattacatgtccgatacgaggataactgcctcatgggcaatttagttttttcacctgttctattacagaggcattttcagtcaagatttttgtgcatccgtgttcacgttgtgttcatgaaacagttgggattcttgtttcattccattatgattatcccattgttgatgggaagaaaatccaatagggtatgaagggttagctaatagctactaacgaatgcttgcattgatcaagctgatgccatcatggaaatggttgcatattagcattgataaaatatttgctctacttgctagttgagcctttaattttctcttgttcaggcagctgaattcagatggccctggtttccccatatttgaaatttactttgctgaggccaatggagggtacaatctgcaggtgcgctaaattaaattccaatgaaaaaaatatgcctggaatcataggaatagttctttttgttaccaattgaataagttgaacacgcatttattgttttttcatgcactccctgtaaactcacaatgacatcctttatttctttaatgtggaaattacattataaatatggtaaaggctgagtcttctctctaaaaaaatggtaatggcatctggaagtgtcatattgacctgcatttttctacattttgaataaggaattcactcacctttaggaaatatagtaatagatgaatgcacatcatcaaaggaaaaaaaagagaaaagattgcatgtccacctaggctatcccaaatttgcttttttaaagaaacatcagggcactcccctattccatttttcattacagtggaacaatgatattttaatatttcacatggaaaattatgatttccttttatagttacaaccattgtggttacaaatcctgtatttgcatttttttatatatttgagccaacagttccttttataccaacattattgagctttagtttttttcctcttgatcacaaattagcagattatggcacaaatccttttctttttgtgaagtaccaaaatacagtgtacattgaagttgaacatcacaaatattataacctacaaatgggtttgacatgcatggttatatgacttctctatttggtgtaattttgatagaaataactgacatctttttttaatctaataacctgtgcaaagttatcagaactgctaagcaaactacttgcatattgttgttcttctcatcttttgacaaaatggtattcttgtttacaggcagtgcatctgaaaccagatgacagtgattctcagcagttgtcaaatacgttgagagagaaactaggcatggatagtataaacatatctagcagttcatttggagctaaacatgaggatcacaatgaaggtgtaaacatggatgatcaaaatagtgatgatagtgatatttctgctggtccagctggtttcaaaaacttgccaagcgattcaactccagttcccagggttaaaatactaaaagtggtgcccatggaaaatgttaatcaggactatataatcaaaatttttgatcagatgtcggatgaagatgatgaaaatgataatcctgaggatgaaattgaatcatcagaggacattggtgatggagataacgttgaagaagcagaagcagcttctgcagaagataatgttgatgaatctggcgatgaaagtgatattgaagccttaatatcaattgattttatcacagaggacgacaaggattttatgtctccatcatccacaaaagcctttgaacgaatgccagctagattagaaagaagagaccgtttttcattttcgttctatactgaacaatatagtaaaaggcaagatgtggaaaaagttcaggggatttccaaagaaaaagttggactccgaactgctcagcaggatgatgatgatctccaatttgaccgtgtaaagttagtaggcagcaacagaaaattatcggtaagtattatgctgccgtactgttttatgtttgcttttgatatcctgcatttgtcttaatttgaataaaagattgattgattgtcgatttatggcctatgaactctctgattttgttcctgaattgccagttttttttttgtgaattactgtttgttaaattcacaaaacctttttgtctctgccaattattcttcttcagggtgtttatagtatctttttttcagctgactgttaaatgtcaaattatctaatcttcacattttttttctgcttttatttgcttatcaatgcaagcatatcccctgttcaacaagatttgaataaattttgtagactaaggaaaggcatattgtctaattcagcttgaagtaaataaattttgtagactaaagaaaagcatggatttttcaaattgactgagtttgtctttttcatggtgccattttaatttatcttatgcaggtactacaacttggcatcaagcaacacaataataaggttcagcaaaaattgtacggagttactcacttcagccgtattcagatacctgtctcctcagatcctcttactggtacgttgaaaatgatatttttcacttaggattttagtggtataattgttctcatttagccacaaacttttccttattgctggtattagctgattaggcatctctccttggcaggtttatacatgacggcatcaggttttgactcagaaattcttagcttacaacgaaaatttggtcaatggcgagaggatgattcatctgaagagcacagggacctacagttctatgagtatgttgaggctgtaaagttgaccggtgacaaccttgtgccagcgggtcaggtattatgccttcaactcttgtagccatacaaaactaacaagtactgtaagtaatatgtattcccttgtttttgttcttcccacttgttgaagaaataaaatacatattgacttttcacaaaatagttttctgctaagaagtgcaatcattatactatttcttgacaatcttgtgaattcccttatggcatttttcactctcaagcacttgcacatatcctaaagcaccaacaaggggtaagtaggtcctatccatccttgtttggtgctgtgcaacatgctatttgcagaaccatggaagcacatctccttttgtgtttgttgtgtcttgaggtggctatttcaagtttacaaatcgtgactagttggtgcagcctaaatattgatatcctgtttttctggtgagcactacaatttaggtttatcttatacagtctccatgtcaggttgtcttccgtgcaaaggttggcaaacattatcagcttccacataagggaatcatccctagagaacttggagtggtacttttttctctctcgtagttttagttattttttcttttcaatagtgaacttgactgctatattgtatataggttgctaggtacaaaggggaaaggagaattgcagatccaggtttccaaaaccctcgttgggttgatggcgagcttttgatactagatggaaaggttgaaaactattcatataatgcacatttccttgtatattcacgagatacttttttttaacaggttttgtttgtgaatttgcagttcatcagagatggtcctgtgatagctttcttttactggacatcaaactttcatctttttgaattctttaggcggttgaagcttcctgattagtttcagagaatcagttgaaggtaaatgaattttgtctttgtgtggcccagctgttattgtgctgaagtaatcttcatatgttctattctcgcaccatattgcacttgctatgtttaattatgcatgcagaattggtgccaaaactagttacaaatagtatgacactagtaacaaatagaagaacactactcttttttgggatgctattgaagcattttttactcctgatgtggccaccatgattctgttagcctacatatagtgagaacaaagtgtgtgctctatgctaggtttggatgagcagtgagcatgaatagaccgacccatgaaagttgcgagttgagaagcatgtcccgcgttgtattttctgcatgtctttcctgacttttgaaattagccagttactatagtcgttgccgggaatctgattaggttcgatcttgagacgctctggcaaactgatgttgatataccaaagaatattggaattaagcatttaggatgggtgcactgcatgtcatactacatgtagaggggagagggcccagcaggcacatgttagttggacggtttgaaccataactttctgtcccattttacttattatagttagctgtatgttcgtatgagcaccgaggacttgctctgtttccttgactggttagtatgatcatgcatggagtattttaatgccattcaaatacgtgaatacatgattcttctgcggtgaacataactaacttatctcgtttattgttgagcagctagcaactgctattattccaaccctactttacgcctgcttcatcatgtttttttgtgtgatgtctgcaattttgttcgtaagatactaaaatgctttgcaatcagtctgatctttagcaagaactaaaaagtggatttgttgcttttttatagcaggccattccacaatcttgcatgtcgatgtacataacagaatgtacataatcgtcttcgttaaaaaatacagttgggaagaattgcgcaacatcacattccttttctttggagagaatccagtggaatgaggacttgagcggcggcatctccaatctcactggaagatgccacttttaaggaaagaactcgcacaaaggaagatatgaagagtgaactcgttgttccatttcctttcagctcaccaacccggtttggagttggaggccaggtccaagatagtttagtaagaaagaaaagtaggttgaaagctccaaaatgaaaagctagaattattccagggtttcaactgttgctttttcgagccatatcacacaggaacaattgtacgtgaaatataagtaggaacagttttggccagtgtgatcaaataattcaaccggtggtaataacgggcacttcgtgttttgtaaatccaaccagtagcaggggggataactgctgtgtgtatatatataactcagcatgaattttgttgaactttggccttgtttagtttccaaaaaaaaaacttttcaccaatcacatcaaatgtttggacacatacatggagtattaaatgtggagaaaaaaaaattacagtttgcgtgtaaattgtgagacggattttttaagtctaattgcatcatgatttgacaatgtggtgttacagtaaacatttagtaatgacggattaattatacttaataaatttgtctcgcagttttctgttgaaatctgtaatttattttgttattagactatatttaatcaaatgcgtgtccgtatattcaaatatttaatgtgacaaccaaatctaaaatttctccccaactaaaccaggcctttgtgtaccagggcccttttccgggcaagtattcccattctttccactcacagctacaaagttcattgttgctggcaagttcggagctagcaaaggattttctttcttctgagaccaaacgctcctgaaaccgtaaaactaacgagcaaaacaactacaaaacggaaggaaacccgaccagagccgcaagttgtggctcgcgccgaccgaccgaccatgccgccgacggcgacgctcccgccgatcgcggcggccggggcctccgccgcgagaggctgccacttgctcaggatcgacgggtactccggcaccctgaacgtgcaggcgagccagctgccagcccatcccatctcctcccgcccgttccgcgtcggcggccggccgcgcctggcgcatccgcgccgcgccgagaggccggtctcccagcaacaccgacttcatctccttccacctctcgctcgacaacggcgacgagtccgccaccaccgccgagccggtggtggcgcaggccaccttctgcctcctcgaccgccggccgtcggcagccggtgccgtcctacaccatcaccaccaccaccaacgacttctcggtgaacaggtgacgggggtacgactacgagagggggaagctggagagctcggagtcagagctcatcaacgacgactgcctccttcggatgccatgtcagcgttacggaggcacaggtggagaactgctttttagtcccggtttgtaaccccctgtagtctcggtttttaaacttggactaaagatcgctatatttaggtcctctttgtttaggcttataagccaacttataagccaaaaagtctaagcctaaacaaacaagcagccttttcgtttggttttttaaagccataagccgctcttacactattaagtcaaaagataggttggagaggcttttttggcttatatgagatatatgtatgactccaccactaaacttaggacattaaattcactagcttataaatcatataaaccaataagctgacttaaaagtctaagccaataagcctaaacctaaacaaagaagaccttagtcccgggtgaaaaaatcgggactaaagatcgatctttagccccgccaactaagagtaaaaagagggatatttaagtcctggttggtgttatcaaccggaactaaagagagggtagctttcttttttattttctcccgaatcgagtggtatgcatatcgtcaaatcaaaccccaaatccacgtcacaactccacagcacgattcacatattcatcacaaattcattcacaatatccattcacatattcattcacaacatcacaaatatgttcacaatattgattcgcgggttcattgacaacatcgagtcacatactcatttataacatcacagattcattaacatcgatccatagattcattcacagagcaaaacatctaaaccacaaataaaaaaaaatcaaaaaaacaaaaaaaatcgactcaccaagcggcctcccatcccgccgccggccggccacccatcccgccgcttcccctccggccggatctgggggaggggagggcgaggccgccggcgaccggcctccgtcccaccggcccacgcccatttaatgggagctgccagcccatctcctcccgcccgttccgcgtcggcggcctgccgcgcctggcgcatctgctacgcgccgagaggcccggtctcccagcaacaccgacttcatctccttccacctctcgctcgacgacggcgacgagtccgccaccaccgccgagccggtggtggtgcaggccacaccttctgcctcaaccgccgccggcagccgaagcccgaagccgtcctacaccatcaccacccccaacgacttctcggtgaacaagtcatggggggacgagaggttcatcgagagggagaagatggagagctcggagtcggagctcatcaacgatgactgcctagtgcctcaccttcggatgccacgtcagcgtcatggaggaggaagctgggtggccgtattccatggaggagctcctggaaccaagaaccatggccgtattccatggaggagctcctggaaccaagaaccatggccgtattcctgcccaaccaagaaccgcatcatacggataaggtcataagggacacatatcctctaccgtacagataaggggataaatagtggtggagctaacgacaccatagtgttcatgcaactaataatgttttttgtgatttaactagttttgttaggtgtcaacggttatcggtagtggagacgacatcgacaaagcctgagctgtcactaacctacccaggagctaaattcgcaattgagggaacgcatattctgtaccatatgcacattgccataacaactaacgtatagactcatttattctgaagcatatatgttactggctcgtatgacacctactgtactaccgtacaatagagaactaatgaaatagatagctaatgagattgttatgttgctgtatagtatcattttttttttctaaaaaggttcacataagaacaaaatatgaaccgtcgactacatgtatcgagcaaacatgagaagcaattcatgcttctatttaattaggactagagaaaaataaaaagacatagaacaattctagcgtttcaaagataggcatacttaattattttcttccaacggagaaacatactggttccattgaatcggtggtattcaattttagaagaaattgaatgctaagcaatgataatattactaattttcaaataaaatattactactaccttgtactcctcatttcagctggatttgcgtagattcttgacaaatcgaaataaataaaatctattgccaaacatctatctattatagtattaagacagctcgaaaaggagacaccacgttcgctgtagaggttagaaatttccacattaatcggagaaaaagaaaaaatacgaccgttatattgtggtccctttagattttagcggctgagatataataagagtccatagaaaaaattaagaaattatagtctgtttacgtaaggtgaattagagacggacatattggttataatggcagaccgagtcagatacgaatcgacgtgtgtatggatttaacaacaacatgataattctaattgcaaagtgacacaacttgactgtggaaatcaaatcagaataacaccattgaatatgattagatgtgtatgattctatcaccccgtttcttaattaaaatttaaaataaaaataaaataaaacaagaaattagaaaaacatattattaaatcagctttgaaaggtggcatacgttcgccgtggaggttagaaattcccacattaatcggagaaaaaaatgagagtccaagtaggaatataattttaaaataactaaaattcggaattaaaaataagaaattttagaagaagagtccatataagaaccaatacaagattaattaaaatttgaaataaaaaaataaagtaaattccaaaattgttagaaaaataaaaaatatagttcgaataggaatacaattttgaaatagagtccatataaaaacctaatacgagattaattaaaatttagaatgaaaaataaaataaaatccaaaattggataaactaaaaaaagagagttcaagtaggaatacaatttcgaaacgactgaaattgaaaataaaaaataaattaaaagaacacaatacgatatattagttaaaattcgaaataaaaaataaaataaaatctgaaattagaaaaagaaaaaaaagatttcaactagaaatataatttataaataattttataaataactaaattggtgataaaaaataaaaactattgaaagaaaagaccatctcaaacacatgaggagattaattaagtaaaaggcctataaaggagtagagtggcggcggttgatggaacatctaaaaactattaataaaacaccagatagaatcctaatgacgattaaaaggaaggatgacgggcaggtcgtgaagcaaccggtcaaggcggttggtaggacttctagaaattaaaaaaaataaaccctaataataatcaatttgatttttaaaatcttaatgacaacaaaaaggagagacagcgggcgggtcgtacaagagtataatgctagcgccgccgattgttggtgggacttttaggaagtaaaaaataaattccaaagatgtgtatgttcgatttttagaatcccaataataataaagagtagggggtggacgggtcgtagaggagtatagtgacaacatttgacgggatttctaaaaactatcaaaaacgaaatccaacgagacaataaattataaaaactataaggttcaattttaaaaggttcgcacttctaaaaagtaaaaaacaaataaactccaatgataatcatgtttgattttaaaatctcaatgacaataaagaaggaaggcagtgggcaagccgtagaggagtatgctaacaaaaccactgacgttttgtcggaacttctagaaagtaaaaaatgaaccctaacaataattatgttcgattttgaaaatatcaatgacaataaagagaagaggcaatggagatgccatagaggagtataatgacagtgtttgttgggacttctagaaattataaaaacgaaacccatgaggacaataaactctaaaaagtataagatctaatttttaaaggtttccaaagagaatgaataaaaaccatgtagatcgagccagcaaataaagaaggatatgacataagtaaatgatagcaattgatgtgatttttaaaaattataaaattagaaacaaggggatgataaggtttggtctttaaagtctcaaaacaacgagataactatttaataaattaataaattttaagtaaaatcatattaaaaataccaacagctagtttgaagaagagggagagagatggaggtggacgcgagcgagagtctcccttgcgccacgtttctcgcgtccgttcttctccgagccgcgtcaaacaaaaccaaacaccaccgtgcgagctctctctctctctcccctcccccctcctcctctttctctctcctccccttctcctctctctctccttccgctgattccgtcaccgcctctctcccgccgcccacgcgggcaccggaacccgccgccggggacggcgaatccggggcggccccgccccgaatcggcgccgcccgctcccagatctcccaccccttccccgggggcgcctccgcatgtcatgagccgcccccatttgcccaaagacgaccacgccttcgccaatgggttcttgttcgacggcgtggcccgccgccccggcgagatcgaggaggcggccgccttcgccgccgccgccgacgtggccatcaccatagccgccgagcagtccgggtccccctcgtcgtccacggcgccgccgatgtcgtcgtgcgggcagtacatgctccaccgggtgggcaagctcgacaccctcgccgggatcgctatcaagtacggcgtcgaggtaatgcgacgggagtacactgaattttttttagggcctttttttttcactgctccatattggaatactccattagagaagatataaaataacagtccttaacttctagctgttttaggtagtagtatgccgtttagctctatattgattgggaaatgattttggaatggtttgcgcattgtttttgtggtggtgttgtaggtagcggacatcaagaggctgaatggcctatcaactgacctccagatgtttgcgcacaagacgctgcggattccgctccccgggaggcatcctccgtcgacttaccagcagaacggttcatatgagggtgatgacaggtagttaaaaatcatgacatcactttgctcccatcgccagcaaaatgctggacttagcattgtccgttgtggagttgtcctcacttatcagcattggcgcgtcacagcacagtgctatatcttttatagatttacatggagtttggtagttatgaatttgtctgtagccaatttctctctatgatgtgcagagggcagttaattaattaggtggttatatgacttgggattttggctttgggctccaaatacatggctaatagtatgttctctgtttgttcttttgcgattgttcaccttccgctattatttcctgtataacatccattgagtgaccatagttatagctcagaacataagataagctagggcaggaatgaatgaagagcattaaaatgtagagaatatggtaaagagaacacatttcagccaaacctgcaactaggtcctaatcatcttgtgctcagggggagagccttatttaggccacactgggccatatggccctcccaagtcgataaaataacatttgtaccatactataggctaattacctgctatggttgctcttggataagcagacatttctctagctcttatatgcattatcagttataacaatatgatattatttcagggaatgtactcctccacgtcgccttcatgatgatatattggattcagttttgagaacaccaaagcacaaggcttcaccagccatgagccttctgcaggggtactatggtctcacaccacctccaaagaaggatacgacacatgaaggcacagaaatggcagtatatagaaaaggaaaatctgttttcttggatgatgacccatggtttggagagccgccagattccgacccattcccttttcaacataggaaaactagaagtcttgcaataggttcttctcttctgaatggcgagactgaggagaatggcgacagcgaaaagttgataaggcgacgccagaaagctgatggtgagttgttacctagggaagaaaatggtagtagtgctgtcctagcaagggctgggaaaggcctggcgttgaggcctaagtcgggcagtcgacaagatttgaacaagagccagcagaatctcattgcattggcggagccttctttcggtgatgggttgcatgctgtaaggaaatcgtcgagcactccggagttccaagagccagagagcaacagcagcagcaccagttcctccatatggtcgacaagcaagtggaccttaaaaccagacgctttcactctccctcttcccctccctctttttgacaacattccaaagccaatcgctgcttggagaaacaaggcggctcgagattagtagcttatagtctcttggttttgcacaactcctgttctaaagcaaggccctgtaagcaccccccggaggagcttcggttgacaacagctcttctgagagttggaagcagagcagaggaccttgtggaccttggttacttcttcctgggtggctggagcacaactcaggaagatcaaacacagagatggttcagagattagcttctgttttatggttcccttgttatattggagatgttgcaacgagtagcagcatcagtttcttcagttaagttatagatgacacagagccttggatactgagggtattcttttgtacacaaatgcagataaatgtagggatcgaaaggcggctatatatgttgtatgtgtgagaacttcgctgatatagaaaagtatcgtcattatttaccttccaaatgagatttgtttttgttctttacttttttggccttggtggctcaattataatctcttttcccactgtgttgcttgccagttgccattgcaattacatgtactccacctacaatctgtgttcttttcagagaacaacctgacagttatttttgtcagttcatcgtagtgaaatgcaaacaatctctaaaaaatttcaaacaagtttttcttctctagaaaagacaaaaaaaaaagaatataaatgctatagagagattcattcatcaaatgggcatgaatgcatgatattgcatgcgaaaagtttcagtataccaggccagccaaagcagggagaagaagatctgcaacggccctctgacatgacgggcccacatgtcggcctctcgcctcacatctctgcaacggccgccgctgccctccaccgcgccaaccaactctcctccgcctcctctcaccgccgcctcacgcacttcgccttctcccactcacctccgccacgccgccgatttatacccacctcgtcatgcgcctccccaccaccgaaccctcccaacgccgccgccgccgccatggccgacgacgaggctgccgtcctcccgcccccgcctccgctgccgccgccttgccgcccccacaggcagctccgcccgagggggtctcgaccgactgctgataccacccctcgcactagccagttggtcagtgcagcttagctgatgttggctgctctcctcgttggcgccgcctgcgtgcgtgcgtgcgtgcaggtaccaggtggaggtgttcgaggcggcgctgcgggggaacaccatcgcggtgctcgacacggggtccgggaagaccatggtcgccgtcatgctcgcgcgcgagcacgcacgccgggtgcgcgccggggaggcgccgcggcggatcgtggtgttcctcgcgcccaccgtgcacctcgtccatcaggttgctttttctttttttttttcatcaacatgtgaacaaatggagtgtggacgatgtgttctgatcgggagctggttgctctgcatttgtgctgtagcaattcgaggtgattcgtgagtacactgacctcgacgtgatgatgtgctctggagcatcgcgggttggcgaatggggcgccgatcattggaaggaggaagttgggagaaatgaggtaagcgcccgggtttactgaacctgctcctgcgctatgcttgaggcagcgatttgcttgattgcgatgtactgtgaattggcacatttggcgtgcccaccaactgaagccagatgcaggctgaggttgctaccagcctacccattaataaatttgagagtcatcaacttgatgttttctgaaggggcgtgcatatgaaatactagctgatttagcactctggttcaagatgaattttctttcatgtgttgtcatttcctagattgagatgctggtctgaatctgagggatattgcagtcctacgccactttgttcaaagtagctgaagttctgtaactttggggttcaatttcttagatccttgctatgttagtacctatcggacttaattacagctactgaattgggcttacgcatgccattgctaacttggatcggaaatacgtgtttacgctgacatttgagcgatgcatgccttttgtgtttcagatcgttgttatgacgccacagatactgttggatgctctgcggcatgcttttctgacaatgagtgcagtgagcttgctaatatttgatgaatgtcatcgtgcttgtggaagccatccatatgcacgaataatgaaggtaatagaaatttggggatctgtcttttgctttgacaacattggtagataagctttggcttgcagtttttgttattacagaaagttgcttaggataacagtatttgttttaataatctgacatggcaaatttgcttttgttttatgtctctcttgagttccaaaggaattttattttgggtctcagtggaggccagatgtatttggaatgacagcctcccccgttgctactaaaggcaagaattctacacacgacaatcatgtgcttttttgtaacgaaaatagtcacgtgcttttaaccctgtgtatatttcattgatcaatagtttcagaaaatgtgttttagctttgttattaaaataagcatgtcgtgtgactgttattatcttcctttttgaagaatgccccaactgccatgtactgtcaaaaactcatgtgatgtatttgagtgcttttgccttcttcataacaagacaatacatttctggaagtatgattctttctcttgcttcataattctacatggaatacctctctgcctgccaactgtagattgcatcctatttcaaattttgatgattgggcatcacagtttgcgtgtttgacttagttgtccactaaaaggcgagttccttagagggtcgcttaccctggttgggtaaggttaggtcgtgtgagccttttgttttgtaagtagttttttcgtaggtgtttttggggagaaaggcattctagtctcttccccgtttttattccttcttaatgaaatgatacacatactcatgtatatttttttaaagaaaaggttgtcccaatttaatctattcaatgcttctactcatattactggagagcacattcaatcagttcattaaattgaaacagtttcctgttgtagaataatttcattgaaattatgaatttctaatattgttcggatttgctggctcataatctattacaaccctccattttttcaggtgcttccacactacacaattgtgaagcacacatttctcaactagaactaaccttggatgccaaggttatctcaagctgacaagctttggatttattgaattttaagaaaacaactttccagtaacaaatagcctgtcatatgttacatgctattgcagatatacatcgtagaagatcgaaatgagcttgagagcttttcccctcctacaacaattgtgaacaaatactatgatgcttacatggttgattttgataatctgaaatcaaagcttcagatattttctgatgaggtgatttaactgaaatacatttgagcttattattaaaatacatatataatttggagtaccaaaacctacagctccctgtaactttctttttgcatgtatatttgtttaaattttgtactgttgggcagtttgattctttgttggttggtcttcaagaatcgccatctaataaatttaaagacaccgataatatcctagagacttcaagaaagagcttgtccagataccatgggaaaatattgtacagcctaaacgatcttggtccaattatcacctctgaggtattgcattatccaatcagtattatataatcagttctatgtaaagaaaacttttctgaagagtcacataactttgacatttcatatcggccttgtttgtttactagttatacctacataaattccagtcttattgaaatgatttttaacctttttgcaaatatataaaatattgcgcatgccgaactgataaatcaaaagaatatttggtgaattcttttcataggaaccattcactttaactagtaaagattggcacaagttcaagtacctaagaacataagctgctttgcatgaccttgcctgtgacagctatagtatctttgccattatttttccgtaacatcacgtgtgctgcaactgtttgtcttctgttatgaaagagtgctttgttcttttctggaagtggaaacggtgtattggtactaaaaaacctgttatccataaggacttcaagtatagtgtaaaatgcttatactaacttaaattgttttcttaacaggtagtcaaaatacatattgaaagcgttaagccattatgtgattctgaagactgcattttttctaaagctagcttgtgcttacatatgtcttattttaaagaagctttaagtctaatagaggaaattcttccacaaggtatagtgcaccctttagttgttatcttgaattaactgcataagcaaaaatgatgcagtgagtatctttcttttatctgtatggattaggtaatgacacaatttgcaaatccaactaggattgcattatgttctttctgtttagcttatgccctccagtaaaagattccctgaatcttattagtttagttgtctgttttttgtacgttattctcagaataagaagagaaacacatgcttctacacaccctcctaatttgcatgctctatagaagtgaactatgaagttgatgtagttcgctgggtgctgctagctaatttgtggagttggctgctagctgagagggctatcacctttgacgttaatctttgccccttatgataagatctggtcagcgggcttctgccggtttggcaaaaaagaagtgagctttgaagcagtttccagtaggtagttagaagcactcaaccaaaaagacagaggagattgactctaacctctatagccacttagattgcagttggtagtctctgtgccacagctattgtttctctgtatgtgttcctttttctactttcgtgcattgatagttgccttctctaattctgctgatgcaattgcatgacaggatatggtgaactaatgaaatcagaatctggttctgaggaattaactaaaaggggatacatttcttcaaaagtgaatacgctaatcaacatcttcaaatcgtttgggtaataccctagtattctactcaagatgtttagtttcacctacttttggtcttttgttggccaaaaataatacagccatgtgttttctctacaggtcatcaaatgaagtgctttgcctaattttcgtagacagaattataacagctaaagccgtcgaaaggtttatgagaggaattgttaacttctcttgtttttcaatttcttacttgactggagggagtacatcaaaagatgctctgagtccagcagttcagagatttactttggatttgttccgagctggaaaggtatgagatgctattgtaaatttgattcaaacagtctttcaaatgttacattaacttcacatcaatttctaggtgaacttgctttttacaacagatgtgactgaagagggcgtcgatgtacctaactgttcttgtgtgatacgcttcgacctacccagaactgtttgtagctatgtccaatctcgtggtcgtgctagaaggaacaactcggaatttattcttatgattgagaggtgaatcatcacacttgaaattaagttaccctgtgacagagatagtcaattttttctaacctaaattcattttccacattttatgtgtataagttagatccaagctacgcaattatgtatttgtgaacagtctgagctcctaggcccaaaattgcttaatcctacctatctcagtagaaaaaaagtatgcccgtgtttaataattggcataaatttttatgccatttttttcgcttgttgatctttcatatatggattttcaggggaaacttgcagcagcaagaacacatatttcgtatgatacagactggttactatgttaaaaactgtgcactctatagacaccccaatgctttatcctatgacttgtctatccaagggatgtacacctaccaagttcagtcaactggagcaactataaccgcagattgctgtgtcaacctaattcgtaaatactgtgagaagcttcctaaagataggtacacttaacactctagtatttataactctcgttgttttatgagttgcttgtgcttcagtgagtatctcttcttcctttcctgctgattaacattgcaacttatgcatgaatcattgatggtatccttaagatttattgatatactgcttgacaccagatgcatggatagctggttagattcaaatcacacatagacaaaaaaacatccctgctacttccctaggcatgatttgctgtcctagttccatttcattaaagtggtacttcatggtaacatccttctgcaggtatttcatgccaaagccttcctttgaggtgaccattgaagatggattattcaaatgcacattgacgctacctcgaaatgcagcatttcaaagtatagttggccctttaagcagttcaagtaatttatccaagcagcttgtatccctagaggcctgcaagaaattgcatcaactgggagaacttaatgatcatcttgtacctttgactgaagaacctatggatacagatttcactacagcagatgaaaaatgcatatctggaccaggtatgagtgtaatgttgcagttttgcttatattatatttcttggatacacccatcacttcatatatttttctacgctgtagcactggtatattttataaactatacaatagtacaatactatggttcttcagaacagatctgggttgccatacaacactgaaaattgtaaaactagaactacctcggctgtctctttacgtttcctttgcaatgtagctatttatagagatactctacacatatggtgttttatttttggacatgtttgttggagcaaatacctcctgatgcttgaactctgttgatcttgcaattacgtagttactctcccttcattttgttactttatcatttgtttgagaggttcccgcatactgtagtatggcaattgaaagttttaaacagcaaccctaatcttcccatatattgaaattttccaacagatatgagtgtttctcctattgtacatgatcactaattttccattctctttcctatttttgcaggaacaactaaaaggaaggagcttcatggtactacatgtgttcttgctttatcaggaacttggattcatgacagtgaaaatattacactgaatacttacagaattgattttctttgtgaccaagagggtgaaaactatgctgggtttgttctcttaatggaaccagaacttgatgatgatgtggcaccctcaaaaatggatctgttcctgatccctaataaaatggtctacaccactgtaactcctcgcggaaaagttcaactaaacaaaaagcaggtagttcaagaattagtggcttattgacattctcgttgctaaaattccatatagtttttatatctgtgactcatctttcttgtttcttcagttaggtaaagggaaattgttccaagaattctttttcaatggaatctttggtagattatttcatggttctcgaaaaagtggagcacaaagggattttattttcaaaaagggtcatgaaatacagtggaacacggaaagcatgtacttgcttttacctttgagggattcttcatatatccaggatgacctaagcatacactgggaagcaattgaatcttgtgctggtgcagttgagcagttgtggagttcgtatcaaggagatgaaaatgtcattcctgtaaattgtattccacaaaaaagaagagggggccaagaagaaattattcatctggccaataagtctcttcattgttccagcatcaaagattcagtcgtgctatcactgcatacaggaaggatatacactgttcttgatttgatcttagacacaactgcagaggactcgtttgatgagatgtgtaaggggaaagcctcaccttttacttcatttgtggactattaccatcaaaagtacttcctcttttttatatatatatttatttctagtactgctctgctcttgtatgtgtcctgatgaactttctttcttcacttcattgtaggtatggtattattattcaacatccagaacaaccactattgctgttaaagcaaagccacaatgcacacaatcttctcttttcaaaattgaagtatctaggtactggatacacaccctactctagtaacctttacctctgttaatggaaagttttagctgagtgtgggctcactgcacctgatatccatgccttgcaaatttcattgggataagagcacaaattgtgtcttttatctttagttttggttaaatactagacctcaacttttcatttattgacatacactagtgattgttactccaacatgctgttctatgctcaccctcttttggccaggaactacatggccagcagttggaataacttaagtgaaaaaatctatccgaaaaaaggcttgaatgctaacattatattcttgatgttgacttaatttaacatgtttggccacctgtattattttggatagatgaatcagttcaatgagatagcaaagaaactgtttgagaaaaaaaaagatggcaaagaaacaaatttaatactacttttttgtgttttcttaatacaaccatatggtactactaaaaaattatcaaataaattatagtacatgacacaaaacatggaatcctctcctttatttttccatttccttttgtgtgcgcttcaggttatgctggtatcccaacaggaactttgtaataaactatatttgctttctacatgagcagggtaatttccttaataaatcgatgtagtgtcattgtgtcaaaaccagcaataggagtccttaattactttattttctgcacacaatttgattaatgcatactaattattgatagtggaactattgcattcatccattcatgcagttgagccacatttcttttccagcatataccttttcttttgcatcatcaatccacctcatagagcagtagagtccttcttttgttaccctttgtccgaaagtacactaaatttgtaggcctcttactatttcgagaactgcaaatcaatatgactgtccacccttattattactgtatcccaagcaacaggactgaatcaatggctctagtggttttttttttagataatgggcagcgcccggcctctgcatcataaggtgaatgcacacggccaatatagcgtggctggcacaaaagggcttagcatcttatggccttgacacctgtaccatcgtaacagtggtcgtttgctgttgatttttttgtagatttcagtgtgttagttcccttttgggggtgtgtgtttttggtggtctcttggtgttgtagtccattgggacctttttcttttccttctcaatataatgatgagcagttctcctgtgcattcaagagaaaaaaatgcaagatacagctgcgagcctgcgccacactcagcatatcttcacttctagtataatgatatgcaagatagcaggtacagtactttgggtcttatttgacatgaaattccatatgacctatggcagatggctccactggcaaacctctgctcatggaaaaagaacaaattcatgctcgggttccacctgaactacttatccatctcgatgtaacaactgatattctgaagtcattttatttactcccttctgtaatacatcggcttcagtcacttatgctagccagccagcttcgcagagaaattggttacaatcaacacataccagtcactttggtttgttctctttcaacatttttatttgctaaggatgactatgcatttatcaataatttggtatatttttcatgttagattttggaagctataacaactttaagatgctgtgagacattttctctggagcgtttagagctgttaggagactccgtgctaaagtatgtggtaggatgtgaccttttcctaaggtatcctatgaaacatgaaggtcagctctctgatatgagatccaaggctgtctgcaatgctacacttcataaacatggaatatggcggtcgttgcaggtagatgatttacacccctaaatgcatttacatggtttcaacttcctgaagtttgcaatatttctgttgttgtacaaataaattttttaagttacttaatttggtatgggcaattcacctacttgagcatgagagactacggattgtatatgcacattgtgtagcaagtatttgcttctatttttagctttgatttttgcataaatgcactggtggtcatatgtttgccatgattgctcctttcacattgttcctttcataactttctttgaatgcctatgctttacttactgttctatcaatctttagtttcatagtcacatcataggcttgggcaatatatatattcaagaatattttctaattcttgtgcttttttttgtgagctttgcttatgtttacagatttttttttatcatactttcagggttatgtacgtgataatgcttttgacccacggcgttgggttgctcctggacagatatcgttgcgcccttttccttgtaactgtggaatcgagactgcatttgttccttctcatagaaggtatatccgagatgacccatctttttttgtgggaaaaccatgtgacagaggtcataggtggatgtgctcaaaaacaatatctgattgtgttgaagcactggttggagcatattatgttggtggtggcattgctgctgcactttgggttatgaggtggtttggaatcgatatcaaatgtgatatgaagctattgcaggaagtgaagttcaatgcatctcatttatgctccttatcaaaaataaatgacattgaggaactggaagcaaaactgaagtacaacttctcagtcaagggccttcttttggaagccataactcatccatctctgcaggaattaggtgttgattactgttaccaggttagtgcaacagagtaattatgttttgtgttagaatcaaaagttttgtgcccccctcttttttttttcttatctgctttctattcagcgtcttgaatttcttggtgattctgtgctggatctacttcttacacgtcatctctatgctactcatactgatgttgatcctggagaattaacggatttacgctccgctttggttagtaatgagaattttgcacaagcagttgtaagaaacaacattcacagtcatctacaacatggatccggaatacttttggagcaaattactgaatatgtcaggtcaaatttggagtgtcaagggaaagagagtgaattccttcaacatactacatgtaaagtacctaaggttagatgcagtattctttgttcatagtcttgatagcctagtttcaagttatgtgttttctctctctctttaatgtctaattctcaatacttagctttgcggagtgtatcaccagacaatattatgattacatgttatcaacctaattttgttctgtgttttacaggttcttggtgacattatggaaagcatcgctggtgcagtatttatagacaccgattttaatgttgacatggtttgggagattttcgagccattgctttctccactgattacacctgataagcttgcattgccaccttaccgtgagttgctggagctatgcagtcacattggttgcttcttaaattcaaaatgcaccagtaaaggagaagaagtaattatagagatgtcactgcaactacgagatgagctgctggtagcacaagggcatgacagaaacaaaaagagggcaaaggcaaaagcagcatctcgtattttggcagatcttaaggtaagaatttgtaagaagaaacaaaaagtgtacacacatatggggttggctagtgcctcgtagtgtaattgattggccggttgaatggcagcccaagtacaccttgagccttgaggtgttcatattgctagtttgaaaatagatgcttatttatcctacaaactgatgttcgattttgaagcagcaacagggtctttcaattaaacaatgtttgtccaaggctaaacagctggatatcgtgacttcagatcttcagtttgacttgacaagtgtaagattctagacagcactccaccaaacgccttatcaaagtattgaacttattctgaataatatatttgatgttgtgtagtcaggaacacaactcagttattctgatttgaatgactatcatatcctagaaggtctttcctcagtaaagaaagaaggtttgcgcattatttattgtcttttggttcaattgttgcttgctggcttgcacctgtcaaacaggaagtactaaaatttaggtaaattctactgaaaccatatgccattcgaaatgttttcagttgtgcttccactcaaaatggagaaaggtggacctcgaagtgcgcttttcaagctatgcaagattttgcagtggccaatgccagaattcgaatttgtggaacaaaggttcaggtatgtacaggaataccaagaaattctttcaagaaatgcaaaacttgaataaactcaaacgatcttcatgatgtcttgattgatgcacgtggttgctgcaacaggactcctattgttatggatggggcgacaacaacaaacttcaatagctttgtttcgacaatcaccttgcacatacctgacgcaacaaccattacatttcaaggtgagcgacgtactgacaaaaagagtgctcaggattcagcatccttgatgatgcttcacaagcttcaagaactcaagatctgtatatgcaagacttagcaaagcatcattgagacatgggccaatatgccagttaacgattgcgactagctaatgcgagctacttccctcccaaagtgagatgcgacgaaaatatttctgaaaagctcgatgctccagactgtcactgatcctatgttattttggggaagaagatccctatggtatactaccttgcattacctggatacattgttgtcgagtttccaatattccacgatgtatcgccccaagattcagggacatacctggctacttttctcttatccaacttcaaggtttccgaggtgctctctctatatatgttttattgtgcttcagtgtttggagagattaaagatacgtcttagagaaagcacttggtagtctaaatagtacacttaatggatatgaagataaaatgttctgcaaaagttgacactatatatattttttaattcaaatatggggggcaaaattcatccttgggcaaaatactactccctccgtttcaagttataagatgttttgactttggtcaaagtcaaactgcttttagtataggtgcgcattcggtctgaccgaaaattttggtcttcggtctttcggtatttgaaaagtgaagaccgaatttcaacgtaaaaatatcaggaccgacaaattcggtctcggtcctgaccgaaattcaacaacattttcatatatgcaaagaaataatggaaattttcaatacaaaaatcacccaaaaaaatcgtaagcacttatgagtaaagattcttattaggttgcatacctagaagaagtagggatgtgaaaattagagtttaatcctattgaactagtggattgtaggttgcatttagacaaaattcggtctttcactacctaggaccgaattgatgactgaatttttcggtctcggtttcgatctttttggttcggtttttttctgtccatcctagcttttagtttgaccaagtttgtagaaaaaaatattttcaaatcaagacaaacttattatgaaaatatattgaattatttatttaatgaaactaatttagtagtataaatattactatatttgtctataaacttagtcaaacttaaaacagtttgacttcgattgtcttataacttgaaacgaagggagtctggatttttcacattttggtccttttgaaaaacttattttgcaaatagacccctgaaaaaacttatcccagaaatggtcctttttggggcgccagagtggctggcgccatcgtccaacggcgccaacctctttggcgccgtccccctgccgacgtggcggggcgatgctgaggtgactagggggagcgcgccagagtggctggcgccccccccccccgaaattttttatttttcttttatttttttgatattttttttcacgcttagggaacataagaaccaaccatagaaaaaataaactcaaatggacgtaatatgtgacctgtagaattttttctctcctctcctctctctccgaactagtgcagagagatatgtgcaacttttttatttttattttatttttttgatatttttttcacacttaggaactcacaagaaccaaccatataaaaaataaactcaaacagacgaaatatgtggcctgtggaatttttcaaagctctaccgaaaaacttctcttctcgaaaacacaatcttgcaagtggaatttggaggttgtaatatcgctgaacccggcaaagcggggagaatcgggtgtaactttttctgtagatatccgtggatatattatttgcctgattccgagtccgtatgagaaagttacgcctatttcaataaatggcatattttgtctgtttcggtagagttttggaaaattctacgagtcacatattttgtccgtttgagtttattttttatatggttggttcctatgttctcctaagtgtgaaaaaatatcaaaaaaatgaaataaaaataaaaaattgcatctctctatactgtttaacttatggctatcatttcatgtggttatattttgaattagattaagtaatttcatatagtctaatttactaaaggatctctcctatgtttaacatgctgatcaaagggttttactaaaggagttatggtctaattttactgaaggtgcaaagtagactaattaagcggtatgttagctattttcagacttagctaagtggtagttcgagtttaaattttttttgtggttggctgtatcgtgatcctaagtgtgaaaaaacatccgaaaaaataaaaaaaatgacaccgttgcaactccatacagagaaacatgaatggaggtgaggggtggggaggggggcgacgccagccatgctggcgccctcctccctggggcggtgccagccactctggcgcgctccccctagccacctcagcatcgccctgccacgtcggcagggggacggcgccagagaggctggcgccgtccagttgcacgacgacgctagccactctgacgtcccaaaaaggatcatttctgggataagtttttttaggggtctgtatgcgaaataagtttttcaaaagaaccaaaatgtgaaaaagccagcgaagggagtagtcctgtacggtaggcttcaggctttagtagtctagtttggttttgtttgttcctcgccggagttcaccgtagtttcataaatgaaaatttttgccagagttatatgctgaaaatgacaggttttgaagccaccgtcatcttagcatattttccccccgattttattgatcacgatacacgcgtgtgtatgtaagtacatagccaacatacggagatatgcgagtctgggacaaactcacaaacctgtgaatctcataacatttctatcgtgagcgtactcgcatctacaagtacaactgccagtacatttgaactagtgtgatatgaataaatagcgtgatgaatgcactaatgactcttaccgctacgtcaaaggtgtttttccagtagaaattaaccctaaaagatctctgtactcctatcacaaatgcaagcaattcaaaccataattaaccaaaaccgaactcaatcatttttcttctcttctttccctagtatacccaatttctcttgtcacatatagcaatttaaccaagaaagaaaaaaaaacaaaacaaagaagccatacaaaaagggacaaaaaaaaagaaaaatcatttacaacatcaacggccggtgatgatgattatttacaaaaaccgggaggagagcctcttgccgcctctgtccagcaaaccttccatcaccaccttcttcttgtgctcctccgtgcacacctccaccaccgccggcctctcctccgccgccggctcgccgaacctcccactcccgccgctgcctttgcccttggcagcggcggcggcggcggcctgcgcccggacgaaccgcgcggcgtacaggcacgagcagaggaaggccaccgcggtgacgcggccgaagaacacgatcactcccagcgtggtcgccatcgtccacagcccgcccccgccgccgcagccgccgcccggctcgcgccggaacgagccgtgccttctcgacggagctctcttcacgccggccagctcgccgggcgccggcctcgggcacggttgccaggcaggcggcgccgtctctttggccggtgctgcagcgtcgccgccgccgccgccgccgccgccgccggtgaccgtctgctgcggcagcgacttgcttccgcttttcctctgcttcttgccgccgtcggcggcgaagctgcccacctgcggatcacggcgacgagccatcgatgacgacaaggattgcacgcgaattattcgacgaaatgtaatgcactaggagaaagttagccacaggagttgagctacctgctggctgctgctgcctgagataagctcagctagtgaatcagcgggtgtgatgcgctgatggtgtcacaataatttaaaaatctgcttttgaaaaacgagaatttaaaatttgtttttgaatggtgaaaaggcttcaattccagccagatttccaacgagatacaatattaaatttggcccatcatggtaggggtgtaggaccgccaaactccagaactcatcatggatttgctactacttgacctgcatcgatcattgttctttttcaccttattcgctagtatactattgaaactgattatttgcttcccacgttgaaaaaatatatttttaaaaaataatgtagtaaaaatattttacattaagctatctattaagtttatttattaaaatatttaaattatcattatattttagtagataatccatagcaataaaccactcaataatctaaataaaattgaacttaatatgaaaatattttctctactaatattcagtgtttcagtgaatgacaaagatcttaacagcaagagacagcatggcatgaacgacaatgatacaaacggttaaacagaagctgacattgacacaatcacaaggtacactattgctgcatgaatgccatgtgtaaacagaaaagttaaaatccccgagttttttttttcaaaataatctcgtaagactatgaaaaacaattcaacttttattcctttttttcaacacacgtgacgtgaccagctatatattatagtcaaatttgagttattttttctccgaatgtcacagcccaaaacctcgcaacaacaacagcgactagtttccttcggcttcttccacgcgccggctgcgtttggtgggtcaagcacgcaggctgtggccgtggtgggccccactgcatccccatcgtcgttagtctcccgccagtttaactaactaactattacccggttactactactactaaccacgcaattacccactaatgaactgcgacattaacgtgtcgacgaagctatgcaggtaagaaaaattcacgctaatgatcagaaaattttacgctaatgatcgatcaccacatacacaagctgctcgagatcgtggccatggcgaatggtttttttggagaaaaccatggcgaatgtaatgttttggtttgacgacgtgggtgtgcgcgtaccttggggagtagtaagctgccggctgccgccgccgagacggacgcggcggcggcgagcgctttcttggccggcgacggcggcgacgccgccgacgacgatgacgaggagaggaggagtagcatccgcttcttcatccccttcgcttccttcgtcgccgtcgccgtcgtcttcttcttcttattgccgctgttcttccgccatggccaggagaagaaccacgatagcctgatgagccttaacctgaacctgaaccttcgccggcgccgccgcggcttcgtcctggagccccacacgccgcagaacggtggcaggcacgagcagcagccgcctgcgccgccctcctcctgcccgccgccgccgccgccgccgtactcgttgtctccccgacgtcgcccaccatgacgatcctcgtcagcgcgcatcgcggcgtcccgaccgcgccgcgccgcgcaccacgcggtgtggtgatcgcgatcaccgccgccgccgcccggcgcgccgcggcggcatcatccgacgccgcggcagcatgccaccaaactaactgtgtaacgtacactcgcgatcccggcgatcctccggccggcggcagatcgatcgatcgatcgaggaaggaatggatttctctgggaggcgctcgcgcgcggcgtcgcttgatttgggcgtcgcgcgtcacgaccggcgactcgtggaggcgaccgtctcggcacgtcgaggagcagaggtatacaagctagtactagcagttttcaatacgataatttaaggcgagaaagcgaaggttttttctgggtttttggaggaggagaagactaaacaaatttaaatcttccttttttttaaaggctaaacaaattagaatcgcgggagactctgaccaactttgaagccaccgcgtgctactggcgccagtgaggagggggatatgcgatatgcgcgctagcttgcaacaaacttgttaagaattgcgaaacaaatttcttttggattattaagaagaatcttggcatggatccaatggtccaaaatctgtatgatttcatctacaaatttcattcgaatgctatatagcaatcccgttatttatttattaatgtaatgaattaattgtttgagaaataaactttacaaatagtttagaactgattttttttaaaaaagtatttctataagcgtgaaaaatatagacaaaatgctgaaaatgggcctgaagttattcttctggagatcttatcaaggacaaaattacttggaagttggaatgcatacattatattttgtaggatttttgcagtaataagtttgtctttcgtacaaatatttttgatgtcctacgtttataaggccttgacaaaaaaattgtttatttaggaccaggataggattttttttttcaaaaaagagagaaaatatatcagacatcgatcgtgtcatacaagattcttctttgtcaacattctgattaaaaacttgggaggacatccgtctgcaaatgcttgccatgttgaaaacaggggctgaccggcttacacatgagctagctttcgtagtactataacgtacctatggacatatggaatacaataaacaccaccaatggatcaatatattacggaatatcacaagtttatctattcttgaataacacttttacttgtcggaatttcgtatgtatttaaaatacaactggcattaacaattcaaggatattcctcgtattacattgtttatattattgaaatgacaatattgcactcaaggaatatatgatgattctttttagaaatatgtataaggcttatgtgttttgtattaagattggaaagtttatacatcacttgaactcagaaacaacaacaaaaaaaaaagagaacaaagataacaaagcggaaaagaggaagggatgaaggtggctttggtaaggctgtattcggaactctaagttttcaacactctccttttattttctgcgcgcatgcttttcaaactattaaatggtgcgtttttttaaaaaaaagtttctatacgtaagttgcttaaaaaaatcatattgatccatttttttaaaaaaataactaatacttaattaatcatgtgctaatggaccgctccgttttccgtgcgcactgttagagttgggaactcaagcatccggacacagccaagtctatattctcgcgtcatccaattcaagtgacttttagccacggtggttgcgctatatcggcgctctggctgagtgatagagtatagtctcttccaccgcgtcgcgagctgtctctccaaatgttacattctttccaaatgtcccaagttgctaggatgatcaccgtgtcaaacccttcatgtgcgccttatcgatgtttttacgatgcataacatccatttgtgatgtgccaaccatgtttccatagccgagaaaaggaacacaggcatagcaaagcctacctgataccaaaataccctcaaaagttcacagaaattataaccaagattcaatattttggtttgaaatttcagattttccagcctcctcgatcagaaataactttaactgcatagggcagttggcagggacacaactgtcaatcttccccgcccacgctccaaaccaggtaatttcctgttatccattctagtgttatttttttaaaaaatactttgggcgaaattttgtcttttctaaaaaaattaccaagaaatttcaatttcaaattttccttatgaaatttcagatctccctgggcgccccaacccaagttttttttaaagtaaatttaacaaaactactatactttgactaaattatcgcaaaactacatatttagggtcatatattagcaacaaatttattccaaaactacatgtttaagattaagtatcccaaaactacatatttactaataaaattatcataaaattacatattttggggtttaaattctttcactaatgtttgagttgtaaatctccaagttttatgattaaactgatgttaaacatgtagttttatgataattttattactaaacctatagttttgcgatattttactttaagtatgtggttttgtaataaaattagtgttaaatctatagttttatgatacatcatgttaaatctgtaattttatgataatttgaacaaagtacttgtagttttgtgaaatttactcccttattttaccctaacttaaagagtaaaagtcaagagttacaagttataatgatgcgactttgggtcaatatcaacagttcaattcgtgataattagagcactacagtagaaaacaatatttggtatcctgtaccaattaaatatgtggtatcctataccaattaggatttagttacgtgtgacatataagagctgtgttcgtatgtttaatctgcttgtcggctggacagaactgcacggttttgaagggcggacatattgggttttggagggcgagcatatggtctccttcaaaaaaagattatggaagaagaaaatccgaagctatagctggtcaactcaccttaggccgtgtttagttcgatgccaaaattttttgacgtatacggacacacatttaaagtattaaacatacactaataacaaaacaaattacatatttggactgtaaattgtggacgaattttttgagcctaattattctgtcattagcaaatatgagctattatagcacttatggctaatcatggcgtaattagactcaaaagattcatcaagcaatttatatgcaaactatgtaattggtttttttcttccatatttaaagctgtatgtatttaaacatttgatgtgacggaaaagttggaagtttggagaaaaaaaagttggaatctaaacacaaccttaatttgctctacagtgttagaaacttctaccctcatggaccttcatatgaaagacttctcttcccttggggacaaagcaattccatctccaatacttatcctgcagcttccccttgactcaatggatgatctcatactattccttttctcttcttcattttttaacatctcagcacacgattggctctgcatttgactgtaatatacttccttaacagagaattaatcatgatttggtactaatcctcccatgtgtacagaccatatatatataatctgataattaatcatcatgtgcatccatgctcgctcgtggttttactttgtcagttggccgaagccgaagaagcagcccatccaatccagataattaattaacagcgacacaacgagaagaactatcagtgtacggcacagcgagctatctagcgctgacgaaacagtgaactgattagtagtaattaggtgcagtttaaatacgcccatgcatgtgatgtggttgttcatccgctgcttgtcttcatcttcgtgattctgatagtgatgatagcttaatgcttattttaatttggaaatatatatatgtggcactactgctcagtgagagtgaacgattttgatgttatgtacagctgggtcgacgcaagcaaaatgtgcatgaattaggttttttttttaaaaaaaaatgcgaggaattaggcaggcattttgacagaagaatttgaactgttcgtgatatcaattaagtggttggtgaaaaggacttgggttaaattaacctgtgatgatttgatggtaactaccatacaatcgcatagaaatttcgttgtttggactgcacggtaaagaagaacaaacgcagttgaaaaaaataataatcaaagatgagctcactaattcacttgtttttttctctctccgttttgttcatatttctgaacattttgattctcatttgtaaatataatcacaaccagtaacgaagaatgaaataattagctgctaataacgtgtagttcgtagctatctgcgatcacgctggagaagccccttgagcacaaccagcttcttgtaatccttcgagttcacgtcgccgacgacctcctcgcctccgccgtcagccgccggcggcggcttcgcccggcgccgattgagctggagcccgtacaccgcggcgagccacgcgcacacgcagacgacggcccagagccggccgccgagcagccccgccattgacaccgccgccaccacgcacacccccatcgccggcccgaactcgccgtggccgcagctgctcgcgcgttcgcgcgagctcgccacgacgacgacgtcgccttttgattcggccgtctcggcgtcggcgatggcgccggcgccggcgccggcgccgcgcgtcgtggccggagcgacgacgtcgtggcgtcgtaaagacggtgacggtggcggcgacagctcggccggtagcggcagtgacggcacggtgggctcgtgctgctgccgctgcccgccatggacgtcgttgctgctgttgctgtttctcctgacattacgctgtgacaccatttttaacgtgtcaaatcaaatgcgaatttctcagacgatgaaattacaaaaaaaatctctcacaatgacgcaattaatccacgcgattaatgtacgtgttgaactgaaaatcgtgtacaataaag

SEQ ID NO: 28315 - DNA, 7181 bp, Oryza sativa
tccttcatgcgcgcgccgccgcggcgaagctcagttcagctcagctagctcgccggagatgaagacgacgacgatcgatcgatcaggcagctagctgctgccgaatctccgagctgagccactatccatcgatcgatattaataaggcggatttggaccaagaaaatgattaactaatgccccgattaaattaatccattggttggagcagcttctccgacatggtgcatcccgttaattaactgtcggattagttgaggaattgaacgggattatctgcatcggattaacgacgacgactagcaacaaacgaacggcacacgccaattaattaattcgtcatggcttatgataaaattgcttttacctagtaaaatttgtaaatggggtcgatttttttgatgggaaaaaaacgaggtcaatttgcttgacaaaatttgctcttgattaactttttctgcaagctatgttcgttggatggattcaccgcgtccttgtagctatcattggcatttgtatctttttctttttgaaaatgatggtatttgtatcggaagttaccttcattatctggaaaatatgatcgatcgtcgcatcaagaattgaggatgctgaggcgcgccaacggccgcacctcctatatatagtttgactgtttgtgttgtatacttgcgtaaaattagagtaaaaaatcaggggcatctcagtggatgacttaaaataacaaaaactatgtgaagtaaattaaattaacatgcaaatgtagagaagatgcaaacttggatagtttttatttgaagtaatcactatattattttttttaaaaaataatcatgtgtacatacaaagtacctttgaaaaatagaagtaactatttccagtactaaaagtatgggaatattttttcacggtattagaagtaactctaaaagtatttgtgtagcattttgttttagggttaattagatccatgccattgcaattttgccatattaaaaaaatgcttcgcgatatcagctgggtgccactgaaacttagtctattactattgggtatgtggtattcataaccatgacaatagcccctgacttcaactcaaatgaattcatgtttgtcatccgcgttttcctgtcaaagttgtcatgctcacttggtcgttctcgataataattgagaagacatggagtactcagcatcattgaaacaagatcaacagttcataagtgaatttgaattgtgtctaaacaactaccataaacgagcctgagaaaattttggcggcaacgcatatgaacgagttaatgttctcaaccgaagaccttcgaacaacagtcacaatgctcgcttaaccattctcggacgatcgagaagatacagagtgtgcgactaaatttcttgtctcgccgtaatcgagaatttgggttgaagtcaagaatttttatctcggcgggtacaccatcgctacattccgtaatcttcgtcgaactccaccaaccattctcgagtaatcgagtaattgtataatctgcgacaaaaccctgaaatatgacttttctgaaatcaatactcagaacagattgttagatacaaatggtctccaagcgagcactcaagggtaacacaatataatatgaatttaaaaattgaaaataaattgaatttacatgtgacaataaaagagtattctctctaaatctgccctcagcaattggagtatggtacccttcctagctcccagctatctttatggaaaagtcgtttttccacaaaggcaacttaaatcttataacaaaccaagctgaagttgacgaaatcctagcccccaatcgtgaagttggtaaagccaatttccgattacacggcttagttaatacgcattcagaacagcgtaaagggacgaaaggatcgacttcaagacatggcgatattagaaaagaggatcaatagataaatattgcatatacaaacacttatagaggttgtcggagaatccatctcttgaacccatctcgtttaaactttgaagcaccaaatttcctctacctggcatgccactgtcgactactattgggtatatggtatccataaccatgatacataagtcagtacaatcttcttcctctatcctcccctcttctctctatcctatcttcatcttgttttcaaatgtgactgacaacgaggagggcgttggcaagggaggaggatgagcgaaggaggctgatgatggcggattgccgctgatgggaggtcgacggctcccgagctctaccaccgcggatgggagaaagtcgaagacgatggcgacgacgatagtagctcccgagcccacccgccgaggatgagaggatgtcgacgagcgacggcggtggctctcgagccattccgccatggatgggaggaggtcaaagatggcggcgacgacgacggtgaggtcgacaacggcggtggctcccgagcccacccggatggttggaggtcaacgagcgacggcggtggctctcgagctctcccgccttggatgggaggaggtcgaagatggcagtgacgatgacggtggggttgacaacggcggtggctcccgagccctcccgttgtggattggaggaggttgacgacggcggcagcaacggcggtggctctcgagccctcccaccgtggaggtggtagacgacggtggcagtgatggtggtggaggatgatgtcggcgaggtggtcaacgacggcgccggagagagagagactagagaaaggtagggaaaagagaagagagggaagaatggtgaacaagatggaactgacagctagatcctatgtgcagttgaggctaacggagattttttacagatttcgtaacagagtggcatggtttcaatttcctcaaattcaagtggcgcgtagccgatatcgtgaatagtagtgacattatctagatcgacatatttgcaatggcatggatctaattaaccatttgttttatagctggtctctctggcatgatttggcacagatattagtgacggtggatagttttgtaaaattctgaatgcaacctgcatatatgttctaaatgtttacttattccacatgaattagatatgcaaccacaaaaacttacctatgttttcttttggttgctgtggttggtgacggtttttatattttggatgcacaagatgtagccagcttggcgtagatgggcacaaaccacacgcagccgtaataaagtgtagttctggaattgagacggtaactgctgcgtccactatgacgtgttctgttcggaggcctcgattccaattcgaaggtttcggaatctgaaatggcggcggcggcggtgcgggcggcggaggagcttgcggagagggagatggcggggcgcgacgcctcccacgacgccgcccacgccctccgcgtccgcgacctcgcgctctccctcgccgccgagctcggcctctcctcctcccccgaccgcctcctcatcgtaacccgccgcttcctcctcctcgctttatccgttttctctcttttagattttgttgtgatagactttgtggttgattgattgctgcaggtggagatagccgcgctcctgcatgacatcggtaagttgatgatgtttttgatttcattggttttgtgtgggggagagaagatgccatgttttttttttttttgctaattcggttcttgcaggtgattacaagtacaccaagtgaggatacttcccccgttgctcgttgatttgtaattcagtaagcacgatgatcgcgaggaatgctgcggcggcggctgcggcggtgttttttcttttttgtttacttgctttcccttccgcccccaactcgaacacgttgggggctccggcagcagattggggctggatctgtgctggacggcggcggccgctcgttggcaacggcgagcggctcgggctgcacgcttcctcgtcgacggcgggctgcggccccgttcgcagtggggcgatggccttgttctgctgctgccattgccggcccttgctctcggccccctcccagttcttcctccccttgctcgtaggccctctttgtttaggcttaggcttattggctgacttttaagtcagcttattggtttatatgatttttaagtcggtggatttaatgtcctaagtttagtggtggagtcatacatctatctcacataagctaaaaaaaacttctccaacctagcttttggcttgagtgacttatggcttcaaaaaagccaattgaaaaagctgcttatttgtttaggcttaaacttttcggcttataagttggcttataagcctaaacaaagagggcctctatagctcgtgcctgaggtgcttggacgccatagggttgatgcggcggtggcaatgccaggcattcatggggacggtagtgtgtgggtgggaggaaacagatcccctgactttgtgaaatctgcagttgtgccactgacatgtgggccccactttttcgcgatggctcacatgtcagttccacaactgtaaaatgcaaaccgcacaaagtcaggggagtctctcgttcgcgtgcgggatggggtgttggtctcttaagagttgagaatgagatggtgtagtgttgatttcatgcggctgcgttgatgttccgtgtcgaggagtatggcaagacttccttcgtcatggtgttgtttttattttcttgtaacccgtttggatttttactctgcttgttgaaatataattggcagcttttctgcctgtttagttttttgaaaaaatgtttgttgggtgagtggatagggacaatgctgaggatatgagcatcgtggagaggtttcttgaagaggtggaactggagcagggccagagggaggaaattgtggcgatcattaaggggatgggtgagttcttcatgtttatgaatctgtggatgaaactatttggcaaacagcagctggcttgagcttacttaattgttcatcgaacttcaaagccatataaatcttatagtttataaaatccgttttttttcctgtagtacaatcccattatgataatgttgtatcatatgaaggccataagtagttcttagtgtatccctagttatgcaatgcatacgttataacatctcaaatcttatgtgcaggattcaaaaatgaagtttcaaagaagtctgttgttgagcctactcttgagtttgcaattgtacaagatgcagatcgtcttgatgcaattggtgcaattggcaagtactgcataaccgaagtttctttatcagctctactcaaacaaagtttccttcaacaattaggatgcagtaaatgttgcactggttatgcaaaatcttttccatgcaccatcttgttttttccccttcttcctttggactctgatggcataaatttatcaagtgtttgccactttgcctcatcatttagtttttcaatattgactagcgcacatatatcattatttcttcctctactgatagaagtacgccacaatctttttcttggttttaataggactgtcacatatgttttattgtcctgagtcttatgctcttacttatctcagcagttgtttccaaatatcatgagtttataagttactgtacctcttaacttgcttcatatgcgttcatatgctaattgcactttacccccttgtcatatgaagctgaattgaaattactgataccacacaaaggcaggatatagggaggaaatttttaggtagcaatgatcccctgaaattgtagacgagcaagaaatagggagagataaaaataagaaaacatcatgtactgttagtttgcaagattgtactgtctaccctgtcctgtccaggtccaagtgtcttccaacgtatgctgatatgggtaatgggctaatgggaatcctactatgtctgtttcaattgagaaatgcatatgctttgactgccttttttggtctcatgtagtatgaataaatgctctgtgttcgaatctttccctaaaacacctgcaggtattgcaagatgttttacgtatggtgggagcaagaaaaacacattgcatgatcctaagatactgccgcgtgataatttgtcaaaggagaaatacatgtccaaggatgaaaaacagacatcaattaatcatttccatgagaagctatttaagttgaaggacatgatgaagacagaggtaggtgatgagttatgtagacatgtgttcttaccgctgtcctagttgaagcctatggagaaagcattaaatatttggacctattgaactcagtactaagagtagtagatctatgttgggtcttatcttcatcaatttacacgtgttaagtacatgaaagaaaattctgcttactgatgctcatggtatatcttctgatttagcatgcatctgtacattggcgaagtgtatgaaaagtggattctgtgtactagtcatcaatactccctggagattcctattataccttctgatgggctaataatcactcattgtctttactttattcaaattattgagcatgcatcttaataccatgtactccaatttacctagtacaaacattccttgtagaatcccattatctcttcctttggcgttgacaccatttcactttgtgcataggccgggaaaaagagagcagagaaaaggcacaagttcatggaggactttgtggctgaattctatgaagagtggagtggcagagcttgaagttgaccaaccaggttatgggctgttggtctgtggcatagcttgaagttggccaaccaacaacaactcatattgctagtcgtctacttggtgacattagcatgttttgttgctgatatgttaagccatgcaaaaaaacgagggataaagcacacttgagtggccaaaccactgaataatgctcctcaacaggtactttgcctgaactctgatttttttctggagcacctgtgattgatgtacatttgatcggcagcaaaaccatcacatcttgcagttattgtgttgaaacagccttgctaaaaattattagtaatatcatcttaaagtattcctcacacgcatatacattaaattctataggcaccacacttggctacagtacatattgctatttggacaaaaaggaaacagatcaaatactagtacataacagcaaacttcaaatgaagaaacaaatgcagaaga

SEQ ID NO: 28316 - DNA, 511 bp, Oryza sativa
gaacattgctctgaaagcgggaacgctttctcataaagagtaacagaacgaccgtgtagtgcgactgaagctcgcaataccataagtcgtttttgctcacgaatatcagaccagtcaaaaagtacaatggggcatcgtattgcccgaacagataaagctagcatgccaacggtatacagcgagtcgctctttgtggaggtgacgattacctaacaatcggtcgattcgtttgatgttatgttttgttctcgctttggttggcaggttacggccaagttcggtaagagtgagagttttacagtcaagtaatgcgtggcaagccaacgttaagctgttgagtcgttttaagtgtaattcggggcagaattggtaaagagagtcgtgtaaaatatcgagttcgcacatcttgttgtctgattattgatttttcgcgaaaccatttgatcatatgacaagatgtgtatccaccttaacttaatgatttttaccaaaatcattaggggattcatca

SEQ ID NO: 28317 - DNA, 694 bp, Oryza sativa
tgcaagtagttcatcattggcttagttcttgtgtttcgatccaacaagtggtatcagagcattgttttcttctttggattttaactgatctagagttgttttgccatggctaataaatttacaactacgccccatgtcttcgatggaacggatttttcttcttggtgtagtaagatgcaatcttacattatggctgaggatcttgatatttggagaaaagtttctaatccttatgtgattcctgatcaaattaataatgctgctttaaaaattgaatttgaaaataattgcaaagctcgcaatattcttttgagtgggatttctcgttcggattatgatcgtgtttctcatcttcaaaccgctaatgagatttggattgttttgagtaattttcatcaaggaattaccaatattaaagaacttcatcgggatcttttaaaaaaggagtatataaaatttgagatgaaacctggagaagctttggatgactatctttctaggtttaacaaaattttgagttatcttagatctattgattgttcttatgatgttaattacacacaatctgaggtttctcgtcactttttgaatggtcttgacatgtctatttgggagatgaaacttacatcaattcaggagtatgttgtcacgcccgaaatttctatccaaaattccaaacgcttacatgtgtgtg

SEQ ID NO: 28318 - DNA, 642 bp, Oryza sativa
gcaagtagttcatcaatggtctacaccaggaatggtagccgcgcaacaggcgagggcagcaacggcgaagagcgcactgatggggcgcatccccacagcgattccggcaatggtccgccaccacttcccgagaatccgacgctagtccaagtaatggcacatcagacccagatgatggcagccatgatgcagcaccagcaccagcagatgcaccagcggatgctgcagcacgccgaacagcagcatcaacagtttggtccccctccccctcagtccaagttgccagagtttctacgtgtcaggccacccaccttctccagcaccaccaaccctatggaggcgaatgactggctccatgccatagagaagaagctgaatctcctgcaatgcaatgatcaggagaaggttgctttcgccacacaccagcttcaaggtcccgcgtcagcttggtgggacaatcacatggccacccgcccaccaggtactgaagtcacttgggtagagttctgccgtagcttcaggaaggcgcaagtgccagatggggttgtggcacaaaagaagagggaattccgggcactccatcagggcaacaggactgtgacagagtaccttcacgagttcaatcgcctcgcgcgatatgca

SEQ ID NO: 28319 - DNA, 646 bp, Oryza sativa
ttttctattaactcaatccctgcaacagtactttttgattctggtgcaacgcattcgttcatttcaaagaagtttgttgggatgcatgggttaataagagaggaacttagcacaccgatgcgggttcataccccagggaatagctccacttcggttcaattcagcccttctataacaatagaaattcaaagatcaccatttctagccaacctcattcttctcgaatccaaagacctagatgtcattcttgggatggattggctgaccaagtttaagggggtcatcgattgtgcgaatcgcacagtcaccttgaccaacgagaagggagaaaccgtggtgtacaaatcactagtctcaccaaagcaaggggtctctttgaatcagattgaagcagaaatcccagtggacaccgtggagaagaatttgaggaaattggaagatatacccatagtctgcgagtatccggaagtgttcctcgaagacctcactaccatgccacccaagagagagattgattccggattgacttggcaccgggaaccgccccaatttacaagagaccgtacagaatggcggccaacgaattagccgaggtcaagaagcaggttgatgagcagctgcagaaagggtacatgatgaactactg

SEQ ID NO: 28320 - DNA, 8573 bp, Oryza sativa
tcagatcaaggtccgagcactcaatcgtgatggcagagcacttgttgtagttattcctcagacctgatgcttctctaaagagaaataagatttcattcatcacccgcgcgtcatgttctctcggccggagaaagggaacaacatcatcagggtagagctaacagccccgcttctttagcacctgaaacatcaaacttaagatgtgcatgacaatgatgaagagaatcagcgacaaagggtcaccttgccgcacaccacggtgcagccacacagccagcggtgggcggcgactggcgagtggcgcggggcgatggggcaggggatggtcggatgtgggcggtgactggcgaatggcacgggaggcgtacgacgcaggtgctggtgagcggcactggcgcctggtggctaggcttagagacacaagtgtgacgccgccgccgtgttaggagactggggagggaggagagtgcggttgatcccctttatccttttcacttttctgctagggttcactgtatttcgattttgggccttatattctatgccacaggcccacggcccaagcaataacaacccatgtgtgacttgctcagaaactgaggattatctactctagcttgttaaggctcacgagcagctcacgagttagctcgagctagctcgttatctctaacgagcttaaaagtcagctcggctcgttacgaaatttaaatgagacgagctgagctgagcttgtcacgagccgagcgagctaacgagtcaagagtttcctgtccacccctacatgtggcgccaacatgacatcatctttcctttcttcttcctcctacctctctctctccccctcatctctttctccccatttctcttcacgggagcagggcccagatcatcggtggtggcgacggacgagggccggagcggcggcagccgacgcctcctccaatcccatcccggccagcgttcacccagtaccgcagggacggatcttgcccggcaagcgcttaggcggcacggtggcagtggcagcagcggtggcgggagggtccgccctctgcggcgttagcatgtactctcgactgtgccaccgagagtcaccctcgccgcctctctttctcttccctcaacggacgacggcgtttgcgcatcaccgacgcccctacccatggattgtcaacaatcttcccccatccccgctgctccgttgccgccacgcctcatcgctctagatgccacagcctcccccgcccgtccccgtggcatcgttgccggtgccagcgccggcggccaggagggcggtagcaaccccttctctctccctctctttccttcttgacgcggtgcagtgatgaggagtgctcgcggagcacgattccggtgcaaagacagcattggcgtgatggagaccggtccacagccgctgccgccgtactgtcgcgctgccactctgcgacgtgctttgtggcagtgacgacggtggtggccaccgccgtcggctccatcgccgccctcccgactgcagtcatcgctccggcccgctgcccactccctcgagctccgccatcgagctgttgttgcggctgccaccaccgctgctatgcgacgtgcttcgcggccgacaatctggcccctgctctcgtgaagagaaacaggggagagagagggaggaggatgtaacgccctgatttttgttcagaaataaaaatcattaaataatgcatttttagaaattatgttaaaagttaaatcaatttaatcaagtgaaatagtgagggaattaaaattttcctttaaaaatcatggccggaaatattttgtaatattctctgtgccctaatatactctccagatttgtccgtgaattttcggagctcaacatctaattctaatatcacaaagttcattgaatcaaataaaataaaaggaaaaccaattaaaatcctgccctttgcaattgggcctctttcggcccaagccttccttctcacccgcggcagccctcctcccctcctttctcggaccgctcggcccagctcgcacccccttccccgcaaggtcgtttcatctccccttggctccctcctctctcccaaaccaccgacagtcagggcccacatgtcagttcctcccctaacctccagctccccagccgaaacctccattgccgccattgccgcccacgtcgccgccgattccggctcctccttctcacgccctcgcgcccaaaccatgtggaattggttcccctccacctcttccaccaattcccccccactctcccgcgaaatcggcgccaaaccgcctcatccgcccacgtcgcaggagccccacttcgccggccgttgccgcccctctcggccacggttctccctcccagagcactataaaacgatccccgcgcctccctctcccttttccctcttttcccgtgctccccgcgtcctccctcgctctccccacgccgagcccatgcgccaccggtttccggcgagctccggccgtcgctcctcgccgccttagacgccgccgcgctgcgccaccaccaccatcggcatcagcgtgccgtgccacaccccggcccctactccctttcccctctccgcctccgaaacattgccgcaccgcgcgcccgagctccaccgcccgtcggcatcctccagccgcgctccaccgccgctagggtcaccgccgcgctgcaccgccaccaccactacctctgctgcccctcgccgcacactggcctttgctcggtttccccaacccctcaccgaaacaccacctccactgtcaacccgagccgccaccacctctaccgcctccagccgtccatcgccgccgccctgagtgaccttcgacctcgcgctctccttcgccggcttcgcagcaacgatagggagcccgacaatcccctcatccaagcccctcgtcgccggaatccattcccctcgtcgcaacgatagttttcccccacattgccagcggcgcccgcgttttcccgtcgccttgcgcctcctcctttttccctgatccctccatccccgtggacaggtcgaggagctgctcagccatccctccgcgctcgccggtcatcgctggagtgccgtcctcgcttcccaacccgaggaacgtcgtcgccaatcctcgccgccggcagccttcccgttttcgcctcgccgtcttgtcttcttggtgagcatcccccttccctcccagcctccctccgctgcgtcccacgcgtgccgtcgcgctagtggtcgccaccggcgaccatcaagccgtgcgccgccgctccctggccggccggccggcttgaagccgtgccgagcccggcagccacaccgcgctgtgcctggcagccacaccgcgccgttggattgggtgaatccaggcctccacgtggccgtcgtggtgccgtcccacgcaggtgccacctcggcgacacgtccttgccaccttgcccgccggtccaccgtggccaccacgtggtgcacccgcggatggcgcgcgtgtggactcggtccaccgtgcacccgtccctttgagccaccgacaggtggggcccgcttgtcggcgccacctattcccctcggtgacgtcataaaccattaataattgtgtcataaatcggtaataattatagaaattgatttaaatggctgaaaacttttaaaattcatatctaattcatactaagtccaaattgggccattcaacttgcagaattcatctaaaattgagctctacatgtttgtttactttttatgtactgttttcttggtttttattagagtttttttttctcattttgcatgccagtgtgtagtttccgccgtttcgaaagatcgcggtcgcgaggaaaagtgttcggaagattctttcaaagaagcaaggcaagtcacacatttccccttgagcatgttgatcccaatttataaatgttttaccgtttgcaaataaatatgcatgttttgctaattacatgggattatgggtttaccaatctactcgcttgtgccatgtttacttgttaccgtcctttgtcaaccaatggatgatagtttatctagctcatgatacttatgttgatctagctagaattatatatgcttagccatgcttaattaccactagctcacaaaatgggataattacactatttgacatctagtatcatgatgagctgcgtgctcgagacatccgaccatgtttcattggtcataattatccaactaaaatgtgactgaatggtgagcagtggatgcatggttttgctagtcgcacccatggcagttaaggaccggttcacgggaaaccctagaagacttgcagtgcttaccacaagcgggaatgggtaattgcatgatctgtagtatagctcgaccctttcctaggcaccggtggcgagggtgggcgttatggagttggatcggccggggtgtccggttgtccagctgccggattcaccgtggcgcacgaggggactgcccacctccggggtagggggtgggggtgaaaccttagcatggtgtggttggttagggaagagttatatgaagggtcttatcacaatcactcgacatggtaacgtgtctgcgtaggcacggtgacatgccggtggattgtgttttgtgggtacagttgtgcacctctggccagagtaaaactattcgaatagccgcacccacggttatgggcgatcgaccagattcaccgtgattagtctcacccttaataaatcgactcaatgcactgtagttcaggtgggttggttgggcctgtccaacgtggtgtagcattgttcagtagagatttaatattaccttaattactaaactgttttactgttttgctcaataaaatgttttacaaccacctttatgcaaatagccacaaaccgtccttgtgttccccttgcacgtctgcatcattggtgtggcttgctgagtacggtggttatactcagccttgctattgtttccccttttcaaaactgtagtgcttctgagccgaagacaaagttagagaaccaaggctcagaccccagttgagttttgcttatggagtggagctgaagcctcgctaggatcgcctttttccgctactgctgctttcgtttcggtgtgaggactatgcgcctcttctgtaagtatttacgtttggatctgtctattacttattgttttgtgtaccctggctgattctggacagggatttaatgcacaaaatagtctggaaatttgggctaaatttctgggcgtgacaaaggaagagttctcaaaaaaaaagaggaagaaggaaagaggatgccatgcgggccccatattatttttgtgtgaatgacaaatgggttctgcagatatttttttaactctaatacacgtgagcgccacgtcaactccacgtggaatgaagaccgagtcaacatcatcacgatggtgccatgtcagtgaaaccaccctccaaaaccaccaagggagttaaattgtactggttttaagagttggagggttgatatatccggtattgtcattcagggatacgaattagattcggacactagttaagggagtcaaagtgaacttattcccttattatgttacatattggattgggttttatatggacgtgtcgtatgattctgggtttatttgggcctcttcttgggcttaacaaatatattgggccattaaaatagtcagatccaaatttctttttattttttattgttttatgtcagataatttcagctgttagattttgatccaatgacttcaaaatctgcataattgaggcctcaaaaatcattcgaatcctatatagacagccccttagcttccacgccagggaacatgtcgggaaatagatagcatgagtccaaaacactctatctaacttcttgattgaaagataaatgattgcaaacaatagaaatctcaaatgcagataatttacaatttgttttacttttaatagacatcagttgcaaaggaagggcacccggcaagtttcattgaaaacccaagtctgtggtcctagtcttgcaaaaccccagatttaacatgaccacaaaacttgactggaaacacccaaaataccaggttgaaatgaaacgaacagtgatattagaagtaatgaaagggagcataaacttgtataaatagtgtctacttataagtgaacatatgtgcttgtataaatgaaataaagcaacaataatcaattgtctcaatctaacacaattctcgcaacaatctctgtaggctacgacgaagcacttgcatttttacgtttttgttcagcatagggaaaaatacagatcaatgaacaattaaatttatttctcaaaagtggtggaccgaatataaggtgggttacttcaaagtgtcactttatctagcttttgtccctctagagcatttttattgttttagctctgagacagacatacagatccactttttgattccttcattgggcaagcaaactaggggtgttcatccttggttccatctgaaccagccaaaaccaggcagagcaaacaaactttagccaaaaattagcccatagtgaatatggctcgctttttttaacccatagatgaacagccctaaagcaaaagcagagctataaagaaaaccagttatatgcaattctaattaccttacaaagtagaaatatttgtctgtattaaggtctatctagtgactgcacatgccatagaaggctagagtgccatgaattttgatcaccaatgtacctacaccaaggaggcaagaacccaagatttttgaccgcctaccaaccgccatccaagaatcctaacatagatatatcatatatgtattgcagcagaacagcagcaatgttaatccagcagtacgaaaaattatcacaaaatccagaatctcctgcttgttctgatcagttagcgatagatttgagtgaacaagtagtctctgactgaactagatgtatgaactaatttaagcgatgcggtaaagtcctagaaaataattgtccaaattaaggggcttactcataaggatattacgcctgccaggcagggtgaagaaagtctccggagtggatcatagatgctgtaaacctgtttccattggttggagatcactagggcacgagtggactcgaggtaatccacatttgagtatgctctaatggtgacaagctcccccacgtgttgaggaaaatcgaaggatatgtgagggtcattgttgacccaattaagtgaacataagccagggttgccagcagggtaatcaaaggaaattaatttgcaaccggtaacaatctcctcctcgtcctccaagtaggtcagcatttggatctcgacaattgacaaagagtacatgtgccctgctgtgatggtgcttgggcttgcaacggaggagacagagacatcgatcttgtaagcagtgatttcgtcgctagtgttcgatgagccaaggaagagtagtgttccctgaagagggatggcacgtccgatgaaaggcaggtctttgtcatctagtttggcccattgctgcgtctcggtgtcgaacatgtgagtgcccttctggccgtgcccggttatggacagcagaatgtaggagccaactgctacatgggacttgacggtatccaccggtggaaagatgtagtcagttggggtgagatcccaagggaaaaagggcgggcgaggcaggggtttccactcgcaatccagcagacagcagcccgaggcattgtcgatcactcgagccatggagagatcgagcacctcgaaccagggcacgaaattgatgtcccccgtcacgcagggcatgcctgccagggcgtatatcctctcgcccatcggtaccaggatagggcagagcttcgtcgacaggagcttgggtcccgataccaccttgcacgcgttggtgtcgaagacgatggtctccgggccatagtccctgatgcctgtgttgccgccgacgccgacgatccacggggcatgcctcctcgaccgcacgggaacgaaagacatgcagtgcttggagggcaagcgggcgaggtgttgcggtagaggtacaggggtgtcgccgtcgtcgtcgccgccgccgccgacgacagctggtgggttcaccttgaacacggactaggcagggcaagtgactccatggccgaccaccaagtacacggccgacacagactccgtactgcttgtacgagcgatctgacgagggattgaatctccatccttttcctccatcttgtgcttcttgctcaggcaggttagggttggggattgtttttgggacagattccaaataaacatatttttaactcgagcaaatttgtaatagcgtgatctagtttattacaaatgttgcacgaatacgaatcgaaaccttaaactattcgaccaccaaatcggacttattatatagtgagagagagtaggttcccccgagggaaagagagtaggttaccctgccagcgatcgggcgcccgatcagcgacagaaaaatcgagcgcggctgcttcccgcgctttcacgccatcccaccacggggcccaccacacgcgccgtt

SEQ ID NO: 28321 - DNA, 23209 bp, Oryza sativa
  unsure (1)..(23209): unsure at all n locations
caaataaacatatttttaactcgagcaaatttgtaatagcgtgatctagtttattacaaatgttgcacggatacgaatcgaaaccctaaactattcgaccaccaaatcggacctactagagagtgagagagaggaggttcccccgagggaaagagagtaggttaccctgccagcgatcgggcgcccgatcagcgacagaaaaatcgagcgcggctgcttcccgcgccttcacgccatcccaccacgcggcccaccacacgcgccgttgcaacaaatcacccacatattacgaaaaccctctattaagggaatccgtttcattttttgtttcatcaagtttcagtaagtgtacatgtgatgtttcactatgtacggatcaaatgttacagtgaattgaaacatcctttcgctatttgatgaaacattgtttttatatagggtgaaatagtgcccgattttttttggaaaccgttgtttcatacgttgcaaaatattccacgaggtgatttggttgtgtttcaacttttcaaaagactgaaacattttcgaactacttagtgaaacatttccggtctaaaaaaatcgagcgttcttttaccaagtagatggaaatgtttcactaaatagttcaaaaatgtttcagtctttttaaaaatctgaaacacaactaaatcacctcatttaacattttgctacattgtatgaaacaaacggtttccaaaaaatcagacgttgtttcactctatataaaaacaatatttcagcaaatagcaaaatgatgtttcaattcactacaacatttgatctatacagtgacacatcacgagtacactagctaaacattgttggtggaacaaaaaatgaaacggatacccttaatagagcgttaccgtaatatgcgagtgatttgttgcaacggcgtctgtggtggggcgcttggtggggatggcgcgcaagcgtggaaggcgcgggaggtgcggcgggagcatgggaggcgcgggcgcccgatgcatgcgcgcccgcatcgggcgcccaatttagacaatttttgctttatttaaacttgctcttgtgttcggtttcaagggatgggaactactcccccccccccacacggaaaacggaacgatccattagcatgtaactaattaagtattagctatttgtcgaggagtgatcctctctagcgggaggtcgtgagacccccctttgtgagttcagctgggggataaggcgcgaactactaggtcgctgcaaatctgagtgagagaccagtgattatacaggttcgggctgctatgaagcgtaacaccctactcatgtgtttgggattatggtgagttgttacaagagatcttgagctcctcgggaatccaagccgtgcttcctttagagctcaagctttcgagagtcgtcccctttctcggtgggtgaggtcctccttttatagttcaaggggataccacatgcactgttcatacctaccccccatgggagggggggccacatagcctaagtcagataactgtccgtgccttcaaccagaagcaaagtggtcgtccgcctttaggtggggcccaacgccgtcctccgcctgacacgggggacatccctgtcattccctattaattgtataaagactttggtgaattcatcatatacaggcggcacactcggtagtgtgctgatggcatacctgcccccactccacctgacacagggcgggacgtggggccactgccacccgtcccatccgtctgtgaccggtcacatgccggtcaaggccgattgacatgcgtcaatcgggcggcaccacgcgcctgcccatgccgcattaaacgcggtgtggggcggttgggacgccgctcaattaagacgctgggcagggtctcctgctcctgctccgctttctcggccgccacgtggtggccgagtgagggcctcagggcggtacgtgccaagggcacgaggggtgtgacgtggcaccccaaggccccctggccacctcagtgctacccgatctccccccgaggggacggggaaatagtcgtctcctttagtctccgtcgccgtcgttggattcgcaaagaggagaagaagcccgggcaccggttccttttagccgtaacctgctggaagcccgtcatcgacgtgaatccgatctactccgcctccggcagagccttgccatcgacttcgtggttcctggacgtcgtagtcgccttcttcggcatcgcagcgccaaggtgaagcccgtccgctggttttcctctgccaaagatcgccggaacgccgttgtcgtcgtcgaccagtacctcgttgcccttcggagctcgtcgccggtcgtcttccgtcatcgtttgtcgtcgccgtcaccaccagtgagttcctctcatcgtcctctctgcgttggtgctctcggatagtccggccgagcttcctagctcctgtggccgtgtggtctagtgccttgttctggcgatgatgtcatgctgacgtcataaatccccttttccttctcgaaaataattaaatattgcgtcataaatcgtaaatccttttatgttcaaggctaaaatcagtttaatattgtaaaattcataactgattcatatggaatcggaattaagtggtatcagagcctactctcgaggtttcacgggcgcgtgtgtcgcagttgcgcagacatgatgcgcatggctggtgttagggatggcaatggggccccgttcaccatttccccgtggtgaattcacctattaggtgacggagatggttaatatctgtccaccatggtgaataaaatggtaccatagttatcaccatcggggataacgggggtggggncggtnaaccattnaccgtcctcgccccccgcggtgacccgacctttctatatagagaactaattttagactttatagacattttggcccataatactaaagcccaattaacaggtatatataaaaagctaaccctagcctctcctccagctctccaccacagccacgcccgcacaggcgcgcggcgcgggcgccgcttcctccactcgcgcgcgccgctgccttctctcgcgatctcccccgcaccgccctgcagacgcgcgcgcgccgccggcgcctcctctcgcgcgcgccgcctcctcctctcgcccgcgccgccctgcagatgcgcgcgccgccgccgccgcctcctctcgcgcgcgctgccgcttccagacgcgggcgccgcctcctcctctcgcctacgccgccctctgcagacgctcgtgccgcctcctctcgcgcgcgccgccgctctcctgctccctccgttgacgcgccaccgggagccgccggctttgtgctgcccggcgcctgcaggcgtcgatgtgggcgtgggagatgtagttgcgtggccgggagcggggtaaccacggggaaaaattcaccgcgcggtgatcggggttggtgaaaatatagccccgtcgtgattgacgggggcggggacggtgaaattttatcaccgtggtgacggggacgcgggtgtgacccccgacggtgaattcaccgttgccatctctagctggtgtggaccagcatggcacatgcgttggcactggacacacggacatggccaagaggggacgttcctagcatggggttgatcgacgggggcgtcgatctctcttaagggggtgaggatatgacatctcggcctaataggatactcatatcaacaagttacaacttcttttccagaagccgatctctaaagaactctaagattaagcgtgcttggcctggagcaatttagggatgggtgaccgattgggaaattcttcccgagtgcgcacgagtgaggacaaagtgtgcagaaaagacatgtgttggtctgtgagggcagtctatgacctatgaaagctgccagatgtaagtggacccggcctgggaaaggctggtcgttacaaaaggccagttcacacggccacgtggctagataggaaggttacttccctctactgtgcgtacccccgggcccatatcaccaacagtagccctcggcactacgtctgaccgcgacccctccagggcggtctagcgtggtgcctcataacttccgtcttgtgataatgggtcccgtggggagttcgaggagctatcattggcgcgctcgactcaagcgcccactatgaagattatccgactgccaataaatgcgccacgcgtgggggcgcgtagggcagaaagactggggggggggtctgtcaaaccgcgcccggtatcattactggccgttgcatcaactgcctgattgtgaggcgtgtgcgaaaaatgggattatcggtgggcccgaccggccatgaccgtaatcattgcacgtcccgcgtcaattatgctgctgacagatgcgttcaacacggggcgtggatttagtggggcgagtggttcgagagggtgcgaaagacgaggaggcggctgcggttgcggggaacgaggaggcgggcgctagcgaggcgagaataaaaagggaggagggaggagagttcgtctccttcctctcgccattcttactctcgcacacacgctcctcagcccccaacgttcctctttcggattactgcacctcgcgcacccaatcttcccgctcgcactcacccaccgccatgactcaagacgccggcgacgccgttctcctggcctcgcgcatcacgatggatagacacttgagtctcgtccacaagttcatgccggagggcgccgtcgtgagggcgggggagtcgcggccaaggccgcggtacccggatcggtccgtgcacctcctgtccttcgccatggcggggttgattccacccttctccagcttcttccatgaggtcctggatttctacaggatccacgccttgcatctcgcctccaacgctatgatgacactggccccactaaaacctcctcgcctccgccctcctgccaccttttctttttcaagaaattctcatgttgtagcttaagataggccaaaatttctcagttggacatgcttgctaacatagatgcaaaaagaattttgacaaaaacccccaaagagtactgataacttctatatcagtataaacccaacaactggcagtaccgtcaaggaaagccccaatttgttgtttcagaaataaaaccttatttcgttttttcttgattgcaacaagtgaggctgttgcgttaggtctgatgtcccaatcttaataactaaataaactaacttatcaatcatatagatttcaacatatgtcatactcatacacctgagccaggttggatacagaataaaatacattgcaccatactgtatgcggcaaatgcgatgcaactgacgacgataacaacaaccaacatgaacatctggcaccaaccagtcattacactatcaatcatattttttcataagagtgtgctactatttaactggcagttctttatcatgtaaaacctaatcgccaaacaatattatccattgtccattataccaaaaagcatggaggatggaatcggaaaaacacataattggtaaaacagacagaacatgtgaacaagggagagacgcatataactctgccaggttggcaaccaaccacatttatacatggatacaaagagagggaaaattattgtgccatttgttccttgatgatactgtaaaggtgataagaaacatgaacttcaatgcatccttagtaggtgacatacataatcaatcttcacacacacaagagctcatgccaacaagaaattactctgttgccaagctcagatgtatgtatttttcttaacaaatcccaataatagtaacaatttgttcctacaaggtccctgagtcatcaccaaattgcagacaaattggaaccaattttaccttctacagaatcacaaattggaagcatttacttgcacaactcaagtggaacatcaggtagaaatccagcaaattactacacaccagagaataagcctctgagataatcccaaacaacatcaacaaaaatgcatcaatcaaacacatctatggacggagcggcggccgagcgagcagctcaggccacctctccggccgccgcggaggccgggggcgcgcctgcggcggaggagcgggacctgacgaacgcgaggaggcggttgctcacctccctggagtagagctgcagcgtctcgatgccgtcctccacggaggacgaggaggatgacgaggcggaggcggcgtcgaaggcctgggcctcgacggcgcgcgcggcgcgctcggcgtcggcggcggggacggcgccgtagcggtagcgcttgcggagggcggtggtggtgtcgccggagaggacggcgacgaggcggcgcaccacggcgtcgcgcgtgcggcgcgtgggaggccagacggcgaaggagaagggaggtggcggcgaggccgagccggcgcgggggagctcgtggccatgtgttggtgtcggggagcagagtagtaaagcagtttgatgcgctgcgtcggctgcaaggagtcttttacacacgttttggagagaaacggtcatacggataaaatgatgggctacactacacatgagtagatccttttgtcatgtgactagttgacttgactaatgccacaaagcccacaagagcgtggctacccatcaagacgccttcttcctcgagctgagttcaaaggcgagtatacgtagggctgtacacacggatggttggttgtcattggcgacagtggcacgtacaccttgacctaaggtgacttgggaggtggggatgtcgaaagatggaggcggagcgtcttatgactcttcatccttgctgcaccaccaccagtcaatggcaaataagagacatccgagagaagattggtcgatgactaggaagagccctctcctctttctctctctcctagtttcaacaccagccaacagcgatgatggggtcagtcagagcagatcagcgataaggaagaacccatagatcctgtaacgatgagattggaattggtcgattgatagtagatgtagtggcaacagcttgtggagatggatgtccatcgacaaaagatgcttgaggtcatgctgacagtggccactccgcttgaggttgccctctctccctcacccaactcttcccatcggctatttggttggatctattgtcaggaaagggcctccttttgcaccctccattgagcacccaccggcttccctccctcccttcacttggctagaggaggaacatgacctgacggatgagcctcacaaaggatgccatgccgacacgcctatgtgccatgccacgtaagaaaaaaatgtttgtaaatattttaagaagctgtcctttcttgacaaatttataaaacccaagataaaagtggcatttgaagttttatgtgaagaataattttttctactatatttgtattatgaagtttgctatctcattatcatgtcacccaagttggcagcgagaaaaattggaaaaatcaacagtattgaaaatgttttaaaaagtatttgaacctcaaatatattattaaaatatgccactatgttttaaaaaagtatttgctcaagagtatgaatttataagatattttaagaaaatatacatatattttaatagaattataataaaaccagacatttaaaacaaatatattacaaaaactacatatttaacactaaatgtaggtcccgtttggcataactcctgatctcatatttacactagatttagactttataagttaaattaaagattttgattttttttcttaagtaagaacaaaatgattcatttaaatattatcaatattatcacatatctagatttgtggatttattaagctagagatacctagctccaagaaatcctggatttagagctgtgccaaacagcggtatattacaagcctacatatttcacaaactaatgcaaacctctttgatttggagaaaaattttctacgaagacttctaaataaaggattgaatcctatggaatggactggattttggaggaaagttaaccgaaactccaactaatttcattagactatctctcacctgattccttctttttttttttccttcagtctactcaaacaatagttcatgtattttatgtgtatttatttttatagaaaaatcctatgtttttctattcctccaatttttaaacttgtgtttcaaaggagctagggatatgtttgtgataacttccttaccaaattcataatttgtgatactctcacttatctttattttttacaataaatttgatgccagttctatttaataataccatcagattattgaaatggactatttgcttcatgttttttaaaaatatattttctcaaaaatattattttactgctacttataccacttgctttaatctatttgtaaagtttatttattaaatatttaatttgcctcataatgtttcatagtaataatctgttcaataatctaagcaaacaaagttttaggttgcgtttgtttcaagaaacaaacacaataaagagaaaagttattcgttttccacgcgcacgcttactaaacagcaaatggcactttttttaaaaaaaatctataaacgattactttaaaacatattaatctattttttaaatttaaaataattacaacttaattaattataagttaatgtctcatctctaatttacgtacctcaatatctcacacccaaaatctctaatttactcaaatcttttcgttgcaagaaaaaaaagggcactctcaagtctctagcctttcaaggacctttgtgtaaaagtggactcaccagatcggcgcccgtttaagccgaagagagcaaacccagagatatacagtcaagggccaacaaggatcggatccctcgccgccgcggcggacgacggcgaggcctccgaatctgactaggtactccacctgcctcttctctccctgttcgtgtgtgctgcccgtgtctgcgtgtggcggggtctccatttcacactaggggttgcggctccgcgaatcttgggggtgagtttcttttcttgtgtgcaagaacttttgggatttatatgcttttgaatccacactgagatgtgtagaccactcgatatagtcgctgctggattctgattgaggtaagtttgtgcaatggggggcaagagcgtttttttttttttttggatatgattggagcgtccttttccagttaggttttggattagtgctctggtgtgttgttggtgaaacgaactctgtagaatcctacaaccttggacactgtaaatcagctcgcctgtaatcctgttagaatgcacgcacgagtaggtatgtgtgatgtgtcggtattgtgtttgatattcttagctggcatttgctaattagaaacaccagtatgtgctgattagaagcaccagtatgccaatttaagagagattgttgtgagagcatggcagcatgagttatacaacattagcacatatttttgtaccgcatgtttaattaccttcaatctgatttagaattacaaaattgtacagagtttgcgtccctatataatttccagttcttagagtttttctttttttggtgttgcttgttgatatcaaagttcctcactaggctgcattgagttctaatgcaataggtgcatcagaaaccggagggttttacattaacttctgcccttttacatgttattaatgaatattgagttgaactggacttttttttcttctaaaacactaaaacaatgctaaccggtagtccggtatttctaatgcatttgtaatggtttattgctcttccgatttttgtttgaactattagatttggtttgctggtttgcatctaatgcaggtgatgttctgtatttcaggcttttcatatcttcctaacagaagttgtccttgtcagcaagatggtttcctttaagatgaatgaccttcaaagtatgaacatcatctatccctgtttccatcatctgaaatttccattgaacactaaaatagcaatatattgttctatgcatcattttcctttcattgaggttgaacctttcaatggttgcagaaattatatttctctaattatggtagtaaccttgaccatgtttaaagatgtttgaacttttgaagttcacagtaattttgtaaaagttgtcctttcttgcatatgctttgtgtttatttggcttttgacgatcccagaattgacaaccttctcttgcatactgtacaatatgctctgcttgccatttaagttgttactctgcttcttgttatgttagaatttaggaatacgttataccgcagcagagaagcaaatcctttgctgttgtggctatctaagtataaaggcacacttttgccgttccttcatcacagccagtaattttctttcgacggttgagattcctagtctttcaatgccctaccaggcccattcctagcctttgcacggttgtgacaaaaccttgcatgctcacacttgctgtgtttgtgttttcctgctagattttctactaatgcagtcaaacactactgttggtaacttgatcatgctgcttgtcaccgctcttgcttgctgtgtagccagagctgtgcacaacaaatgtctgtactattatgaacaataaaaaagtatatgtgagctgtagttatatttaggacctgttcgaatgtgctattggataaagattgtcactggcacgcaaaatgagacgagccattatattaactattacgaacttgaaaatggatttatttggtttttaaaagaaacttgtacttagaaactttttgcacgaaacacaacatttaacagacaatttgggaaacgtgctaacggaaaacaagggaaaagctccatccagatgctacatcgaccgcagccttagttgacatgatctagttgaagagttgcatacttgcaatcattagatacagaaccttgttctatattgttctgtattagtcgtggcttgtaaggaccttgggtagtgtaatgggattaatctcatagaggttgtagccagtgtccaaatgtggcaccactacaagattaagcagaatggggaagaaactttaagagaaaattccctgtgtacccctgaaactttctctaatcctgtccatgccccaaaattttgctcattcccttgtatacctctaaattttagtttggatcccttccataccctttttgttagttgaccgtgagttgatcgttaaattcctatcaagtagtccattttgccctttggtatgaacaaacatataaaattatggagtatattgttcaagggtagaaatttgctatatgagactattatctcaatgagtttgttatgcgagatattattaatcataaaatttatttatagatatgaaacaaaaaattaatattaatttattatttattaaaaaatatttatgtataaatagatttgtcttatacaacaaatatgttgtacaatactatctacaaaataagctacacatacaatgtttaattattaaaaaataaatattaatttttatgtcatatctaaaaataaactgtcataaataatatcttgcattagaaactcataaatataaaagtctcatacaacaattttctaatactccattaatatatatgtttttcataccatagggcaaaatggactttttcataagaatttaacggttaactaactgtcaactaacagaaagggtatggaagggatccaaactaaaattcgggggtatacaaggaaatgagaaaaattcaggggcatggaagggattgggcaaagttttaggagtacactaggaattttctcaacgtttaagcagtgtgttatatgcaattatgcatcatataccactccaatagagttaggcatagagcagattttggaagctaggatgctagtatgttacaatgtattacttgtggcaatcaatttttcatgaaggaatacattttttctgtcaaatattttcgtcagtattttttttccctgaaaatctatactttcctggcacgatcttgagttgaatttaattgattgcctacctcatgccattggcaattggcacttcgttgctcatccccctgtagctattctggagcatttttctatttttgcgataacaaatgcattatgcaccctgctacattttttcaatttttttcatctcatgcttggaactatgctcttcagggcatagagcactgtttatcctggatgggatcacatttcccatccccacaaggtattattccattggttggattttcttttatgctttcttgctatgccacatcatcgttatacccatacccacttcaattggtaatttgtgaatctcatcttgcagagattgggatagggctgacaggctttggagtattcttctcatttctggggatcattttcttctttgacaaggggctacttgcaatgggcaatgtaagcttgcttgaaacttttgctgaattttttgaagatctaagccaatgaaatgtgtatgcatgtggaacatttcagattctcttcctgtcaggcttaggtttgactattggattgaaatcgactctgcaattcttcactaagcccaagaactataaggtttgtaaatttactgtagcttatcagagcttttgcccatggactatatgttatttaatcaactaactgtaactggcagggtactatctcatttggtgctggccttttgcttgttctaattggatggcccttttttggcatgctattagaggcatatggttttattgtacttttcaggtttgtttctcattgcttgtccattgaccaatccttcttttccactatttaatgctgagataataaagaatgtcttatatttgaaaagatttctgcacagtgcatgcttgacaattgtcaggtttaacatttgtcttgtatgtgacactgaaattgcagtggattctggccaactcttgtggttttcttgcaaaagattcctttcattggttggatatttcagcagccatttgttgcatcggtacagattttcccaacagaaaaatattctctatatggacactgattactgcatgtgctaactgaaaaaaatattttatttgcagtaccttggaagctatcgaggaaaaagagttccagtgtaggtcttaccccaagtagtgacacagcaattcgaggtttacatggcaacctcaattggttttgtaacgcgccttccacatttctgcccttctctaccttttcaatcaccaaatctttacaaatgcacatgaatcagggtctttttttttttgtaaattgattttgcctccccttggcttttaatgacacaatactctctttagtaagccagattctaggaaaattcatgtttagaaccgccttgttgaagcagaaactgcatgctcgttgtgcttctgtaatatagttccagcaaatggcctctgatatagaaaatcttgctatgggcacacatttttgtgccagaaattgctggaaccggaacttgctgaaatgactattgtgaactactgtgatccatgaactagctaacccatctgctcaagatgtctatgaaaccttttttcctgacattcaaaatgtctttaatccactggactaaccttttatgactagcttgtttgcattcataggaacggagaatgaaattcacaacagttgttaaagtgaattaacgattgattagttcaaataatgggaaacagttattaaagtgaattaataacggatataattcaaatcagtacaaatgtacaataccaaacgatgagattaatattctgttctatcaggcttgtagtttcctcgttgtgattacctgagttttctcctctcccggcttaatttatgaaaatgaaaagcttataaaattcaacttagatacgggtaaaagatctatagcatatgggtgtctaaattttgcatatgaaaaaggggctctagcaaaacaaactgttgaaagaatgccatccgtcaaatgtatcccatggtcaaccatgcaggttgagcacggagagtacaaaactgagtgcaagagagcaaattagagcagtacagcagctaaacccaatatgaggcaattgtcttggctggaacagatattggtcacaattgcaacaacactactacttctaaccagtaacaggtcagtaaatcctacagcccattcacaactagcagcacagcaaatgactagctagctaaacctggtgtttgtaagaaatctttcagatgttggcaagttcagatcggctgccatttctcgcctaccggaattgaggatggcattggcccaattggacgaccggtgcacgatctttgacgggatgcgatcactttcctcgcctcccgaggcctcgtacccaccactcgtcgaccttgaaagtgcaatgctttttggagcagtggattctgatgctgcgagtgacatgaaactgcggagttcgtctgctcctgacattgaaacacggaatgggtgaagatcaggtgagtccaggctgctctgaggtgatgaggtgaggtttctgatcgacgatgcgatgcttggttggaaaacgctcctcgcttcatgttgcaatggggctaaactgccacatgtttccatgtccatgtcgctgcagttgctgtcggtgcagctatcagatgtcctcgtagtgtgatcgacggaaagttcaggtagaaactgccctctcttgtcgggtcgcctcttgtcatgtttaggatcttcatgtctcgcgattggctgaagaactttggacttctttttcgcctctgcagctgccttcgaaacttcctccgcgttaaggcgagctagtgtccagggactgattttcacaggtcctgatggttttcgtttggttacatcagcatgctttgccttcttgcttgaggagttctgtggcatttctgggggaatgacatgctgcagaaacagcataacaataagtgccaaaaataacccagaaaaaaaaatctatgaaacatggtcatcctgacacctgaattcagacttcagagcatgctagccactacaaatgagtacaatcaagtgtagaacagtagctacacaagaaaagttctaaaagataatacaaaccaaactctagaagtgagctatttctaactattctacaactaaatttcagacatccattttttttaagtagtagctgacaaatatctcaaacacaaactttcttctttttcccacaacaatcagaaaatgtgcatgatctgatattctgtatacctgatcttcaaggaataaacgtggcggagtacaccatgacccacgttgaagaggagcaaatgagctagttgtgctaaaccctgtcacagagctaataatagacatctgcgggctttgatgctcagtaacctcttgctgctcttcttgttctctcaaagctacaatataatcatacgtacttatgccctgcatacacgtggatagaaagtagaatacgtaaatcaactttaccataagagatagcttgaaaagctaagcatattatctcttccagaaaaagactataaacataattcggtaataacataagactaagcatgttcaacacgttatataatattatttccaagaattaacttcaagaaagagagagctattgtccttcctttccaacatataacttgttgtatcaaggtttagtataaatattatcttaatttcataagagttctattgacagtgaaggattgctttgctgtacaggccatattcctgcatttgtcatctacttagctctagaataagtaaacgactctttgcaaattccctgcactgtagttagcgatcatcaaaagttttgcgccagtgtttccttcttccagcaagggttttccacattaaattatgtgtttgtcgttcctaagaatctctgtacttgccttgatgtttttaacaattcacattttacaatttgatgtcagtctgtaggggccaatgtgtaactatgagtctgactgatatctgaacagacttgtcaaaatagtgaactgttattacttaacaggaggaagaaactcacttaagtttattaaaactattgcacactgcagagtagacagaaaaatgagtgtcactttaatttgttacagttatgatcttttcagataagagcgaaaagaggaaaattgagtgtcgttgcaaccaatatgaattagtatgttaagaaaacagggcaacaatcattaataacacttctatctatgctgtgttaaaactgatcttggtacatatcatctgcaggtaaagctattgcttactttcttaataagcagaacatggaagcagaaaagttgggcaaggggtattgttgcaagcattgctagtaaagtacatgtcatctgcaaaagtaatttgtgttagaaagaaataggatggattctcaatagtgctttataagcaacagtaattctacgctaaatatagcttcccattcacactttaatgttgtaaactagtaaagcaaaattcaaatttccaaaccagcaactatgccagactgtccattatatagcacacggttaatatgacattagacaacatcttttccatcatctcacataaccaattatccttttaattttttaccgagagtttaagttctagttcgaaacatccaatcaaaacagtgttgaccaaaatgtatccgttaggttctcacaccaaaataaaatgcacatttacagggttcatactgttcaagtcttaatacttatggtctttttcataaattctgagtattttgatactgcaactcaggaaacaaaagctatttaaaacattatatgagaatttttttttctcaaatagctgcaaattccagagaactaaccacaacaattacaaaagcagctgttgagaagctacttcctaactttgagatgatctgtccggagaactcccctcgcttcagtaaacagagtatcagcacaagaatgcccactaaccactgcattataagctgaatgtgcacaatcatggagagctgtcaatggtcaaccagaaaaagtggatatggaatagcagcactttctagatgtaaagcctacaggattgcagtttttatttattgattcttgagtgataaatttaaaggcacgaggaataatacaaaaataacagagtttctttttaggatactgtaaattgaataattcttaaattttagatgctcatcaaaggttgtagtggaggtttttacttaccaagagaacagctgaagccattagaatgaagaatcttttgtagtttctttttcctatgcaattattgagccactgtggacaaatcaaagcagaaggtatgctaagaataatatttcttaaagaaaaacataatttccaaaaaaaaacattaagagaaaaagagagaaaattaccctgcagtggtgatcaaaaccatcaacacacttgtcgcaaactctacaatgcttactatgctgcaacacctacacagtagtcatacatttttaaacagataaagtaaaactgtccagataagaacattttgatgcattagaaggtatcatccttttgttgaggcatgtgatttttgaacatattcacataattttttctgcagtattacagcacttttagattttattaagaagaaaatgtgttttccctgaatatatgtataataagccagattgcaagtgtttgtaaattatagctcctgtgtttctgatgttaacaacttaacatactagacaatggtctcatatctaaaattacatggcaggtcactgcataactgagtattttaagaggagaattttaatcctcatttttaactcaatgggttatagtttaaagagattctccagttttttcaaaaagtagatgtaaagttcagcataagcagacatcagcttgtaacatacctctacttcacataagctgcaaaagaacatgccttcttcgctcatgtgctgttccgaagattggtcatctgagtgaaagaatcttttccataagcagaagaatgggttgcatatcaagcaaagaactccatgtaacccaggccgagaagatgaatcattcccttcaaacatattgcttaatctctcactgttattaacaatgctacagccatcgctgaacgactttcctccctggcatgattcgtgctctgaaatttcttgtatttgctttccatccttgcctaattttggatgtttctttgctttaaaaatgcctggatcaccaggattagttgctgcacaccatatgtataatgtgacaacacaagtaatctgcaagaaaaacttatctgtcattcatcattttgttgacaatacaagagcacatcgatgtgctgttatatcaatgtgcagttactcttaagtatacagttacgaattgcaatgaaaatcatgttggttgaagatataaaatttatgttttgatgcatagtcatttgatcaaagtgaaagctacatcgttgatgatttcatggaatttttatatatcaagagcaaggcaaatggactgtatcgtaatttttaattaagctatttacccctgttacgattcagtggatttatccaatccttccagtgttgaatgtcttctctctattagttctacccatccgattacatcatataaaggattcgaatccttggtcctcatcacatcgtaaggattgaatgcttcagagaagaaaaaaaggtaattactctgtcttctaaaatagctttggcagaagcataggcatattagtggcatcaaagattttcaccatggcatgtcgtcagtcttgatttataaaaaactgacctatattagcctaaactactccgaagcacaaactactctgcagtttatccctgtctctatgtcatggaccttacataatgtagtatttctcctaaacattctccacatattataccgaccaaaacacagaagggagtagtgcaaaagaagtcaccccaaactgaaaggagatgcagatctatctgccatgaagaattaacacaacaggttagaaacacattaaagagggcaaagttgtttcagctactcaccagtggagtgtagagacccatgagcacatactggagctcactcctccccacaaatggcacaaagaacacatagaacgcaaaacccagtgccagaaaaaccgctatcgccaccacctgcatatgcacataccaatcagcaacaaaaacaagtatacaccagaaaaagataccaaacgaaaacaccaaaagaaataaacaagaactggacctgaagagggtggtaaggtagctgccacccatgcctcctcatcgccaagaacccctcccaaatcggggcccaagaaacggaaccaagaatcaatcaccaaagcagaaatgaatcaagaaaccataaggttttgttttgcccccttctccggctccgtggatcacaatgcgaacttggagcagccaagaactctggtgctcaggttgtttctttttttttctttttctattgaactgcctgcatttgatccctccctcccttgcagtaataactcaggtattaaatgcccataagaaaaggctgcatcagtgctcagcagcagcaagcacaccaaccatcgttcagagagagagagagagagagagagatgttgaatgaggcttgcgacttgcgagtagaatactagtatagccgtacagtctgtcgttggatttattattgggaggaatatataggggctaggtggagacgaggcaaaagtgaattgtgacaactttggctcgagggatttgtttttgttttttacacttcaatcttggaactttttacacttcaatcgatcgggtattttataatttgtgggttctgggtaaatgtcacccgaaataactaaaatggcattcataccacttcaagggtctgaaatgcagaaatttcgtgttaattgttgacaaaaacaattacatgtcagatacatcgagggtagaagcaatttcgttgttaaaaagaaaaaaaacacgctttaaaagaggcctaaaatatcccagtttattttttttttaagtttgtgagtattttttttcttttgaaactacacaggcacctaccgggtccttgtagaatcgtgacgtcaatggttagtaaggccatgtttagttcccacgtaaaacttgtacaccctattatatcgaacgtttaaagacttgcacgaagtattaaatataggctaaaaataactaattgcacatattgtgactaatttatgagacgaattttttaagcctaattgctgcatgatttgacaatgtggtattacagtaaacatttgctaatgacgaattaattaggcttaataaattcgtctcgcggtttactaacggattttgtaattagttgaacacccgatgtgacacgccaaaactttacacccctagatctaaacaccccctaacttttcattgataatttagtgaggctagagtagtgtattcaatgggtatacttgatatatgtatgtatgttcacctttcatataattcgaagttttaaacataccaaatatttctactattataaaaatttaaaatgttttcaccggaattttggtgcatcatgcgtgttttgagttgatttttagttggttatatatcgtttgtatccaatttgacgtgagtttaatataactattatacaacctatcccagcccaacccctctcccttctagcacaatccaaccgccccacgccatcctgcaaacttaccctgatcgatgtattttttttctctcttattttttttcctttttttatccaatatttatgataatctctctctccttccaatctcatatatttcctcctttttccctatttcctttttttatctttcaaatttctttcttgataaatatttttctcattgtttaagatgtttatgtgacaagtttattattttgcaaatgtttttcatataaaatatttttttactaattgaataattaaaatttcaatctttgatcgatgaggtataaccaaatgcgcatgcgccaacttatgaaatagtcacccgatcaatttgtgaggctatggaaaggtgtagataagagattcttcgtgtgatgagacatgaagcaagcacaaccgggatcaatgctatatatgatttctaacttttttttgctattattttgtttgtcttgttccggtttgtcatttaaattgatagagtttttatcgatcttgaaagttatcttcacctgttgtaaaacaccagtatttttttctagtataactaaaatatatttgaaagtcacttttcagtttattaggaataaggaaaaagatgtgctccttagccaaacataacattagtaaaagaaagtgtaattttcatattttccaaaaatattgaaagatacacactcgtttctttttttttagaactcacactcgtttcttcaaccgtgtaaccacgtcatatgggcacaaccacaagcagatacaacgattgatatgcacagccattacagatataaataatactaactggtccttttaagacatcactggtgatgacatgttagaagatgcgaggattttttaagtcgtcatctacgttacaaattaaatatcacaaaattacaaatttgtataaattgtagtactccctcctttccaaaatataataatttttggttggatacgacatttgttagtactgtctaaattcgtaatactaggatatatatgtcccatccaactaaaaattactatatattttaggacaaaggaagtagcagtcttactataaagacatttaagcactcctactaggacgttgccgcataaaccggtcgtgccacgaattacccacaaccatcgagccccacgaaaacgctatggccatcactgatcatcatccggagactgccacaagcccacaacaccgccagccgggagactcgaacgcctcgtgtaaactaatttggcgcacaaacataattcttttagcatttatagttacaaccaatcaaacctaaaacttgatatataaacatacaacatcattatccacaagtaacattatttatcaaaactcatacaaatatttgtaacatcatctacattttattaaaccctacaaatctatatattataagcatatccaatcatcatctctcataccattttcacaatatttgaacatatgtatctattactcttataatacataacattttattcacatattctacaacaaagcatgaggtgaggttcatttagtttgtctccgaattagtacaaacaaaaacctgatttgtcatcaattcttttccacttttcactttttgcgatacaaatcttcaccaacaatctaatatttcatctataatatcctatacggtctactaaatttatctctagttttatttgatgttaataactaatatatacatttcttactactatctagattgttataaaataaattaaaattactaatttcatatttaaaatgcgcgtagtatttatatttactcgtacatacgacgactgtaccggcgaccggattttgtaacgcagggatgtaaaaaaatatataaaagtactctctctctctctctcattgccatttgccactatgcctgccatagttgattcttttctgcccaccggcctcaaaagatgcaaggctctctccctgatctcttctctctctctggtgcatgatcgatcacatgagcggtcaaagaatgtgacattgactctccctcccccactttcctctctctctatataatctatctatcattcactgcaactacgtgttgtacgtagttagtttaataatcaaggttttgtcccctgttaaaattaatagatgagagagagggggatggatgaagagaggtttcctgtctaggtatcacgtcacatgctaccaatgctgcctttgacaattatctttagagaaccaaagcatttggtttctgcaccaaaaacagacactcacggggctagccggccgataagttacttgacttaaaacaagttaattggtagaaaatccaggataaattaataggtatcaaacaatgctagaaaaatgattttagtagacgatatgccctctactttgtaggtgagtcactttttcttttgcacca

SEQ ID NO: 28322 - DNA, 12350 bp, Oryza sativa
caaatattgtattatcctaggcggatgtcttaaagctacacctgtgaagttatattttcgtagacggcaccttatgctgtctgctctatataattcacacaaagttggtctctccaataacaagcaaaatatagggggaggttttgaactcaaaattttcggtggatttttcttcagtggttagatccatacatttcctctcttatgattttcttttatttttgtaggtattaattgtgatggatctatgcatgaaaaatagtgaaagcaccatgtgcaattttttttcttttatgcttttctatgctatgattgtgatggatctatgtatacaccttgatgccatgttgttctatcattcccttgtggttaaatgtgatgctttcattattaaaattatatgtataatattgcccacttcccaatcacctagatctagataggagagagagagagaatatgtattttccccactcaccacatagtagaaaaactatatctatgttatatttatagatcaccatcccctaattatttatatttttcattcccatagtaagcaaagttaagtttgtttataaatatgtaattttttcagaaaatttagtttttttaatataattgtaaacacaatatttttagagatatggacagaaaatggccatgaaatataattgatacatggatttttgaagggctacatgaaatggatccatcatggcgagcgacaagtggatcctgatgacaaagaagatcggctggatgtcaatcacacatggaggatgctgatggtgatagttgtggtgataatatcattgagttagaggaaatgctacattgtgtagaacctgaggtgctaatggggtcagctaggggtttagacaattttgaagctttacagaaggcaacgaaggatcttgtgtacgatgagccaaagagttgtgacagggagttctcaacattatgatcagtgcttgaacttataaggttgaaggccatatatggttggtctgatagtagtttcaataacttactacattgaaaatgatgctaccaaagcctaactcattaccttccaacacatgtcaagcgaaaaaattcatctatcccttttctcttggtctagaaaagattcatgcgtgtgtgaatcactacatcctatacatgaaagagtacacttcgttggataaatgcccattatgcagtgctagccggtagaaatcaactaacaacactaccctagatgttgattttttttaataaaagaagaggctgactcattcgaggaaaacaaggaaaaaccccctagctggtgatgtggtacctttctatgaaagatcacattaagcgtttgtactcaaacacccgagatgcagaactaatgagttggtattaagaagggcacaagaaagataggatgctccgacacccaatggatgctcgtcattggaaaaacataggtgcactgaacctataatttgctaaaaacccacgaaatattagatttgcactgagtattgatggagtgaacccttaaagagacatgagcagctcacatagcactttgccagttcttctgaccatatacatcttcatacctgctttgttataagtgaaagtacgttctactatgtgtcctaatacaaggcccccggtagcctggtattgatattgatgtattttttgaaccattgatggaagatatagaacatcaggtgatttgtctccatgaaagtttatttgatatccggttataattcacacgaatggcatgtcatgctcatcgtgtttctcgctattcctataacactactacaaaatatcaaataggtgtcaccactataggtgccagaagtgctaaaaccggcacctataagccttttcccacctccacgggttgaaattgcaaaaaaccggcacctttaagcagttataggtgtcggttctaaataaaaaccggcacctattctatatgtgtcggtttttaataaaaaccagcacctacgaattgagccgagccagtgggagccaaggcggtgggccccaccacgacgcggggaggagataagtccgctgctgagtcgcgcgaggagataaggctcgctcggctctcgttctgtctgctctctcttgttctttctcgtctcctctcgatctttctcgttctctcgccagtcgccactctatctctttcgccggcccggcggagcaacggaggcaacggccctgtggcgcgccctcccctccgccagatctggccggaggggaggcagtggcgagtgggggcggcgtcagcgggcggtggcggggagcggggccatggggaggcggaggttgcgtcggaggcggaggcggaggcggccgcgccctcccctctgccagatccggccggaggggaactctggtgtgggggaaaagagagcaagactgagtactacccactgtattcagcaaatcatgccagaagaggaggtatgatgcaggatatatccaagggaggctaaaggttcttttgcataaagctagcatttaaaagcaatagttgaaagcagtaaaacagcggtagtaattaatccatattaaccaatcactgctcaacgcttcaccacgttgagacaggcccaaaccaccacctgaactaaccagttccattagctaactaggggtgagactaatcacggtgaatctggtcgaccgcccataaccgcgggtacggctattcgaatagttttactctgatcagaggtgtacaactgtacccacaagacacagccccacaacacatttccgtgcgccgacatgccaccacgacataccggaaagaggccgtgacaggacccttcgcataaccccctctaaccgatcgcaccacacctcagggttcacccccgtccccagcaggcaacgggcagcccccctctcgtgccgcagtgaatccggaagccgatcaaccgaacaccccggccgacccaactccatcacgcctaccctcacctgggtacgtcggctagaggaaagctacactacaagcccagccgttgcccacactggcttgtggtaagcacgataaattcttccagggtttcccgcgaatcggtccttaatcgccatgggcacaactagcaaaactatgcacccacagcccaccatgtagtgtattttaattaactaacaccattacggtggctctattccaaagctatgccagtaatcaaagtctatgccttaaggtaattccccctctgtgtactagctgaactaagcatggctaagcattccctaaaccaacatctaatcattttaatacccaagttatcaatggcataaggtaaacaagatatggctgagtagtaggacccatcccacatgatattgtaaaacaatgcaacatttaatagaaatgtgggacatttgtaaattgggtacaatatgatcaatcgtaatgcatgacttgccttgctctcgcactaatgagaccacagcaacgtcttcgagaaaccgcggatcgacgaaacggccaaaatctacgcgacaaacaaagcacacaagcaaaacatgctgtaagtctactgaaacagagaacaaaactatttttaatggattctatgcatttttatgaatttactgagacttgaatggacttaaacagagctcggatgaattagatatgaattttagaagattaaatgtgtttttactataaaagaaaatgccttaatggattttattgcgcaataaaggtccctgctgacatcatcaaggggggttggcgccgacagatgggccccacttgtcatagactcaagggcgccggtctactgtggaccgagtccacgggaccgcggagaggagcaccacgtggcgcacacgtggtgccgacgtggcggccacgtggacggccacgcgggcggcagccgaacggccccgatctaccgagcggtagatcagacggctgtagcggctcgcggctgggcagtgcacgggtggctcaagccggcccgggcatggcgtgcggcggcacggcacggacaccggcggctcgcggcggcgcaagacggtgagcggcgaggagtggcggtatgcggcgacgcggcggcgcgacaaagagagagagagggagaggaagggagggagaccgatcctcaccgaggggctcggccggcgcgggggaggagcgacggtgaacggcgacgacgagcgacgggagaacgatggcgacgggcggacgagctccgggaccacctagggaacaaaatgggagggattagagggagaagggtggtccacggcgagcggatttgccagccgaagatggcggcaatggtggtgctcaccggagcgcgaggagaacggagctacggcgacgatttgtgtcaaccgagtgttggacggggtagccctcgcaacggcgaagctagtggcggtggttgcgcggcgtggcgacgacactagcagtggcggcaggcggccggagagtggcggcgacggcggcgctaggggagagcggcgcggcggtgatagagggctcaagagagtgcggcgacgaaaggaaaaagagagagggaggtgcggcggtgcttaaataggagtgagggaggcgagtcgtggccgggagggggccctattgcgccggcgaaatggggaaggtggaggagaagagagagtggggttggggatttcaaatcccccgccatttgcgggcgtgcgggcttgcggaaggcgtgggaaaggtgggcggcgctgtgggtgcggagcacgggcggagtggggcacggaaaggcgggaaggccacggcgtggtcggcggttgcctgcttggcccggccgcgtgggcggctgggggtggaagaaggggctgacaggtgggccccacctgtcggtgaccttgagaggggaggaaggcggctcggactgggccatggccacgggccggcccaagaagaaggggggggggggcgcgcgcgcgggaggagagttgggccgacggcccaacaaaggaaaaaggaagaaaaagagagaaaaggaaaaggggaattttccagggatccaaatatttggttaaaattatttctaaggctctgaaaattccactaaaaaatcctgttagcatattttgacatgtagaatctaagaaaaattccacatgtcgattccgattattatttgcatttattaattaaggaattagctctaggttaaattaaactaatttcttcggacgatttatttaacaaattttaaagcaaggaggggaacttcagagcgtgacatgctgtatctttttattgttaaccaaatacttgttgacacattgttcccatattttttttaaagtttaaaatgtcacgtagatgtcatgtcagttgaaactaccgttcaaaccattttaaaatcttatcttcattgatttttaggagttgagggcggttcaggatgaatttcaacgataaattgagggaagcgagtacgcagcaacggcctcgcccaaggcctctgagcggcttggactgggctgtgtctaggccggcccggcacgaacagcccaaatgtgccattccgccgtgctcggcccgcacccctcactccgagtctctgacaagatagctcgatgggccttgggacagcccgttttgtcaagatgcacgatgggccttggtacggcacgaagtacagatcaatgcaaaggggaaaaagtacaccgaaggtccctcaacttgtcatcgagttacaaaatcgtcccctaaccgcaaaaccacatgccggacgtccctcaactaacaaaaccgttcactttaatcctccagtggttttggccctagttttatcttacgtgacggctgagtcagcgtgggacccacgtgggctccacatgtcagcattgccacatcagtcttctctctcttttcctctcttctctcccatcctcatctctctccgttctctccgattgcgacaggcgacacggcgcgtcggtgaccggctgccggcgaccagccacgcggcgaaacggcggcgggggaaggggcggtgcgcgaccggccggtgaaggcgcggcgcgcgggcggtcgggggcggagcggcgacgcggcggcggggaaaggggcggtcggtgtactttttccatgcaaaggaatcgccatttcatttgcttcacgttgcatacgcatcagaaatttcttctaacttcaaagtaagaaatagcgtgacattcttcatctagctaatgacgatttcgcgagattgtactgaactactgatcgcctgatctggaggctggagcttaacttccaatactaaaaggctatgttcagaacaattatctactcctacagtcctacgtgacagcttgctaacggtatgtgacaccggcaaaaatgctcatgtacttctggttggatgagatattgtaagaaattcttatatttgaatgagaaaggtaatcgatctataatctcttctacaccccatggaaacctttgctgttggatgcatgcatgctcaatgcgtctttcctttcttgctgccatgtaatgtacagtgatgccgtgttaatcataccacacatttctgactttaaacattaaatagttaatgttcaaacatttcatacgattgatttaaaatatcgtctaccattcacttatacaaataacgtaccaagtcttgtattaccgccacttacactgaacaaagataaaattcctcgaatttagattcgcatacctcctttatgccactcaattctttcactacctcattcattctcattctctgacttgcagagtccctgcaacacgctaaaccaattcttgaaataggagcaataaaccaatctacaatatcttgagaatttccgtcctgtggtattgcgttgtccataatttccaacaaattatcaggataggccatctcaacatactttggaagactcatatcatcatgaaacattgtgtcagttggtcttctaccagtaagcatttccagcagtagaacaccgtagctgtatatgtcaccttctctagaaatttctgtccccatgccatattcttcagaccaaaaaaaaaaaaaagggagaggattaaatcagttttgtaatggaccgaatgctacaaatcaattattggtgcactttcagactaaacgaaagataactatctatgaactgagtttaccagttcagaactgtagaggtaaaaatacctaaaataactggtgcaaacaaaacggagcaggaacagaaattaagacagtagaattcgaattacatcctgtagttacatacctggtgctaagtacccaatagtgcctttaattccaactgagctactctcacccaagcattggccttctgcttctgcactcattattcttgctaaactgaagtcaccaatatgtgcagtcatatccttatcaagaagaacattacttggtttaatatcgcagtgagcaatggaaggactaatgtgatggtgaagatactccagtgcctctgcaacatcaagagcaatgtttaatctttgcatcaagcttagcttcccaggtatgtaggaagtattttctgtgcttggatgtagccatgtgtcaaggtttccattggagataaactctaatacaagtgccttaaattcatcaccattgttgtccaagctatcacaaacagtgataatcctgactaggttccgatgtcgaatccgttttagggcattgcactcggacatgaagctcctggctgctctggtctgatggagatcaagaaccttcactgctacagtgattacatttgaaccacaagttaagtttcctctatatacactaccaaagcttccacggccgatcaaattttccgcagagaatgaacccgttgcgacatttaactcattatacgatatcctctgatacatctcatcgataaatttgctaccttgatcttgattaactttggatgacttttcccttagcctcttgatgcagtagcatgtagcaatgcaaacaataacaaagacgaatgctcccacaatcagaaagatcaagatatgcaccaccgaacgatgcgcaggcttatcggaagattgaaatgggcatggcgggaaatgaaagaacatagggcctccacatagcatatcattacttacaagtgatacagcacttgcattagagaatatccccttatctggcaccataccagataggttattgaatgaaaggttcagattcttcagaagctggaagctctcaaggaattcagggatgggtcctgaaaatttgttgttagagagatccaacacttctaagcccctaagtttattgagctcttttgggattagtccgtggaggagatttgcttgcaagtataaaaattgcaatgcaaggcaattaccaagggtgcttgggatctgaccagacaatttatttgatgagagatcaattatgccaacattgaccaagttcccaatatacggagaaatggggccacttaatgcattgttcgagagattaagtgcttcagtcagggaagaaattctgataatctcttctgggatttgcccactcaaaagattacttgaaaggtccatagaagttaacttgcttaggttgccaatagttgctggaattctaccctcaagatagttaccagacagaagaagctgatttagttgtgtcatgttgcctatggatgatggaatctctccctggaatccatttgaaaacagaagcaactcatggagattagtgagctttccaatatctgaaggtatagtgccattgaaaaggttatctgcaaactcaaggcttgtgagtttggcatacctccctattcctttaggtaaaatcccagaaatttgatttcctcccaatctaatgctctggagctctagtgagagattagcaattgtatttggcaaaatgcctgacaggttattcagttgaagattgatgtagattagattgctgcagttagccaaggatgttaaaaattcccaatccctcggctctgtagcttgaagctcattgttacccacttcaaatactgttaattggccattgataccactatttggtggaattcggcctcggaatctatttctgtggaggatgaatttttcaaggacagagatgtttgaaaaggaggctggaatttgtccttcaagtctattgtagaaggcaataaaataccttagattgggaagtgtaaggccaatatctgtaggcagagaacctgatatgatgttggacccaagattaaacaccttaagggaggacaaattaaacaatgatgcaggaatctcaccttctaatccgtttccagatatagtcaaagcttcaaggtttgtaagctgagatatagcctcaggaacactgcccctcatcatattacccgcaatgttaaaactttctagcgcggtcaaattgcccagccatgatgggatttgtccatgaacatagttatcagcaatactgaacatggtgagggcagtaagatttgcaaatgtagatggtacataacccgagatattgttatggcgaatattcagaacctcaagctttgacagctgaccaatggatggagggatcacaccagacaagaaattgacactcaagttgagcctctgcagtgccaagcatcttgcaaggctaggagggatctcaccttcaagcttgttgtctgacagatcgagctctcggagtccggtgaggttgccaacaagaggtgagatggtgccaacgaggccaagaccctgcacgcgcaaagagacgacacgacgatggcgcgcaccactggagcacgtcacgcctctccatgagcagaagccattggtgccatcagaggtgccattgctgacaacactccaggaagacagtgcatccgaatgatcctttgctatgtgggatctgaatgataggagagcgtggaggtcatcaccggcgtcgatggagcgggaagccggggcgagaaagaggaagatgacagtggagggaagagcaagcagctggaggagcaaacgtgtgatcgccatggatgtgatgggcaaagagaactaaaaaaggacgtggagattttgttgtggtggaggccatgcagtcttgaacgatcagttacttctagtttaacttttgcaatggaattttcatctcatcgatgactagtcagtggtcagcaattgctgctagtaccctctatatgcaacgccacgttgcaaactacttcctataatatactgatagcatagaaagatcgttgctgtgcatccatttttctttgacatctctgcaatgcaaccaacacatggatacctggtagcgtaaagaagtcgctgctgtgctgacaacctcgagaaacatctgagaataaaaaatattatcccaatctgatgcccatgctgaccaaatgtcacaaatttcttcccctgtttataccgggttgactctgcatctgagaagccttcctccatattcccattatcccaccaagaagcaaattagtatcagtaagtaggtgggtaaaaggcattgatgaaataaatttttttatttgcgaaccaagagcagataagaaagtagaagataatttatttttgggacaaagtttgaatttcagaaaatgatttattttgggatagagggagtacgcatcaaggacccaatagcatctctagccgatgctccatctgatcctccatctaagaaatagcggacggaagtaaaaaaataacctcgggtggatacgccatcggctacgcaaaaaatagcgcattcactaaataggtgaaaggaatgccaaatgacaagcaccttccagcaaaaatataataaaatataggatgatataatatggacgatataaaatagatgatttattggagtgaaaagaagtacagaagagaatattttttagacgaccatccaaatgggaatatggaggatgaaatttggatgagctcatgggatgctctaaggtcccagatatttgtactgagaaagtgaggattaaggccaagtttggatagtttatcataaattactaaaacccttctactctgaatcgattccgtgtgggaagagataagtagtagttttccattttacaagattgcatttcaaaattcaaaatattttgctcccagaaatttaagggaaagagctcaggctgaaatttgtttgaattttaaagggttcaaacctaattgtataaattcaggaaaaaactatattaattcaagataaacaatctagtttttgaataaattaaaacatctctaaactttatttttgtgcacatttaacacttttcgcaacaaaccgattaaagtgtggttttggttcgatttgatgcagcatgtatactcgaagtatagaaaaaaaatcatacactctaccttgagaaaaaaaacacactagggcggacagcttctccgcttctatgtcgtcgtccggcaatttatcggtgctgagaaaatctgtaagtggtgaacaccaatcttgcgcaatttcaatgtccgccacgatactgtttgacttgcactgtagcccccgaggcccgagcctacatcggtgatgttgtcagtgttgtgttttggagtacccttgacggaaggtttgattaatccttcaaagaacgtgaccagttccaccggttcttgtctggaagtgcgtcgggcaaggttgttggcatcaacattgtgcttgcgatggacatggcgcacttcgaaaccgtcaaacctttgctccaactttctgacttctacaaggtatttggatgactcggggttgaaacatatgtagtccttatgcacatggttgccaactaattctgaatcccctttcagaatgagtcgtttgctgccaagtgatacgactactcttaacccgacaagtagtccttcgtactcggtagtgttgtttgtggcccgaaaatcaagttatattgcatgtcaaaactgatctccttttagagatgtaaggataaatccaacgcctgctccttggatgctgaatgctccattgaaggccattgttgatcgctcgttgttcgtatgcccaactttgccgtcctcggcaacagtccagttggcaacgaaatcggagagtacttgagacttgatggttgttcgtggtatgaagtggacatcaaattgcccaagcttggtgacccatttaggatgtgtcctgcgacctgaaagaaatggcacacctttcgggatgtcatgaccatggcatagagcagcttatgatcgtagataatccgtaaacatatggaataccgttgtaggacgacggcgcgacgacgacggacgagctcgaaggtgaccccgacaggtggggtccacctgtcggtggctggggaggggaggg

SEQ ID NO: 28323 - DNA, 25469 bp, Oryza sativa
ccctcaagaatcggagcaaatggttgagtatcttgcccgaatcgaactcgttttcgagtttatctctaaaaccgagtttttgattttccgagtcgatttcttgcgggaggagtccgatctcttcaatccaaggctttaaataggaccccctagtcctcccctttcgtttgccccctctcccgtcctctcccgtgacccgtagagccgtcgccgcgtgaaaccatccgccgccgccgccggccgaactccggttgcgccgccacgccgcctccgccgtcgccgtcgcttgccgtcgccgccattggttttgccaagaggtggagaagctcggccgccacctctccttcgccgccggccgccgtagcccgtccccaccggccaacccgagccgccgccgtcgtctcctcgtcgccggccgtcgtcggtcgtcgtttggcacgagggtgagtatcgttgggttcgtctcgtcgtcctctacgtgtagatgtcctccaaaatcccggccgaccaccctagctccggcgaggtcgccatccgagccggccgcctttgatgacgtcatcatgacatcatcggtttttctttttcccgtttttctaatagattaaatcttctgaaaatcataactaaataaccgtagatccgtttcaggtggttcaagttgctaaatttttctaaaatcaagatctacatgttaaaaatatccacatgtactgtttatgcttgtttttgtactgttttgttaatttttgtttaattgctttagtttccgacgttccggaggagagcgtttccgttgaggaaggttctgaagcgtttgcggaagcccaaggcaagtcacacagatcccaaacaaccctttgagcatgttgaacccgtttaaagctattattttatttcaactatgcattatttttgaatgtcatcgggtggtgaacctttccccgttaattaatggccgaagatgatcttattttcctatgggttataatttgattagcatgaaccttatatattggattggttcagctaaatgctatatgtaagtttgcttagctatgcttagaaacattagctaactaaaggggttaattataaactatattatattatattattattatggttatatttaatggtcgctcacgatggttaatcgtgtgatgttaattaattgataattaaaatctagttaaggtgggttgtgagcatatggttttgatggttgtgctcatgacaattaaggaccggttcgcgagctactgttgtgaaacatttaccgtgccaaccacaagccagcatgggcaacggctttaccttttgtatagcagggttcattatagtgtgccagactgtgaagcggcgagaagtccgtgggggtcgctggggagtccatgccttgtttataagggggtgactatgatccgggaacggtgcactgttttgagttgtgttgtgcaaagagtattgtcacgatttccccctttgcaatgccgtggtggtatttcggggcatggcaacatgtgtggaatcgtgtcttgtgggtacagtggtacacctctggccagagtaaaactattcgaatagccgtgcccgcggttatgggcgggttgagcaatgtttttcgtgattagtctcacacctctcacaataattatggatgttatacctggtaataatttgcttaattcctggtttggaggtttgatctgtacgaccggggttggttgttcaggtttggttgggcctgagcagcatgggtgtgctgttcagtgttgattaaaattgatgattaattactctactgttttacttatcttaaatctttgctaaatgctgcttttgcaaatgagcctatattatgccatcctttggaatccttgtgcacttgcatatttgctgtgtggcttgttgagtatgtcatatgctcattcttgcaataatcatcacacctcagttgaagataaaggatccagaaggagaagacgtttggcttataccccagttgagctgcctgtgggagtggagctgaagccatcgctagaccgttaattccgctgctgtttttcttttcttttgtaagtatgtaacgttattattatgatggatttgtatattaaattgtcagtttgtgtacctcggctgattcctggacgaggattttatgcacaaataagttcggaaattactagtgaatttccgggcgtgacaactaaggacttgtgtttcctggctctaggctggggattaggaatgtccacccgagaattaacagaagctgaaaaggggagagccctagccactgtctaaccatacctggtgactttctgagcaaaagattatctaacctacactctctgctttctaactgcaatgagatcctgttgctactcgacaaattggtagagcaaagacctcttgccttgtaggaatggaacttcagactgattttaaaggagcacattctaagcctgttcaaatacaaaaatgaattctggaaaaaagtttgtacgattagatgggcaaatttggagatgagaacaccaaattttttcaggcctctactccagacagtcacagaaggaataaaatctcacatttaaaacttgaggataaaagacagaaagaggggtgtcctcccatgaggaaaaggctcatgctttatacacaacttataaaaatagaatggggattgatggtcactcagacatggttctcactctagcaaacctatttcaaccagtagatatcttacattttcaaagttcaatgccatcaaaagaggaaatggacaatatcataaaaaatatgcccacagatagaggccctgggccgcatggttttaatgggatgtttcttactaaatgttggcccatcatctgtaatgacttctatgagattgcttctcaattcttcaccaagatcatggccaatagaattcaatcaattatacatgagctcatccatgaaaatcgcttcatcagaaacagaactatacaagactgtcttgtttggagctttgaatatgttcatcagtgccacctaagcaaaaatgaattagccattctaaaagttgacttttaaaaagcttttgatctagtagaacatgaggcaatccttcagattcttcaggccaatggttttgatcaagcttggatcgcctagactaaaaatgtcctgtcatctgcaaccacttttgtgttgttaaatggagttctaggtaaagatttcaaatgcaagagaggcgttcggcaaggtgatcctttatcaccacttcttttgttctagcagcggatcttctccaatctattatcaacaggccttatgagatggggctattatcatttccaatccctcaagacagagggaagtttccaattattcaatatgtagatgacacccttcttatcatgaaggctgattagagagagttattttgccacagaactctgatgaacacctataccctgtgcactgggttgaaaattaattatcacaaatcttgcatgattcccattagtactaatgtagaaaatgatacaagttctggttggtacatttggttgcatggtgggaactatgccttttacctacttaggtttgccaatgggaaccactgaacctaaaatcattaatttttgcccctttgattgaatgagttgaaagaagattgctctccatcacaactttcctaaatcatggacaaaggttaacaatggtcaactttgtgttatcttctctacccacatattacatgtctgctcttaaactaccgaaaaaggtcacacaacacattaattgtgcaagaggggggggggggggggcttggagtcatcaatctgtaattgcctgggacctagtttgtaaaccaaacaaagggtggggggcttggagttatcaatttgtaattccaaaacattccttgcttctcaaacacttaagttttttttaacaagaaggaccttcctttggtacatttaatttggaacaaatattattagcactctgatctccctccacatgcacacagagaaaaaaaggttcattccggtggagagatattttcaagctaattcccttgttcagagcattcactaaagtgacaattggcataggggactctactatgttgtggaaagataattggaatgacaatctcttggaattagaatatccaatagttttctccaatacaaggttagaagatatttctgtccaagcctttttgtcccttactgaatttgaatagtacttccacacacccttatctgttcaagctatgcaacaattgaaagcccttcagaatgtgttactcaccataggtacaaccagtgaacatgacaaatggatatatcactggaattcagaacaataccagtcaaataggttatatgaaatgttttttgagcactttcaagtggatatcccaatctccatgatatggaaaagcaaatgcacaatgaagttaaaagtatttctctagctactgccgatggatagactcaatacaaaagatacgcttcaaagaaaaaatttcaacacataaggaggaaccagatgtgttatgtgtaattaagtagtatctgaagacatgcttcatctcttctaagacatgcttcatctcttctattcgtgcacttttgcacaacaatactggcagtacattggaatacagtggaatgtgagaatggtgttcataaatatgataaccacagccaacaacctttttggacaaccttttttcattgaagttctagcgttgggatgttggaccatttggagtagaagaaacaatctcatcttgaagagggattttggaaagtggaaggatgatttcaagagggattttgttctgtatatgcacagggcgaaagaaattgacaaacccaagtggtaatcatggattaacaactttgtatagccttttctttgtatttttcctctgctttgtaattatctgtaaatattctctatttatatgaatatgatttaatatagatatagtgcagttggagcctctccttctgtttcttattaaaaaaaggtgactttgctagatcttgaagttatgcgatataaaggtgtctgtatataactctctctgcaaacatagaggataattttcatttacccctttctcattaagcttttcaagagctgaactctttgtcaactttgaatgatgtgaccctgtctcaagagaatgatatctgggctatttggggaattctgaagtattcctcttagaaattttatgctctcaattttagagctttacagccaccatcacattttctttggttatggaagagtaaagcaacttcaaaagttaaagtcttggggtggttgttactgatgaacagattgaatacaaagtaaatgttggaccatagatattgtgctccacctgattgtgacttaagttgtgtgctttgttcagttaactctatggaggatctgtttcatctcttctttcaatgctcttttgcacagagttgttggaatgctcttggtttttcttgggatacttcactgagcatggatagtatgatgattcaggcaaaatctctctatcagggacaatgctttatggaaaattttttgtatggtgcatggaatatctagaagcagaggaaaggcttcatttttgaaaaaaaaaactccttcctgtctttctggagacaactcttaaagggtgacctcctccttttgttgtttagaataagtgatagagataaggatgtaatcttaaattggattagtttgttgtaatttttctctttcttcctttcattaataaagttctttaacagcgggggcctcccctgatgtgtttcttttaaaaaaatgctagtagttaaattgtgtacgtatatatactaacttggcgcctcacttgcagtaaaaaaaattaccaacattccgccacataacttcgaagaaattagagaggaactagctgccttcatacttgtggaaatcgtatctccaaaaggaagctttagattaaagtagctcgtccaaaattcgttgaacatttttcagtgcttgcaaaaaaaatgtgactatgcaatatttatgtatatattatatgcaataaaatctctgatgtaaatgtatacatttgcaatatgctaattacacactttgtttccaaatataactcggttttgcaggttttattgcttaactcttgaagatgcatatcggtgatttggtgattgtgaatatggatggatgtgtgaatggggtctctaggaatgagaacgtatgtgtgtgtgtgtgtgtatatatatatatatatatatatatatatatatatatatatatatatatatgtatgtatatatatatatatgtatgtatgtatgtatgtatgtatgtatgtatgtatgtatgtatgtatgtatgtttctgttattttgcagcgggcatggctagcaaaggcctgaggctgtaaataatatttttttttgtgtaaattactcatcggtgatgggtaagaaaaaatcaccgatgccgatgcgtatcaaagacgtcgggtctaacatagaggctgccactgataagtcatttgtgacggtctccaaaacataccgacaaaggtgagctagtcatctttgttggtttatattaggggccggtcacggatgattcatcggtgatagggtctagtttgactcctctgttggatcaaacctattggtgacggggtttaatattttcctgacaaagataaaagtcatcggtgatggcaaccggcccaacaaagatgacttttcacatcactaaccattagttcatgacggagcatctcgccaacacagatgacggtttctgtctgacatggatgacctgctccaattgtattttcttcaaaaacttaatatatgtgaaacaaactataataactttctttgtggatggagggagtatacgcttctgatgaatcaaactcattttacatatattatgcatttgcaccgtactttaatatacgaggactaaaattgtctttagtttcgagcactaaaacatatacaaattatacatttgtttatattatttgggcggcacacacaacatatatagcaaagtgaagaaattacatcaaagcatcgagcattcactttatgcatctgaaacatatatgctcatgaacattatttattttgtaggggctaaaagtaactgaaccaagtacatcagtcctttgggaaaagttggatatgaaaaccttcgagaaatcgtaggccgggagaaagcaccattcttcctcctttgatcgctttccaactgacaagtgtagacagaaggtcatttttttttttgcagggtacttcagcatccatgtatatatagagaataacttatcttcttaagtatactcattacatgcagaacaaaatgtgtgagaaatcagtgtatacatgttttaatacagatgaaaataatctcgaagctcctagatggattctgaactaggtatacctttgcaacagtaggcttcaatacacttaagtagggtgtgtttagttcacaccaaaattagaaatttggttgaaattggaatgatgtgacggaaaagttggaagtttatgtgtagaaaagttttgatgtgatagaaaagttagaagtttaaagaaaaagttgggaactaaaccaggcctagatagaaacaaatgggagtgcagatttaagcagtggacgaagactgccatctgcagcttggcaaaatgtgcaccaacacacaaacgcagtccccctccaaagggcatgaaatccttggaggcaccaccagcaggttcagcaatatcctgtacagagcaacatggatgcaacaaatcagaactttggagacacaattctacatagctctcgcacttcagaattgctcaatagtggcttttagtaggacctagaagaaacgtaccctatacacaaggctaggtgtgcacacaccttacaccactaacatattttataaaaaaatgaaaaaattgtacatgttatttttagtagtattaaattaataatgtgtcccatctttgaaatttatcatacacagggggcaataaataaaaagacaaaattctaacagatatatacccttaaaactgttatagcttttaactttttgttagggctaaaatacaacgaatttaagattatgactttacacataggtgtaatacaactgaaagtatatgtacatattttctatatttttttggtaatatttattagtcatatgtatggtatgtgcacgtgaagcttatgtgcaaaatatgttcacaaaccttccatctcaagggattgaatgtattgggtcctcatagaccacggggtttaggtgaacagtagaaggacaaatcataatttttgattcttttggaatagcaaaacctgcacaaattatacaaatatatttaagaagaaacattgtaaaatattcttttacaaattttctactattccctatatgtccatattataatatgatattcggattttttcctagctaagtcaaatttcttcaagttaaccaacttcataaaaaaatgtggcagcatttccaagacaaaacaaatatattataaatatattttcagtgctttatttaataaataaatccaatgtgttatgtttttcaataaacctgtcaaacttcttataatataatgtggaacagacaggatatatacatcttttacatcgcgttgtactacatgtgaaaagcaacggctacaacaaaaataccttgtagagacatttctctaatactataaagatgttctagtgaattatctctatataaatgaagaggcactttacaaaatgtttgtatgctcttggacacttttacagaggcattttttttttgtctataagagagtataggcattttcggaaggcattaactctgccacaaccatagtaaaccaatgtaaaaatttaaaaaaaaatataacttcccttgcaattgtccatccttgaactctagacctcttgaatatttcattttctacttgaatgttttaaccatatcaacctcatgttattacttgtacatatgtgcttcgtgtttcttttattgagttaattagctgagattaaaattccagtaagtgccccaatggagattgaaatgtcttaaaaaaatgcctttatatatcaagcaaattttaaagtgcggtaaaagtgcctctacaaggtaaatttaacaaattgtgctaaaagtgtctctagattaaaagtttttaggcaatatttaacgtgcctctaacactgtctctacactttataactcttgattttaaagccattttaaaaattacctctacaagaatgcaactacatgagatttttgttgtagcgtgtttttaccttttatatgaacatcctctatggcttctctaaacatcatcggagtaatgctagcaagcctcaaagcttcgtgtataacctacaaataattaagtagatgagtgagcgtatatattgtgagaggatttgacattaaccatatacatatacatgtgtaaattgttaattttttatatgtagaaagttaaagaaattgaaggaatatacgtgagatgtaaatttcatagacttgtattcctcccatgtgatttcggagttcagatcggcccttcttctccgtatgttattgtgctcctcctaaaaagaccagatatcatttacagcaaaatgtatcctggattatttggaaatatatagcatttccacagtaacttttacggggaagtatgcattcatataaaaaaaaaatcaaactttacattgctagtatagttcttatgtacgttgctgttctaattaaataggttttatgtattagttgtcacatatatgagggcgcaatcctaagcatgtagtagtgaagaaatttaaacattcctattattgtattacttgtatgaatttgtgaaaggaattcatatgacttgtactagcacttactgtcagttctcgcaaggcctcaggattatctgtcaaaaatttgagcatcccagttattccggatgatgtggtgtcgaagctgccaaacagaagcgaaaagagcaagttcaatgctgtattctcggtcattgaaggattatcctccttaacttcctctatcaggacatcaaggaagtcaatgctttcatggcgtccttctatcttcttcctctcattgagtatttctttcaacatcttcatgacattctttcgcccctgcatgataaatccagtccatgatgaacggggccatttttatttattttaatttacatgatgacggttagttataataaaaaagtagtaatacaatgttgctgactactgaatcacaaacttgttatatatataggttaatttctttgtatcaaactacataactaattattttaaaaaaacattgtaaagtacatccatgacagattataatgacgcctggaggtattcatcataaaaatctttcacggtgaaaaatatgtcaatcacaaacattagggatttttttcattataagatgcagctatcacactatgacaaagtatttcatcatagaacttggtaggcagggtaattatagaaccacagtaaattggtcccgtttgtaagtatcagtttgcattaaaaggttcatcctaaacgaggcataattcatcataaagagtcaggttggcatacagtaatgaagtattttcgtcatggtactaacaatagttgccaggaggtcataatataagtgtgagaaaatgtaaaggagatagtttatcctgtgcaaacatgtattgtgtgcattgttgaacgattgttttccaaatcagtgtgcgtacgtttggtagagctccaactcctaaatttaactccaagatcggagttgggtctggagtgcagttgtggagctgcccaaacccagctccacctctctagtttattttgtgagagagctccacccagctccactcacatttttggtggagctgaaattgtttgacggggctttagctctagaaaagatggagctggagttgaagctgtgtcaaacagacccgtatatcttgattttggacagtccacatgcaatactcggactggtgaccgcatcctatattgtggtgtagccatgttatgtcaacacgtatcaacaaactgtctatctccctatcctggtcaatggtggaagtcgatgagaatgcaggaggctacattgatcacgattggttgtctgaaatcatgttgcaagaaaaggcggcagatcattggaataggccgcatgatgggcctccacattatggatatcccatatctacacggcgatggtatttggactgaatacaggataccaaatatagatagaatatcttatttgtgtctcgggtttgtttctcaacttgtacatcaaggaaataccttgagacttagtcggttacgactgtattttatctgtatctgcatattccgttagggatatagattatcttttgtaacacggactccttcccatatataaggggggtccgggtgcctctaggggcacatgttgattttctccaaatcatacaattaagaagacactcggcggattcatccccggacaggagtagggtattacttcttgaataagaaggcctgaacctgtataaatcttttgtctccaaacccatacacttttccagcttgatagccaccccttttattattgccgaaatctagtttcgacagttggcgcgccaggtaggggttgcgtcaagcttttcgctgatcagtgcaatgggttccgtctccggcatcgacgacctcgtcttcccacccgggcagacgtttcggttcggcagcctcgacttcgtcaccaacaacttcggcaagatctctctccttgactcggagtcagaccagtcgggagagaaccggatctcagtcccgtttggactcccaaacgcggctgaaagttacttcaagaccatctcaatcgagttggcttcaaaccactcgggtgagatcgcatcttctccaacgtcaccaggtcaagatgatggggcttacccaccgatcctgatgaagctccccgacgatttggcggccgtctccatcacgacagcgtctccatcccgtaggcctaggcggaagtcggcttcaacaccgatttcgcctagcttcagggaagtcggcgtcatcctccaaccactcggcatggtttcgacggatcagctggatggctactacagctctcccaccgtcgactcgcgccccaccgacatcgtggagtacgacgagtttagctctcgctacaacgacccggatctcgacgacttcgacgggagcctagatgacaactacacccctctctacttcggcgtcttcatggccgataacgagacggaggagcaacgccaagcccgggagaccgaagcacgtcgcgagactgagcgtcgccgactggaggaggagcgtcaagcacaagaacaagaacggctacggcgtgagcagcaggagcgtgagcggaccgcgaaggaggctgaggatcgacggcagcgagctttggaagcagggcgccgagcgcgtgatctcatcggccaacaagatgttgaagggacaccggttttccgcacccctcaacagaatgtggttgccgcgatcaccctcctcgacaccctcctcaaggaaaacgagctcaatcaatctgatcacgtcatcaacatcttgaaccagacgaagaccatgattgcggcttcggtcccagttaactccgaaagcgtccacacgccgactggcagccgagtcccccacttccgatctcatgactaccgtcatccaagcctcagcatcaccggcgcaggatccaatcgcaggagcaggggtcacgacgagcggtccgttcactcacctcccgatcatcatagggagcgccgagtggaacggcctcgctcaccacctcgtcgccgccccgtcgatcttcgcgacacaatcatacagtgccgagcagctcgaggccatcatcattcaccggaccgccacgacgacgaccttgacggagtagcagccttcaccgacgacctgcgtcgagtggattggccagccggcttcaagccgactggaatagagaagtacgacggtaccactaacccagaatcgtggcttaccgtctacggtctcgcaatccgcgcagcaggaggagacagcaaggccatggcgaactatttaccagtggctttagcggattccgcccgatcttggctccatgggttgccccgtggtacaattgaatcttgggccgaattacgcgaccacttcatcgccaacttccaaggcaccttcgagcgtcccggcacacaatacgacctctacaacgttattcagaagtccggagaatcccttcgagattacatccggcgattttctgaacaacgtaacaagatctccgacatcaccgacgacgttatcatcgccgcattcaccaaagggattcgccacgaagaattggtcggcaagttcgggcgtaagcctcccaggacagtcaagcttatgtttgaaaaagccaacgagtacgccaaagctgaagacgccgtcaccgcatcaaagcagtcgggtcccagttggaagccaaacaagggtacgccggctacgggaggaggtggaagtaacaatcataaggaccgcaagcgtaagcctgaggaacttgttgcaaccgccactcactcttctcgacagcgttcgcgcgtcaacacgttcgacaagatcatgaactcccaatgcccacaccatcctaactccaaccatgtggccaaagattgtttcgtctacaagcagttcgcggagcaatacaccaagactacacggaagaactccgacgaagaacaaagcacgtcgaggaagaaggacgacggtgacaccccggcaggatttcaagaccaccgcaaggagctcaaccatatcttcggcggccccctggcttatgagtccaaaaggaagcagaagttgaccgaacgggagatcaatgctgttcagcccgacacgccccaatatcttcgatggtcagagattgcaatcaagtttgaccgctcggatcatcctgaccgagtggtccacccggggcggtaccccctggtactagacccagtggtccgtaatgtcaagcttcgcagaaccctcatcgacggtggcagtgcactcaatatcctcttcgccaagaccttggatgatatgcagattcctcgctccgagctaaaaccaagcaatgcgccttttcacggagtaattccaggattgtccgcaactccactcggccagatcaccctcccggtcacttttggcactcgggaaaacttccgcacagagaatatcagctttgaagtcgccgatttcgagacagcataccatgccatactcggacgcccggcgttagccaagtttatggccgtcccgcactacacttacatgatgatgaagctgcctggtccccgaggagtcctatccctacggagcgacatcaagcaagccgtcacatgcgacaaggagagttgcgacatggcccaaacccgcgagatggcgtctgcccgagaggatatccgactggctgcagccacggcgagcgaaggagaagtgcccgctaccaagatttcaaaaagtggagaaagcgaagccaagactaaaaagattcccctagatccttctgattctactaaaactgctgtaataggcgccgagttagattgtaaataggaaagcgcgctcatcacctttcttcagaacaataaagatatctttgcgtggaaaccatctgatatgcccggtattcctagagaggtgattgagcactccttacatgtcaaagaagatgccaagcctatcaaacaacgactccgccgattcgcacaagacaggaaagatgcgatcaaggaggaattaaccaagctgttagcggcaggcttcattaaagaagtccttcatcccgactggctggcaaacccggttctagttcggaagaaaacggggcaatggcgcatgtgtgttgattatacggacctcaacaaatgttgccctaaagatccttttgggttgcctcgcattgaccaggtagtcgactcgaccgccggctgtgagcttctcagttttttggattgctactcggggtatcatcagatccgactgaaggaatccgactgcttgaagacttcattcatcacgccctttggagcatattgctacgtcaccatgccgttcggactaaaaaacgcaggagcaacttatcaacgtatgatccagagatgcttctcaacgcagatcggccgcaacgttgaagcctatgtggatgatgtagtcgtcaagaccaagcaaaaggatgatttgatctcggatctagaagaaaccttcgcaagcatccgcgctttcaggatgaaattaaaccctgaaaagtgcaccttcggagtaccgtcagggaagctgcttggttttatggtgtctcataggggcatccaagccaacccggagaaagttactgctatcctcaacatgaaaccgccaagtacccagaaagatgttcagaagctgactggatgcatggcggcgctcagccgatttgtttcaagacttggcgagcgggggatgcccttctttaagctactgaagaaaacagatgatttccattggggacccgaagcacagaaggccttcgaagatttcaagaaactcctcaccgagccaccagtcttagcctcaccacacccgcaggagccgttgttgctgtatgtatcagccacctcccaggttgtgagcacagtcttggtcgttgagcgcgaggaagatggccatgtccagaaagtccagcgaccgatttactttgtcagcgaggtcctagccgactccaaaacgaggtaccctcaggttcagaagctgttatatggtattctaattactaccaggaagctatctcactactttcaaggtcacttggtaacggtggtcacatcatttccactcggtgatatactgcacaaccgcgaagcaaacggacgaattgctaagtgggctttggagttgatgtctttggacatatcattcaagccccgaatttcaatcaagtcccaagcgttagctgattttgtcgccgaatggaccgagtgccaggaggatacccctgcggagaaggtggagcactggaccatgcatttcgacggatcgaagcgactttcgggcactggagcaggagtggttttaatttccccaactggagaaagattaagctatgtgctttggatacatttttcggcgtcccacaacgtcgccgagtatgaggcgctccttcatggactgcggattgcaatttccctagggataaagcgtctaatagttcgaggcgattcacagctggtcgtcaaccaagttatgaaagagtggtcctgccttgacgacaacatgatggcatatcgacaagaggtacgcaaattggaagacaagttcgatggactcgagctcagtcacgttcttcggcacaataataaagccgccgacagacttgccaactttggatccaagcgcgaggtggcgccctccgatgtcttcgtcgaacacctttatgcgccgacagtacctcacaaagatactactcaagttgcgggcactcatgacgtagctatggttgaagccgactggcgagagcccctcatacgatttttgacttctcaagaactcccccaagacaaagatgaagccgagcggatttcaagacgaagcagactttatgttatgcatgaagctgagttgtacaagaaaagcccttcagggatcctgcaacgctgcgtatctttagaggaagggagacaattgctgaaagacatacattctgggatatgcggaaaccatgctgccgcacgcaccattgtcggcaaagcttaccggcagggtttcttttggcctactgcagtgtccgatgccgacaagattgtgcgcacgtgtgaaggttgccaatttttcgccagacaaattcatctaccagcccaagagttgcagaccatcccactgtcttggccgtttgcggtttgggggcttgacatggttggcccgtttaaaaaggcattcggcggttacacgcacctctttgtggccattgacaaattctccaagtggattgaggctaaaccggttgtcacaatcacagcagataacgctcgagacttcttcatcaacattgtgcatagatttggagtgcccaatcggatcatcactgataatggcagacaattcactggcggagtttttaaagacttttgtgaagactttggaattaagatttgctatgcatcagtggcgcatcccatgagcaatggacaggtggagcgagccaatggcatgatacttcaagggattaaagcgcgtgtttttgaccggctaaaaccttatgccggcaaatgggtggaacagctgccatcagtactttggtctttgcgtactacacccagtcgggccacaggccagtcaccttttttccttgtctatggggcagaagcaatgttgccgagtgaagtcgaattcgagtctttgcgctttcgtaatttccgcgaagaacgctacgaagaggaccgagtggatgatttgcaccgattggaagaagtccgcgaagcagctttgattcagtcggctcgatacttacaagggttgcgacgttatcataatcgcaatgttcgatcccgtgcctttctagtcggcgacctagttttaaggaaaattcaaactacacgagatcggcacaagttatctcctctatgggaagggccatttatcatctctgaagtcacccggccaggttcctatcgactcaagcgcgaagacggtacactcatcgacaattcttggaacatcgaacatcttcgtcgtttctacgcttaggcttatcattgtacttccctatcttgactgtcaacatcaagttttcttcttgaagttgtcagtcgggggctatcatcataataatggagtgtgattttttatcaattcaatttgcttacttggtctatcattgccttgcttgatttttctacttagtctgcgaggactgaaagtttttaatagcttctttgggttttaggctcaacagagcttgataaaagcttttaagaaatcaaagacttggctagaattatcaaacacagcataaatacaccagtattgtacaagttgagcctccatttgttacattcatactcagtcagaatcagttttttcatcatcagagttgttactactcggctgtaggtcggtattgcggaattgatctacaacgtcacttgcaattttgtcagccgcgttttgagcattgctgataagatcaagagcagcttcttcgcttgtcccgtctgcaaagccatcaatggcgtcaatttcaatccttgggtacaaggatttggtcatcgccaatgccatgctagctcccatacttccagctttcttgatattcttgaaatatacatccggagcaactctcagcttgtcgaagatttcggttgcgtcgagtgcactcggaccactgttattgaggaacatagcttggacgagtggtgtagcgacactagcgacttcatctcttgctccttcaagcctcttgatcttgccaaccaggacgtcaaattgagcttgagatttgattttgcaatctacaaaacacatttatgataagaatctgctgcatttaaaagagagaagttcagattgttagctggcagtaccttcaatctccttcaaggccgagtccctttgcgcagccagttctaccttgtctcttttcagggcttcaatttgtttctccatttgagccatcctggtggcttgcgctgtttgaaatccaaatggttgaggatacagttatgacagcgtaaattaatgggacagatctagaagattaccttttgatgaacctctcagctcgaagtttgaatcctggagctgagcaatttggtccctcaattccttctctgtctttttggcaagctccttggcctcgtgtagctggtccctaactgcttcaagagttcccaaatgaggaaccagcttttctaaagttgcggtcttggcctcattgcgaagatggattctctgcatgatggttcatggtttagttctgctaaagagaaaacaaagtcatcaaaggcagtcacccggaagatttacattcacaatgcgagtggcttctccaagtgccttcttcagctggcacacttcctcatcttctttttgacgatttatgacgatgccagcagcttgtgagttctcgtcccaccatttgagtaagataggaggacgagagtcatcagccgcctttatgcggagaatttcttcttcgtcgtcgcctggtggttctgatgtatttccaagacattagacgaataagctggagttattcaaatcggcatcacttgaggagatgagttacctgaggatgttcctagctgagcgtgaggtgatccttgttctttatttggagacccaatcatcgagtcgttaccagcctctggtccttgagaagttatcgtccgtgcttcaacttcgggaatttcttgatctggacctacatccgactggtttccagccgggggctcttgggtcgttgtagtttcagttgctgccgactggtttccagtcggaggctggtcactcggataggccttgtcacctgaagtatgggcgccagccggctggctttcggcagtcggctcagaatccttggatgaacttggctctgtcacggccggatcaggatcttttccagctggatctatgtcggatggtttcctgcaaagtgttctttcaatattcagtattattttcatgagagaagcatgccgaaatgaaatggtaccaaaaggtttatacctggaagatgttctaatctttggcattggacggctagccagttttttcctgggtgtggtatgctttgggagtttattgggcaagcctttgttcccatatttgttgccatcgtcgccttcgtcgtcgctaagcaccagctttctcttgcgagaacctgtctgcccagtcggattggaagtttgaggttgcgggtctgatctgattgttggccctccacctccctgaacggtgtgctggcgaggagatcggcgctgagtgattggggggtcagacttcatcaatgcatattcctgaatgagatgcctccacggttagttaactcaacatgaagacaagattatgttttggtcatgggttgaaggtttcagatacatacctgcggaggtggattgaatgcgttatatggcacaactggcagctgatgtgagtagttgacgacaatagcatttgagaagattttatacattctctccttcatgattttaaaatccagagaatctggttcttcacgattaggatcatgcttgccgtacgggatctttctttaattggtgccaatcggcatttgatgaagtgccgagtaatctgctctccttgtaaaccttgttctttgagttttagcatgcgatccatcaatgccaaggcttgggctgcttcatccccaatcggaagagagttccaggtatcttggtacactggaggaagacaagagtactcaggaagagcaggctcaggattctgaatataaaaccagtttgcgtgccaccctttgtttgaggtcttgaagggcatagagaagtacttttggctcagagtccccctcagctgaaatccggcccctccgactacacatggcttactcttgttcggttggggcttgagaaagaagattcggcgaaacagagtgaagtggggcttaatccccaagaaggcttcacaaacatggacgaaattggcgatgtggactatggaatttaggtttaggtgatgcaagctgattccatagaagcttaatatcccgcggaaaaattttgaggtcggaagagcgaagccgccatagaagaaatgggagaagaccacaacctcgtgtgtatcgggggtcggaaaagcctcaccgcacgctggccgccacccgatgatctccttggcggggagaacgccgtgcgccaccatctccttcaggttctcctccgtcacgtcggatggcgcccattggccttcaaagctttccttctcttccgccattgattttacccgaatgcgctgatttgattcgagggatggcttgggagaagtgagggattgaggcggtggatcacgggaaggattttgatgaacttttcgaaggtagattcgagtggaatggtgaaccctagtttgccggcgcagctctgtactgtagcagggagtggagaaaatggcgagagttccggcggggaagacgaagcgtcgcttggatcttgggatttcttgttaagggtatcggaggtgcaaatgggcttaggcctgaacagtacctcagcccagtacttttgacagcgtggcccattgtgctccttagggacttaggcattttttgctttggcaatttatgcgcacaatagtgttgcccaatgctgataaaatcctttttacgcggtcatataattctttggaattattgcaatgcaaattaaaaggtgcccgacagaaaggtgttatgctgtttttgtaagcttttttaggctacaaaagctgtctgggttaacttagaatgacttgtttttaccatagtcatttccttggtatgttatatgcctgttttcattatggtaaatagtcatagcctaggctattagacttattcattaccataatttttataatatttggtgggtaatctttagagttttctattcggatgcctgtcaagtgtgttcattcgtgaaccttttagggtgctaaccactcggattccttttattatggctaaaaagcagtcggctagaatgcctctttaggcgccgcgtatgcttttgtcatacgatgcacgattgtgctgttattttgttctcaactatatgtttagtttgttaactaatcacatagttgggggctacacctaattaggtgcatctattcgatgcaccatattctttatcttttcgccctttacagtctttgtcttcgctactcggcagatcttggcatgaaaggtttgaagcactcggattattatctttgagaaggctatgatggttgactgcaaaggtctcgggggctactgtggagattatggatatcccatatctacacggcgatggtatttggactgaatacaggataccaaatatagatagaatatcttatttgtgtctcgggtttgtttctcaacttgtacatcaaggaaataccttgagacttagtcggttacgactgtattttatctgtatctgcatattccgttagggatatagattatcttttgtaacacggactccttcccatatataaggggggtccgggtgcctctaggggcacatgttgattttctccaaatcatacaattaagaagacactcggcggattcatccccggacaggagtagggtattacttcttgaataagaaggcctgaacctgtataaatcttttgtctccaaacccatacaattttccagcttgatagccacccccttttattattgccgaaatctagtttcgacatccctatcctggtcaatggtggaagtcgatgagaatgcaggaggctacattgatcacgattggttgtctgaaatcatgttgcaagaaaaggcggcagatcattggaataggccgcatgatgggcctccacattagcacttgccaagtcacaatgtcacgaggcaaatcatcaaaattggccccaagtcgtcaaaatgggctggaaaattggcctccatatcagcacattcctgatcataacgttattccatggaggtgattggttcgaaggaaacatgaagccatatagacatataaagagaagactgaaatctactaaaaagctaaaaaactccggagtgatagcattgcactatgtccatactactaaatttggtagatcagttcactaagagactatcacatattgtgatagatagtgcatcgagtgagatgggcctgaggcctacttgagttacacaatagtgataaccagtcccgtgtgatcggagatcccgtgaattagaacggcgaaacaagctattggatgactatgatgagagacctttaaaaatgctcatttctttgatgtacttctctcattgtttgtatgacaagttgatgcacactttaatgtgatccgagtggctttctaaagtagagttgtcggcctatagaatatcttagaaggaacacacctatatgagtctaactactaatcatggtatatgagatttgggttatctctagatactcatggaaaggcatggaatatgacttatacgctttaaacaaagggtattttgacggcaacctagtatatgttaaggaattgagtaaatcctgactccacaagactaataatttaaggcatagtccattgttcaattgtggtcccgtgtagctccatttctagatggaagttgaacataatagccttcaccgaaacactagtataacaaacagaaacggaactgaaaacatatcttggaggccttgaaatttggtgggtattgttagaattaaatgggctaggtctaatttaatccttgtaattccaaagactcataattaatgttaagagattaatactccctccgtccgattttaagtgcagccatgagtttctgtgtccaattttgatgttacatattactaaattatgttattactgtttttttaagtgctattagtatgttcatgtttagtagtattacatagatcatccttttattcttttgtcatgtttaatattatgattttctgaattaaaatatgtcgaattatgactatatttttaacattgtagtctattgcaggaggcacctaaataataagattttggcgaacaactactgctaagtggcaaaggaagatttcatattatgattccagtcaatacgccaaattccacatttagattgagaattatgtgatcatgttttaggctacgtattgctagctaggtcataagaattttaggcccccacggaaattcaacatgcatatccatttgttcttgtcaaattaaagctagaatagagcagagaattacattggaggttaaattcattcaattatatatgaatgcaagcagatctattagcactaattatgcaggtctatattcttgtttcctttttggttaggatttaactgaactttttatcaaatctagctaaacacccttgcgtgtcaacggagttctaaaagagaacttcatcttttaaaattactgtgtcattcccgatgtacgagactatactcgcatcaattaaattttgttgtttagctcaagtcatgtacaaaataattgctaaccatgatcataatttaaatttgatactgattttccttgtggatttttcatgactttcatagcctggttaatgctgacctaaaattttcttaagaactaaaccagataagtgtagaccttttaccagttaatggacaaagatcagtttagaccttttaccagttaatacaaataaatgcccgtctgtttaaagttattcactgtacgtggcccccacataatagcatagcaggtataggtggtgatgttggcccgggccacataacaatggatatgtagtgagaccaccatcacaattgctgtcttttaattagagtatacatactatacatctactacctcaaggtgcatcaaatttatatgcatttacctgcatacatttgtagaacgcagtgccaggaatgcatagtggaagtgttataaggccctgagcgaaagcatcgtagtgtttccacatctttccgtcggaggtggaagaatcatagctgattaacttcttggctgtaacgctgaatatcatctgcaacaaattgtagtgatacgaagattcaattgtcttatgtaaagttacaacccactaaaaatctaagctcaacatacaagtatagcaattattagttgacatgcaggcacgctacatcaacccactcaacatgcagtcatcgcaagtattagttttttaggtaatagaacttatagagtattagttaatatgcaagcatgctgcatcaacccactaaacatcaaaagccaataacatgcaatcatgcaattatgccaattatattcgtatatacttcctccgtcgcattttaattgtagtcgtagttttctgcgtccaacatttgaccgtctgtcttatttaaaatattttatgattaatatttttattgttattagacgataaaacatgaacaatactttatgtgtggcttatttttttaatttttgcataaaattttcaaataagatagatgatcaaacgttggaaaaaaacccacaactacgtttaaaatgggatggagggagtactaaaactgaaaatataactatactacatcatctaaaattataaaatacaagcatgc

SEQ ID NO: 28324 - DNA, 13597 bp, Oryza sativa
caaaagtacatacaaagcgtagggatatataaatgaatatatgttaaatgttacataaatagggatatttttttattgaaattttgtggaaatgatataaggaatgatgatctggcatgcttgtattttataattttagatgatgtagtatagttatattttcagttttagtactccctccgtcccattttaaatatagttgtgggttttttgtctaacgtttgaccatccatcttatttaaaaattttataaaaaaattaaaaaaattagtcacgcataatgtattgttcatgttttatcatctaataacaataaaaataccaatccatctgccctctcgctctccatttctccttcgccttcactctcaccctctcactctccgcctctccatactgacgactgccgctatgacgatgcaccaccagcggcctcccctcgccccaccccttcttcttagagctctccgctattatgcgccaccaacgttgttgtgccatttctcctcatatctaggccaccggatccggctacccagaggctggggtcgctggatccagccgctttgaggacaggggccaccagatccacggcgaaactgtggcggcggtgatggcctcagcctccagcgagtagtgacggcagtggttccacgacaagcggcggcggcagcaacaacctcatcctctgacgagaagcggcgggctcccctggtccttgatggccggatggcatgtgccattcgagggtgatgacgggtgcgagggagatcgaggatggcgtcggcagtgagtgcgttttgtttctattgctattctgttgaatgtctaatatggcagaaggttttttatctgtgatgtggttgtgcgattgttgatgatgttgatgaataattgaattaatgtaaaatagccatgttattggtttctgatatggttgttctcatctttgacctgtggatgtggagttcttgttcctaatctataaatgcggaaggggatttagtggtaaatgtggaagggatttggtggcatggatgtgaatattaggggcagccccaagcatcggctcatcgagctgattcgtcgagctagcctcttctttttttttttggcttggggaacacatcaataccggttcctcacccgcactgatgagcccccctcatcagtgccccaatcatattgccggttggagaaccggcattgatgagactttccaaccaaaactaatgataaattatgtagaggagcaccccttgggcctatgccaggtgtgtttgctcccacgtggcacacttggcaacccaattagcaaattcataaaaaacatgtcgttgtgttcatcttcttccccacttcccctctcaactttcatcccctctttcttgttgtcagctcagaggaggcctgcagatctgaccagttggtcagacggtggtgatggaccggaggcactaaggtcttcctgggaggcggcaggtgccacctgtggggataaactagcatcctagacgagggccactgatcagtgcggtaagaaaggaggcctatcgatgccgtgtgcgggtcgaagtgtccagcagcctagcaggggcatcgtgggggacccatgtgggggttggggaagtgttggacggcctcggccacaatggagatggtaggcagatatacctgtaggttggcggttggaggagaagcccgacgaatctacaacggccacagcccaagcgacaacgaccaacaggtggatgcaggaatttggggagggagtcgatcaaatggccgccgccaccatggtcctcttctcggatccaaggacacaaccacagggaatgccccttggagctgcagatctacgctgccacaagccccttccgtggcgccacccagtacatgcctcgaggaccctccgaaacgatcccaggtgcaagagagaaagagaggagagggagggtatggagtatgaagaaagaagaagatgggtactacatgtggggcccactaatttgttgctatgttggatgacacctaggatgaaaaccaccatgtatttgatagggtgtaatttgtccagcttaaaattaaaattgcctgatactaaaattgatggagtaatttacacttttatgatagttgaggaaggtaaatcagacaaccatattttcaaacatggaagtgtagtattttaggattaaaagattgaacatacacttgagattgcttccttgagttcgatgcttgggtgattaagccatgatgacaggctggcctctgctgttttgtgcatttcctggatgatttcttgcctgagatttccagggccgaaaattcggaggaccaagttcctgatatgcctgtgtaacaacgcatgtgtcgtgattatactctcggcgccggtgatacgcatgaatgaacccgggcaccatatctggaaaagcttctcctcttgttgtaacacgaaattgctcacctccggatctagggaaacaatcaggtcttccataatcatgtttgttttgaaaattggaccatacctgaaataggcgcaaatgaatgttaatatgcattttgtattatcccctctgtttctgtttacttgctgctgtctaacgaattacattcctacccttgtaaatcacacatattgctattatcattaaaattcacacatactaatcatctttccccaaaacaagcattaaaattcattatgagaagtactagtgctagtatgattacatttttaagaagattaggaggataaagacatgtcaaaaacaagtctacaaatccttttatgtctttgtaactcactataattatgctggattggggagaaacgcttctaacaagtgctctggagatgtaggctacaagtgaacctgtgagaggtctatggatggaagcgcgatgaggtgcgcaaggtggaggtttagggtttagggtccagggatagacatgtgtgcaaggtggagcatgacgacgataaacataatttgatcgatggattgaacactttaggcggtggtttaagccattcgatggctactttcaatagggagatgaccagacatggtgcttcgattgatggtggcagaagcgattggcaattgatggagtcagacacttcgggtggatggttcaaactttttggtgaggcactttcatcaaggagtcaatgaggcttgaccctggggttgattgatgctagaggcgatcagtgtacccgatcagtggagttgaacactccaggcagggtggcacgggtctttcagtaagctgcgttttgacaaggagtcgactagatatagcgctcgggtcattccatggctaggaagatggcatggcgatttgtcggcactcactcacgactagattgatggcattcaataggaagttgtagcgggtggaccctatatgatggtttgagaattgagaggtttcttcgacaaagtgtggtatgacaggactgcgccggtggcggcatatatgcagcagacagctaaattagggcaatgacggtgaggccgttatattgagtcaggccaatcgtgcaaggacctggatgaactatggatgtcgctggagatacattgacactcatgaggtctcatctcatggaggtgtgcacgttctgcatcgaggctgagccggtggtgactagggttgtgccgagccatggctaggctttgttcgagccattctcgcatgagagtcaaatctggacaagatcatgccgtttgtgatggaaactgacacaaatttgtgaggattctagaagagaaatgacacacactcgggagcaatcaaatatgtttcttgacgggtggacgtgatttgcagcgtcgagtagatcaggttgagtctacactgcttcggcgagtggtggtgcaagtggaggaagctcggtggcggctccccaccaatgggaccgatgtaggcaggggtggggcatggggaggatgtgtgtggacgggcctcctggcagtggtggcggcccttacaggagggtcccaggagacgatgttgtggaaggtcaattctcgtgcgtcgcggcgctccaagatgagcagtgttgacggtcgttagcgatcggtttcgaccgtcaatactaccaaaataaaggagaactagttatgcttgcaatgcatatttgtgttagaataataatattccactagtattgggattactgacctcttgcagagaataaacataaaatggaggagaatcgacatcaaaccagatgatcaatcaatcggacgatgtcgagaattagacttatgcatgaatgggccaagaactcagaattgacacgacaaattaggccaaaattcacaagtctgcggagaggagcaatagaggaggccacctgtcgaatttgggctaggctggccaagcccatggttcggccgatcccaccgtggctccgttcgatgcagggtttggatggacggcgtggatcactccccaatgacgttaggagggcaatgccgaccatttcaactaccacaaccgtcattggcagcctatttaaggagctcgtcttctcactttctccatacacttcaagcaaagttctctcatattctctcaagcttagtttactattctcaagctagcggaataggaatagaatagaaatcggagtccggaagtcttcggaagagttcgggtatggctctagtagctctcctttcttcttttgtaagacttgtactttttttagaatattcttctttatataattctggtattgaaatattttccgagtatatgaatgccaactttacttcatatttaagttatattgattatactgctagcttatctgggagatgcataggtacgggtataatgtttgcttatacaattactctatgtcatgacgatgatattagaatagtaactggtagtttaggcatggtgtctagattactgggtatcattatttggggttatatgctatggaagagaggtgggccgctgatggtgacagctcagtacgggtattcctccgcgcgtgtatatagtcctaagttaatttcctggggagggtactcctccatatttagccccggttgtatagtcatgacgagctgtcgtaaggaactcgacagtcaggggtgacttctcgaagtaccaggagggcatcggaaagagggtattagctaattaatcttataactaggatgtatgtataatatgtatactagaagtataggaatagattcttttctattttctttccatttagcttagatagtttaatatgagaatgagtagtcttatgcttgtgtgtcatgctaccctatggattatattaacccctgcttacactatgattattacaagtaacatataaattattagtacggtactctctactataatcttcccacaagattaaacaaatacgatacctttgaaatactctcgggtgaaatgttacaatggtatattcgtaagcttatataaactctgtaaccataatataccaggagtatttctgcgccattgcttggaattatatctctagtaatgtcgttaagaaataccaacaagcagcagtgttgggaaccaaagcgcatgctcgatggcaagacaacccttgctcggagtctgtggaggagagctggggacttctgttcatgatggtttgctcgaaactgagaaggagtatgcgtggaaggagaaagggaatcggccaacccttgatttcctgttgaatgggatttgaccagaagaaaccaagttgtggctttgaccagaagaaaccaagttgttttttttttgggaaaaataaaccggttttgttccagctggttagttggtgggctaaacaccaaggcagatcaatttaattagggtggcagctgtttttgttatcatccatttctaccgtgatagctcctatgtttgattcggtgaaattcgatagcaccataaatcttttctctggcagacagaggtgaaggatatgttggcttaactggggatatccaatgctcttgatgagatgaagccggccaagacggatgatgacaactgcgatgtaatcaagacacatgcagctgcgacgatatgattgcttggatttggtcatgtaccacatcatggaggaaaatttaccaaataaaatgttggacaagttgacaaggctatatatgtctaagtcggtgactagtcagttgtatctcaaacaacaattgtatggtttacagattcaagaggagtcagaccttagaaaacatgtggacatcttcaatcggttggtcatggatctaaggattagatgtgaaattggatgatcaagataaggccataatagttctgagctcacttccaccgtctttggagcatgtgactagcgtgacgtatggtgagcatactatcaagactgacgagataatttcatcattgtttgcatgggatttgataggataaaataaaaacaaggcaacataggcttctcatgctgaaagtttgctggtcaaggcaaagcatgacaatgaggtggagacatcgaaaggcaaggagaagcgggtacgttgctataattgtcatgattttgggcatataaggaggaattttccattaccaaagaaaaggaaaagtgcaactgcatgtttacaagctcatggtgatgacttagatagtagtagtcatgagatctcacggtgtctaacgagaagtctggtcaagcatagatattggacttggctagttcctatcacgtgacatcaaagcatgagtggttctcttgatacaaatctggtgagtgtggtcttgttaacttgggcaatgagccacatgctaggagtatggatgagtctgattttccctaggagcttacatgagactgtatcaagtggattataataggaagacaatgaatatcatgaaagacgggaaagctgtaatgatcggtgagaggatgataatgtttgcacaagctataagctacatggaagatggatatgttagtgtcgctgtacacgatcctgaaggaggtgagcctagcgtaggctcatcgggtggctcggcgtgagtagtgaaaggaaagtaactcaaagttcaggaacacggcggtacgcacaagtactaaattcagattggcatggcattttcagtaaggtgaagtttgttaaagtttatgtcgaatatttgtacaaagtcggttacaatttcagacttgaagttgtaccgggtattaagacagttgtagagtcggactctattttaagatctcttaaaaagagagaaacacctgttgtaactgcatggcaacatagcacatgcaagagggaaaggttgtcggcagcgtccagtctatggttgttgcaactttgatacactgtaattatgctagttcggggaggagcatctgtaatcagtgtcatggggttgtacgcttcggctgaaccttgttaataaatatctactataaatttggactttggataagcgaagtcttaatatttctacatgactttggatgaacacataaatatttatggaagtcgtatatttcaacgaggttaacttcacaaaattttcatttgagctcatcaatgatatgattacaagttgcaaacgagagtactcaaaagaacaacatcagtaacttaattagatatgaagtgcttggtaaatccgatgatagaagggttaattagattcatgccgtattgaaaaaatatcattactatttacaacatctgctgcatatgctactaaaagtttagaaaattcgaaccatgccacaccgtaactatttctgtcatcctccgttcatcgacgttctacttccctctctagctgcctgcttgaagtgagcggcgaaggcgtgcccagagaaggtcgtcgacgtgctcctcatggacacaagtggactcgcggtgggagcctgtgacatcccgacccaataaggattaggcctgtgtggcccatgtgagctgtgtgcgtatgtttagtaccaccttactagtttagcacgagtggaaccgacttataaggcctcttccctccaaccacatcactcccgggttaacccttttacacgaagcgaggacgaaagtgtaagtggggtggtgtgagtaagtgggcccgctcgtcgtttgggctgggctacgcggttctagaggaagggctattacagagccgtcgggaaggggaggggagactcgtaatgagatcgatcgggaagagaaaggaagaagtggtaggcggcctgggtccgtcgcgttgaaatcctccaatgcggcaatagactcgtaatgagatcgaccgggaagagaaagggagaagtggtaggcgaaggggaggggagactcgtaatgagatcgaccgggaagagaaaggaagaagtggtaggcggcctgggtccatcgcgttgaaatcctccaatgcggcagtagactcgtaatgagatcgaccgggaagagaaagggagaagtggtaggcggcctgggtctgtcaccttgaactcctccaatacggcaatgagccccctctttaggcccgttaatgtccatgtgcaaaataggcgatcgaacatggcctctcttttttggggcccatataaacatgacggcccacttctaattgcttagctatagcaatgcaagcctaatagatagatcgaccaacaagaccaagccaaggtgtggcactgccgggttgtgtgatcacataatttgatcctgctgctactgtgcgacaatcctaattccatgccgcgtgaccgccgagaccgagacgtcgatcccaattccacgcaagcgacgtgggaggcagcgatatagcttgctgcttgcaacaatagcacttgaaaaatgatatcttagacaagattgttagatggatctccctccccttgagcccaacggctcaagggggccttgacccgtgccctgatcgggggcgcccagcccaatggctggtgggcccccgtcacactgtgccatataaagaggggtggaggacgggacgggacaactacacaaggaacgaggttcgtcgccgccgccgccactccaccccataaaccctaaccgatcgagggggcgcagccagtgacgggaagactccaccgccgcgccacgacctcgccaggatcccctacgaccaccactgccgcgcagcaccgtcgccgtcacgaccgccatcgccgccgccgcccacgtcaagcagagcgacgacaacgacgatggctgggacttcctcttcatccaacgcgtcaaccggtcacatccctaaaccctttcccttattctctattgttgttcaatcatccatcgcaaatagaaccacccgactagatctaaacctaggtgatccaatagacaaccctaacaatggtatcagagctgtcctagcgtttagtttggttcggggatagacatccacagagaagaaagaaatccaaagcaaagaaaagcaaacgatccaacggatcgaaaagatcgaaaccctaaccctaatcttacctcgtcgccggccgtcgttgacgccggccacggagagggagaggggcaaagaggcaccgccgaggagccactcgacagccgcgcgcgcacccgcgggtgcacgcgcgcgccggcgagggggcccgcggcggcgccaccatctccgtcgtcgccggtctctcactcttcactcgcgtggaggggtgagacggtgggggggagaagagaaaagaatagagggcgtggcagcgtgagggcgtcggccatggcgccgcggcgcgaaggctgccggtgtcggcgacgccgctcggcacggcgcacgcccgcaagagaaagaaggagggggcgccgcggcacaaccgctcgacggcagcgcactcaccctcgagtgagtgcgcgcaccggcgatggggagtgcgacggcgccgccgtgtcgccgtgccgccgccggcgctgtgctagggtttcggcgacggcgacgccgctccgtgcaaccgcaagagaaagaagagaagaggagctagggtttcggcgccggcggtcgggggcggttttgtttgcccgatccgcccgcgcgaccgtccgatcgaaaccctagcgatcggacggccgacggcggccgggccgaaagcggcccaagtggggagcgcgcggcggcggctttcccggcccaggcccaggttgcggcctgggtgaggggagggggcgctcgcccgcgcgcaaggtggccatgggccaaccggcaaaggccggaaaagttcactttaggtccctccgaaggaagcattttcaatatgtttaatgattgtgtttatttctaagcaatttgaactaacgtgaaaattgtttagagaatagataaatgtgagaaatgcttctgaacatgtattttgtatattttcatgcaaattacaatagagttttgaattgtttttacatgttttacctctgtttaaatttgaaccaacgggagaatttttacagagagtaaacaatagagttttgttattgtttatatgaattgtatatagatcttccgctgcaaatagatgaaattgatgaaaattagtgtttctaaaattaaatttcgaaccaacgggagattttaattttaggagcattaattatgtgctatgatgttgtaatttttctgaccaacgttgataattgcaatgttatagttatggctttatgtgttatgtctattttctgcccaacggtgatgtagacttaatacataataattttaatgttaattttgttctcacaatacatgattatctcaggtggctactccttgatgggttacattaaagatattccgaccctgaaaggagataactacgaagaatggaaaagagaactcgaccttgcttttatcttgggagaggtggactgggtgttgactaccccatgtcctatagaacctgctgaaattttcagaggtgaaaaagagtcagatgctgaatggcaaaagagagagagggacaatgcttccctcatcatgtcgtatgacattgagcatacgaaatggtccttagccaacaagaattgtttggctgcggtaaagaacacgattgagccaaccatattgggctcaatcccagagtatgacactgtctctaagtacctcgaaagtataaagagccagtttagtggttcttcaaagttttatgcgacacagctgataaagcagcttgttacagagaggtaccatggaggtggtgtaaaagaccacattcttaggatgagcaacatggcttccaaattgaagcaaaaagatttgggcatctcagatgactttctggtccatctggttttgtcctcattgccaaagaactttgacaaccttgttgtcaactacaaaataagtacagagaattggaatattgaagagctcatctctaattgtgtgcaagaggaggaaagacacaaagagaccaatggtgactccattaaccttgtcaaagataacaaggaaaagagccacaggtcaccctcctcaaaagaaaaacagcctcagcatctgcctcagaaacaacagtttacagttgagacaagatcagtgtctacattgcaagaagacaagacattccaagaaagatcatcctgtcttcctgacagtgatcatggcaaagaaaggtgagaacattattacatttgtaaagaatctcattatgattggttattctagatccacatggtggatttattctggagcaactattcatgtgtgtaattgtttaaagggattccgttcaatgaggactacgcaaagaagtgaaagatccattagagttgccaatggagttgaagcaaaagttgaagctgttggagatcttcgcctagaactcgcgaatggcttcacacttttacttccagatgtttttatgtccattctttgcaaagaaacttgataataagtgtatccaaattggattctgatagatttgaaatggcaaatgtgaactatggtataataatgaatgtattggtcttgtgttgcaagatcagttttatttgttatctctttctgagaatgtgaatgttgtgtcctcgttgacaaaagaaaagaaagcgaactcctgatgtctcatcgaaattatggcactgttgtttaggccatatttcgagggggagaattgagagactgttaagaatgtagttcttcctccattggagttctcagttttagaacgatgcatacaatgtatagaatgcatcggtgcccaaaacaccgtatgagctatggatcctccgtgtgtgggggagtcctgcaaaggataaagtatttaacccaaaacagtaagctgccattttattggctattctgaaagatcaaagggtcatcgtttctactgtccaaacagttatacaaagtttgtagaaacgagacacgccgtcttcttggaagacgaaatgattagggggagctcggtaattcgagaaattgatcttgaggagaggcaggtgtctgtacccgctccgtcgactcaggaacctttcttctctctacctgctaatgttgtgccagcaatgtatgccgttgcggtaccaacacctgttgttatctctcctgtggcaacaatgaatgaaagtgaggaacctgttctacaggattcaacagaaattattgccacatcagaggaggagctgcaacagcctcaaacagataatgtgccagaataggaggcccctagaaggcctgaaagagtcgcatatggaggatgatcccatctcatatgaagaggccatgagaagccatggaagatgaaatgaaatcaatgaaattaaatgatgtctgggatttagaagaaattcctaaaggagccaaaacagtaggctgtaaatgggtctacaaaaccaaatatgactccagagggaatatagaaaagtttaaagtgcgactcgtggcaaaaggcttcacgcaacgagaagggattgattacaatgagactttttctccagtctcttgtaaagtttccttcaggattataatggcactagtggcacattatgatttggaattacatcagatggatgtaaaaacggcatttctaaatggagatttggaggaaaaagtatacatggcgcaaccgaaaggttttgtcatgaaaggaaacgaaaatatgggatgccgtataaagagatccatttatgggttaaagcaaagcttcgagacaatgctacttgaagtttgatggaacaataaagaaatttgggttttcaaaagaatgtagaggacaactgtattgattcaaagttaagaatgggagactcatttttctaattctgtatgtagatgacgttctactggctagtagtgatgtcaatctactgcaggaaatagagaaattcttgtcctcaaactttgacatgaaagacctcggtgaggcttcatatgttttgggcatagagattcaccgaaatagaacaaaagtatgcattgggattttctcaaaaggcatatatatagaaaaggtgttgaagaaattcaatatgtacagatgctgtgctacacctgctcctatagtcaaaggcgaaaagtatggggcatcgcaatgtcccagaaattcagtatgagctcaataaaatgaaaacaaagccatatgcgtcagctgtag

SEQ ID NO: 28325 - DNA, 8103 bp, Oryza sativa
atatttaatagagattattggaaatataagcatttcaccacaatatttaactctgagataaacagactaaaccatgatagcgtaaatgtaaatcatgataacgtgaaccatagacggattactctcaataataagaatacacaaaatagacatggtatatgtgtaaaccaaagaaacaaaaatatctaactcatttgcgcataaaaactgaatcaaccgaaagcaacaaaagagaaaaataatatgcggtgttgtaacattatttgcaatggtagtgtaaggagaatttttctgttgccgttcccgccatcagaaccgctaccattgcactcccgttctcgccaacaatagttctcatgaagagaaagtagtcgatgtagtcgttcactggaaccagcgagcagtcgcatgatgtgctccaaaaacctaatccgccgcctcctctcagtgcaatatcaaggagacaagggttcccgaggcctgctttcctagtgctgtgcatacactcatggggataggaagacctagcaacggcattagtttgattcaaaggttttggcgtatccctcgtggtgagtaaacatgatgagtaatcagtccattttataggattactcaagaatatgaggaatagtcaaagagagggaaaacaatggacaattgattactcgcgtaacaatcatccatttctctcctactctaattgagtaacaaccgaaggcgaagggcaatggtcacttcgtttatgtcaacagtagttgtgcaatgtaaaccccatcgtttacttcaaaaccaactgcgtaacttaagctatccatatactagccgtgcaaagcaattatgcattgataacgacttcagtaatatgtctgatagtgttactgtatcttgatatttattggagatattgctatttagtggtaagaatagatgcatatagcaattatgcatactgcttggggtcagaattttttttttgtgaactttagttcctgtacagttgagttctgcatttgagtatgtcatcatatgagttgagtttcttttaatctaaatcgtagtacaatatccatatgaatttgacagaacagtgcatatattgttttttgcatgatgatgactttcttaacgataattaactggaagtttttctttcgatttattgtctatttatgttctttaagattaatcccttgaattattatgtttcactgtgctacatataaatataagtggtcaatcttacataccactaaaggtttcaaaagaaaaaaaaaatgtgactacctcttcatcctaagacattaggccctgttggggcagctcctgatattaaagtttctcccaaaatctccagctccccaaacggtccagatttcagaatttatagttatagaatccaataaataaactagaaacaatccaataaataaactagaaactagattttcactagctaaaaattgaatatcatgctaaaaatttgttacacacccaaaagcacagaaatattaatgccacgtctcatttttatataagagtccatgtcatataattaatttttgcattcaaaatcaacgtagaatacattacacagtttacttacattaatcttttgtaagtattctgagccatgcagtgaaaatttcttttatacgacatggtgattactgaaaattgtgacataacttttaggtaatggaatttgagtttttgtggcatctgcaacaaaacaacaaatgtttttagttgttgtgctgagtcatcatcctgtcacatgttcaactcttctccaaaccaagctaaaaaacaatactccaaagctcaactattttttaacaatcctatcgtgacatggtcgatgaagaagctttgcaatggaaacttctagaattattttgtacaagttagttggtgaagcgtatacatacaaaaaaaaaagcacaaaatgatgcatatttgtatgactttctttttcattttgtcagaggcaagctgaaaagttctagccaggaacaaacatcagaagttaagaagaaaattctagggacaaatgtgccctactactatgaaaaagcagatgaaaggataggaacagatcagaaaggaaagcctaatatccacaaaaacatagaatattatcaatcgtttaagagaaatgaagtaatatatctgacaatttactataccttaagatttatcagagatggtgctatttagtgataagaataatagcataaacgatgcagtcatgcatgtcggcttggattttaggatttttttctgtgtttgtgaaatttagtttccacactatttgattttgcatctgagattggcatgaaaaatacatgttgagtttttttcatctaagttgctgtcaatctccatttgaattcgacattacaatatatatgataattgttctacatgatgttgaataaattggaaacttctttgaactaatattttctagttatatgttcctcaagcaagtcattcatatactatcatggttcattatgtttcatattaaaaacataaaaatactacaaatatacaaaatcaactgaattgtatagacattcaattattctctgactttgcatttgtacataattggtcttacatactgacttatcaaggtcgatcctgagctcctttaatttgtaatgcagggatgcaagattcatgttagaactggttaccagttcaattttctacattccctatttaaactcacacattatgaatcaaaagcatgagattgagcattattaattgtaacaattatttaacatggccgatataagcatcttctgaatagaaagttgttgaaccatactcccgatgcatgacacactatcgacggttgaacctgaaaaaaaaaaagaacaggttgcatgacatctcttcatattaaagctctcatcatagaaaagagacagacagatgaacctccaccggaagcaatgcatacataccaacttgaaaaaaataaataaagagaaagatgaactccaggtagcaaaaaataaaaaatattccctcctcctcccctgccacagctaacaccactcaacaacataaaagaaagaggacagaggaattgaaaaggactagctaagctagggcaagttgggaggaggagagactacttcaggctttggctaatatatggcatcacatgattggatgtcatggtttttattcctcatcttgtgaagcgtcagagaagtttaatagtatagctaactaatagctattatctcatgttatagctaacatatacagtagattaattaacttataaggttggctcaatttaatttttctctcatctttctttctcactacgaatttagcgtaaatatcttaaaacatgtgtatagttagttctatcatgaaaaccaactctcgtcacttttctttatctctctttcatataagtttatagttatcgtatatctcactatatataatcctgcatatgctacctcagcagctagcaaattaaggagagaatagttaaacagccatagggcaggtcagctccaagctaggggcgctgatcgagcagctggtggtggccacgttccggcgcgtgctggcacgggcacctcacgcggcggcgcgagcgctgccacgcagctgtgctgtccaagctcgccgtcgagattggctaggatttcgatggtttgttagagaataaaatatgattaatattttatgtgtgacttgtcattttaatttttttttatatttttttcaaataaaacggacggtcaaacgttgaatagaaaattagggtttgtcgtttttttaatggagagattacgtcacttcaccggccagtttgttttaatttactgccagaatgtatgcggtacggtggctgctgttgcattgcatcaggttaggagatttcatcaggaagataacatataagtatatcgtcagcactcagcaaatggcaaagttgcagccgttgtgctgaccgcggccttcgttcgactctattctcgactgcgttcacccaacttagcgagtgttatctaggggtataaagttttggcgtgtcacattgggtattatatagggtgtcgtatggggtgtttgggcgctaataaaaaaactaattacggaatccgtcggtaaaccgcgagacgaatttattaagcctaattaatccgtcattagcaaatatttactgtagcaccacattgtcaaatcatggagcaataggcttaaaagattcgtctcgcaaattagtcgcactatgtgcaattagttagcatatatttaatacttcatgtaggtgttcaaacgttcgatgcgatatggtgtaaaattttagtgtgggatctaaacacccccttaataaaattcacactggggttttccccatgcctcttcatctaatatctgtgaaatggcatccattggttaccgtgctcaagtagcatcactgaaaaaaaaattcacttgccgatccttataaaaatacgtgtcaaaatttgacctatagaggatgggccctcgtgtaggagcaggggcctaggtttgtggctttactcaaccggtttggttaaaagtttattcttcttaacaaaaagccatggggtggtcatttctccgttggtcgagtttatttctctagcaaattttaaaattgtgcatacaccatatggcaagatgtagtaagtgtgctgcctgcggcccatactcaaatctccataacactcttactctcaataaaattatcgttaggtttctccttttgtacgggtcttttcaagtaaatttcacaaaattgtagattctttaaccaaactatcacaaatatatatagagagagagagaaagatcgaagatattgtatcataaaactatagacttggtattaaatttattagaaaactacgtatttaagatgtctctgtcgatggggaataccctagaccggatgaatagggtattagggtacgttggtatgaggatctacacgatacgacctcaagcaaacaagaagacaaggattatactggtttaagcccctcgtaaggtaatagccctaatccagtttatatgagattaatatggaaagaccatagattacaatagagaactggcgattccgagattaccggcgagatcccttgtcgagatggtttcgacgagatctcccggcgggtaggtttcacgtcctcttgtaggctatggtggttgtgttggcactatgattcgatcccccaaccccttaggaggtgtgccttttataccgtgaatcacctcagtttccaagtagaactcggaaactatggacccgtacgatataatataaacctaaacctaatcctctccgagaaggactatgatattcacttgtctgtgaatataatttccacaatatcttgttaatttccttatcatatatgaaaatcatatcatacgcacgaaggtataccgtatccgtatattccataagtcatatgataggaggtatgccttatccgtaaccatgacagtatcagagaactacagattaagcattaactttataaaaaaattatattattttaaagctaagtatcagaaaactactgaccctagagtataaaactctatcactacttctatgttggagctataaacggtgtaactttacaaactaaacctgtagttttattataactttaatattaaatttgtagttttataatacctcatcttaattaaatatgtatttccgtggtaaattactactaaatgtttagtacaacactttaaacttatttttttgataatttaattcaagtatccgttaattttacgaaatttattttctctctctctcgatcatcagcaagatagtaaggcatgttttgtgcatgcagattcatgctgagcttgatctgacaagagaaccatcgaatacagtatactcgtagtcgcatcagatgttcacatcagtgatggcgagttaaaggttttggatgtgtctgcaggctgcagctctgcatgcgtatgattaactgaacatttaagtatttgacaggctcaaaccatgccaccaatgtgttcaggtaatggtccgacgtgtgatcagttccggcctggccagacatgcacacatatgatgccctttatttctttttcagatgaaaggcatggaaaggtttctctccaggatattgccgggtagaatgtagcatttgcttagagtcattagaaaataaagaaaagtttaatccttaacagtctagggatgaaatatggatgtgctctcaaattaagttcagctcttaatgcatgtgctcgagtcgcacgttcaaaatacatgattaaaaaaatagaggaaagaactcaaatttataacacagaaatgatcattcgattagaccatggaaaaatacaggaattatatgagagatactctaaggggattgtcccagagatttgagctcttattatttttctccaaaatctctatataattgtctatttcataggaatttcaagcaaaatgatagaattcaatccttcgtttccaatatttatatatgattttttcaataggattaaaatcatccaaactccctatgcctttccttttcctgcaaattaaagggaccattatggaaaccaaatcgatttctaggttttccagctgaaaataattggttttctctacttccatcacatctataagattaatctgcatagtcatgtaaatgtgaatcttttctaaaattcgtatccttggcacttgtttgtgcacatgcccgctcaacacagcggcagtatgataaccaagacacatacgcatatcagacaaaaaaaaacagtctatccgtactaaaacagataaacagaccactcaagtctgaaacgaacatttcctaaagattcagaaattctagttctttgtttactcctagcttcctttcatttcactgttctgtcacaaatcacaggaaacaaaatactcatcgccattaacaggaaaatatttctacagtttcctttgcctacagatttctatttgcaagtgttcactgttcagcatacaagttaaagggcatggtggagctacagattacgccagctatgtacaacacatacataggttcccaatgtttgtagccgttagatcagaaagtaattaggtcatcgtttcctagaccgctgcttgacatcaaactagttgtcttcgtcgagctcatcatcaatatcatcaagaattgactggttaatcttctttcttgatacccttctgtgctttttgagttgaagacgaggctctgcttgctttacacccatgacacctgttttgtatctgaagcaagacgtatatgttttcattgttaggaacttaggatagcaagatttagcatatcaatatcccatcttaaatagaaactgtgacacaagatcaatatcaaggtgaaaaatcgtatgcgagttatgtgattttttttctttttcagttaaggccagtacagatcaatatattttctcacaaagtatagattgtggatttgtggagcaccgtcactcttgcataggtggagctagctaggtggcactgtggtccatgaaacatattatgatttgactcaaggttataactatagtatatatattgcctaacatcataaaaagttacatatggaccaccatttgatctggctcattacatctagatggaccacctttgctctaaatccaagctacgccactcttggtggacatagaatttgaaaaccatggcttaaagaacataaacattgtcattggtgtaaaaagtaaatttagcttcataagtcatcaaacctaacaccgtactagtgcaagagaaggcatgaaacatccatcacgaaaaataattaagaaataaatacatcttgatagcatacctgacatcaccctctctttttgttccaaatgttcttaactggaatgattctctgattttgatttcatcaagcaactgtagatagtatggatacctttcccagtcacctttcacaacacatccacgctcaccaaggtgaacacagtcattaaataaacattttgagggctcattctctgcaagcatct

SEQ ID NO: 28326 - DNA, 3687 bp, Oryza sativa
aatgaaacatgacgtgttgtgtgctttcctttaccgcttttcttcgacccggtaccgacccgttgttccccaaaccatttcctattctgaaagcgatgtgcgcaagaaagagacttcagtgtccacatcaagaaaggatttgacactgttagattttacaggaacaacttgcgtcattttataacaatgataggagaagaagatgccaaatctaactgacgtatgatttctaaggtgtcgagaatttctaggatgttcatatcaagtgtgggtcacgttacatcattctgattctttgcacgattagtgcctctccaagccaaacttaacaaataatgtgtgaatccctaacattattgtcagcatttaactattaagaatgactaatcgatcactctgtagtagggagcacatggtttttttttattagccatgcaacatggatggtaaagtgcatgtcccaaaatgcaatatactatctattacttttagttctaaatttatgtgttttactccaatccaagattcagaatttctttcaagaatcatcttcattacaacaagactaagaaggtaaatcgatagcaaatattaactggttatatttgtcaacagcttgtccacttgttgcactcaatctttcagtttgctgcaaaccatcttcgtttttgttgcaatgaagttttagctttgcttcatgaaacatggctatatgggaatgacagtactgggcatatatatatataaatcggttccgactgttgcagtaggaattttctttagtgcatatcataacttcttttattgctggaactatgttttgttgcaatagcatattcacctctttatgtgggagagcccttttttttttcttattgcaactaatatgctatttgttgtggaagaaatttccttattttcttagcctatatgatttgttgttatcattgtccctacatatatttgtcacaattgtatatttggtttacttgtatggcacataaaaaggagtagaaagataaggggaaccttctctgtgataacatgaaaaaaaaatcatatgtaaacatgccaggcccaccaaaaaaaatccatcataatagtggaggcagaaatatcaatgttagacccatcagaaaatgttgaaaacttgtagcagttattcgcccataagaaacctattactgaaagcatgtgcaaaaggaagctcataagaaataacacgaaattttaattgatgaaatatgcagcaagttgctttcgtttttgcacgaaaagaaggctacagcttgcaattctattaacagaaagtgcatactcgttttctctgcgacacatgtgcaccatagataacctatgatgacactacatttgcaagtcaaaattagccctcaattcttaataagatgcaaagtttaataaaattcataatccaataggcaggatcttgtgggtagctaaaatccattaaatgcagtccgaggagctcatcactaattcgttacccaacaaagagcaaagaaacaatcactaaaaatgtaaaaggtcagagtggaagggtaattgttgaaataattgaagcaggtaaaggaaatgaatgacataatagctacctgctcaactagtttatgtatgggatcttcttctgagatgttctggttgcttctcaaagcattgatcagactggactttccaacaccgcttggaccaacaattacagttgtctgtccttccaatgtttcttcaagagcggataatcctgatttctgatcaacacttaaaaatagtggatcgtatccccaactcttcatcctatctctccagtatgatatggtctgcatacagattaatataagtaatgatctgaactatgtaaatatgaagtgaggaaaaacatgagacagcacacaataaatggactatcctgtaaaaaacaagtggaactatgattccatcatgatgatttaaaaaataatggagaaaattatataatgtttaagtaaaaaagatgtactcatgtacaggcatctgagtgttttagtaaacataccagcatcaaacttagcgcccattgttagcatttaccattatcagctaaacacaaagaacataaacactattgtttggtgaatcgaaaggaacatggtccccaggatgtctagattaatgtgtacatgttggatgaatcagggaatcaatattatgtcccaaccatgcttactattggcctgtttggtcttttactcaaaaaggttcccgtagtggcacatttgcataacaaagtatttagttgaaagtcacacgacatccatctgatacagctaaaataacatttctttcattcaacatgagaacaccagagcaacagaaaaaggtggttgctgttcctgatatacttttgtcccttcaatttttcttagagaaatgaatgtccaattctgataaaaaggaagttgaaccagtgatatgtatgctattgtgctgagcatattagtcccactggctcagtgagtcagtgcaaccatcttcaatcttcctaagaagtaaacgcaccaggcgccagggacaacacccaatgtcctattgaaactgaaataagttcttcctctacattttcaagacacctaatgccctattgaaaataagttcttcctctacattttcaagggcagcggtgatcccaaaacggggcacggtgggctcaagcccctcctacagttggtcaatcgagcatataatatatatttcaattgtagacatgtttatgcttgctagagagaaggaaaggtaaacaatgaaaacataatttggttctctaatttttttaacaactactacctctgtttcaggttataagattcattaacatatatataaatgtggacaatgctagaaagtcttataatatgaaacggaggaagtactatatattcccatgtatacttatattagtttacctcgttccattggcaaccccctaaaatttggtcctacgttccccactgttcagggggaaaacatttcatttgtctcttatatattgacgatgtcatggcaaattacgaaatgagcatcagtacatcataatccgtagttcaatcaccaatgcaatgaagaatgaactatacagcgcaacaaagaggtaacaatttagtaagcaattgaaatcgaagaagcaattgttggctaccttgtcgtccacaagctcgaccttgttgaagacgagcacgaaaggtatcccggtggactcggcgtcgacgaggaacctggtgagcgtagcgggctcgggctggggctggtcgagggcgaagaggaggacgaggcggtcgacgttggcgacgggcgggtcggccacctcggcgcggcgctcgaagacgccctcgatcaccccgcggccgccggcccagtcgacggccccgatgagcaccctgtccccgacgaggacgcggcggcggatcttcttgaggagggcgcgcaccacgcacagcaggtccccggccgggcgcgccccctccaccccgcgcggggcggcgccgacgatcacccgcatgaagttggcctgcgacgccgccaccagccccgtcgcctggtccgggagcagctcgtccggggatgacggcggcggggggaggggcgccgccgcccccacggggagcaaccgcaggtggagggggccctggtgggagg

SEQ ID NO: 28327 - DNA, 29470 bp, Oryza sativa
ggaggagcggcatttcgcggcggcgcggcggggggtttttgggtgaggcgcggcgcgcaccgcacgcacgcacgcgacgccggggggcggatttttctggtgacgcggggggtttcgcggggggtcgaggattttcgcgtgatttcgcgtggaattctcgcggtgtgcggtgtgcggatgccgtggggtaaggctggctgacaaccgtggtttaccaaacatttcgaagtaggttaccgtcgcccagcggttcgacggttatcgtaataaccacgtgattactgtaagttataccgtagtttcaaaaactgaaaatattattgtatattttataaaccctggctgatacggaccatgatatcggggtgcagggtgtatcattgatggggcggagctacaactagcaggatttacaggaacgttactagaccgaaagctatctttgcgatggagcataataaagctcctaaaccagatggtttcccagctgaattttaccaaaaattttgggatgttattaagcatgacctgatgaacctttttaatgtattccatactggtagcctcccaattttcggactaaattttggggtacttactctagttccaaaagttaaagaagcaaatcaaatccaacaatacagactcatatgcttcttaaatgtcagctataaaatattcactaaggtggctacaaaccgaattggctcggttgctgactatttagtgaacccgacccaaacagctttcatgcgtggacgaaatattttagatgaagtcgtcattatacatgaaacagttcatgaaatacataggaagaagttgagtggggtgatattcaaaattgacttcgaaaaggcgtatgacaaggttaaatggccttttctgctacaaactctgcgtatgaaaggtttttcgcccaagtggatatcttggattgagtctttcatttccgagggaagcgtggcagtcaaagtcaatgatgacgtcgggccttttttcagactaaaaagggccttcggcaaggagaccctctctccccaatcctattcaactttatcgctgatatgctagccacattgataaacagagccaaaacacaagggcaaattgatggagtcataccacatttgattgacgggggactctccattctacaatatgccgatgacacggtgatgtttatgaatcatgaccttgaaaaagctcataacataaaatcagtgcttctagctttcgagcagttgttgggccttaagatcaattttcataaaagtgaactatattgttttggtgaagcacttgattatagtgatcaatacaaccagctctttggctgccaggtcggcaacttcccattctgttatctgggcattccgatccattataggaagttgagaaatacggaatggaaagaagtggtcgagagatttgagaagaaattgagtagctggaaaggaaaacttctttcgttgggaggacgacttactttgattaactcagtacttagcagtctcccaatgtatatgatgtcattccttgcaattcctagtgaggtacttaaaaaacttgattaccttcgatctaggttttattggcaaggggatggacataagaagaaataccggcttgctaagtgggacattatttgtcgtcccaaagaacaaggggggctaggaattcatgacctcgagataaagaataaagcgttgattagtaagtggttatacaaactacttaccaccgatggaatatggcaacaaccgctacgcaataaatatttgggatcacaacatttatctcaagcctattggaaagcggggggattcacatttttgggctagtcttatgaaggtcaaacatgattttttccgttttggatccttcaagattagggacagctcccaagttaggttctgggaagacaaatggttgggtaatgcctcgttaagagaacagtatccgtgtctctataacatagttaggcataaacagtcgactatcgcacagattttccaaaccaatcccccgtgcttttcatggcgacgggatttaattggtgcaaaactagctgcttggcataacctattgcctcgcatagctgatttggttctggtacaggagcaagatgagtttcactggaacctcaccccgaatggggtcttctcagtcaaatctcattatctagctctaacacataccgaggttctgaatatcaatagacggatttggaaggtgaaagtacccctaaaagttaaaatcttcctttggtatttacgtcggggcgtaattctccccaaggacaaccttgctaacagaaattggaaaggcagcaagacatgttgtttctgtcacaaggatgaaactatccaacatttattctttcagtgccgcttatctcgcttggtgtggtctataattcatttggcttctaatctgaaacctcctcgcaatgttggtcatatgtttgggagttggctatcatgtgtccccaaagaaatgaggaatctgcttttgatgggtgcaacagctctgtgttggtccatttggctaagcaggaatggagtaatttttgataacaagatggtgtcttctcctttgcaggttatcaccttagttacccggtggctacgtacctgggctatcctccaccaaccgggactgcgggatactattatagtggtatctcgacgtttggaccaggtggcacaggagttttttacccaggagcatgggtggcagtttagtctatggattgatagccactaagatatacggtggtatctcgacagttggaccaggtggcacaggagttttttttacctaggagcatgggtggcggtctagcctacggattgatagccactaagatatatgtttccgttaaacttttgtgcttgggagatgttctagttatttctttcttcttttttggcggtgtgcattttatgcagaggccgggggtgactcagtttgattgtatcatcttgatgtaattaactgagtctaaataaagcttccattatctaaaagaccgaaagtcatgggtaaacaggcaaaaagttatgggtaaacaagcaaaaataaagggagaaaatttgggattgtgaaccttattgaatttgatcgggaaactgagtggtttgttttatctagaagttcggtcggtttttgttcggattgtgaaccctcgctagtattgtcacctctcgtagcttgaggtttaccatggccgttatctggtgggtggatggctgcatgggttatggcttttgagccaagcccatcggttggctgattggattgaagccattcaacccaaattaagctgctctattcgcttaagattctgagacgtagttggttgataagaatctggaaaatgtgggtttcccagcttatgacttcaagtttattttttagattctacaactacagcttctcaatatctagattaaaagttggactgtttggaggagcttctgattctgccagaagtttcaacagctagaatctccccccaagcaagcccttaatccactatggattccattactgtttcatataggtaccactttatttggaaccagctccttctaacttattgtactcgactctgattttaagtagctgacatgtgaatctcacgattctggggtcatatatcattaacccatgtcataggacagtaagtcaaagaagcttcttctccttatttatgtgctatctgtttctgctcaacaaagccaaatcaatatgtttcatttgatatgattgacatgatatcaaactttactcataagggcacccacaattagggtttgcaaaaccgccggtaaccacgcggttattgtgagggtacggtaagaagaaaaccgttgtaacctccttaaatttaaataaatttaaaaataatttgaaattttgataaattttacacggtttcatactgtttgccacggttaccgcggtagccgtgcttaccgtcggggtgcggtaactctagccccgacggtttgggaaactctacccacaatgttataaaaacccaagtagtaagcactaaatgactacttactacctggtattaaccattatgagagtggtacatagttacaaccaggtagtagcactactaccagtagcaaaggaaaaaaaatggcatgtgcacagtgtttttgacaacaaatttaaaactgcaagttgtcgttgctcctcccccagccaaccgttgcatggtatgtgcttcttgccatcttcatccttaacaaaaaaaaaacagggatggctcaagatttcttttcaacacaaacacatttctgtgaatctttgctagctgggatggatccctccaagagaagtttcatgaacttgttaaaccaaggctccccaaactttctcccaatcataatttccccaatccccacagtttacctatagtcgggtaacggagataatggcgtcggatgaagggatagcatcgcctagttgcagagaaggaagggtttgcagcgtcgatggtgggggtggagcggatgcggcatcgggtggcagatatagaggggattgcggcattgggtggcgggagaggaatccggtgttagtagaggggcggaggggtttgcgacatcaatttttgggtgaggggagtggattgccgcatggataggtggggacggaggggttggcagcgtcggtggaaacaacgagaggaattggggatcgatccagaactcgcgtgaaggaattgaggagtgccgattttttttaccttatggaccccaccttacttccatctcgccaaaataagtattgtggagggggtctcctcctactaccgcctgtcactttgttccacactatctagccacttagtcgcgctttgcgcgacactgagcgttaacctaacctacatatataattagatcattgatcctgacattaattgaaggtaccagtttcataagtacgataatttatttgttctcaaatatactccattaattcctatatataagtatttgtagtttgtttagtaaatagtaagattaagaaggaatgatctatttcagtcacttactattaaattttgaactacgattggctctttctaaacacatgatttggttaaaaatgcttaaatatgcattgaaattggtgtcctagaaatgcttagatttctatataaaatttgaatcatagaaatacttattttgagattgatgcagtagctagagatgtaaatggaggaatgctgtaattgattggcattaaaaagtaggcaaagaaattaaataggatatgactatgttggttaagatgggggagtagatgtagaaatagctatattttacgctaaatttgaatgttaaagatacctatattatattttagaacagagacagcaataacactaagtgctcgcaagtgtagggtgtgcatatgtgcattgtagtgcgtactactcagttgctgtgtgttgctccaataccaagcaaaagtagtataacagagcatttacatgtacactcccatacattataacttgcatataaattcaacacaaatttacgactaaggcctcatttgtttccctttatttagtcaggagattaattaagcaaacatatatatagtgttaaaaatacttttttgaatggtagtgttaaatagactaagcacatgagttctctgctttttgaggtctttagtctgaaagcatccagattggtccaatgtgtttccactgtcatagatgagcatgatgatctaactgtgcattttcatttaccagttcatccaacggtccataccattgtagatgatgtggctcatcctgcattcagaaagcatgttgctttcatatatttagatacccatgttgataatatacattgttgttgccctaacttaggtccttaatcattcattattcatttgcatttaactttcatctaagatattagatatgattgaccattccaccatccacaaacacattgtccaatcaatatatatatatccggcaaattttagccaaccaaaacaaaaacatgttattgtaacaaaaaacaaaatcttattcatcatatcattcgcccttcttgctgttactaataaaatttgaatccacaaacttagcccccgcggatttaactaattactcggcccctcgcgcgcgcgcgcgcggtacaggtacaatacaactagaagcacaagaagcagctgcatttcttgaaaaacaagaagccgcctcggcagtggccgccgttgttgagctccaggatgcacgccgccgtgcacagcgcctccaggcacggccccgtgtacagcgtcttctccatgcactcgctcatcgcctgcgcgccgccggccaccccgccgccttcccatggtggccgactgatgatcaacgcctcggcgacgacggcggtgctctcgccgccggccggctggtcactggtagttggtacgatttgcatgttgttattacctgcgacggcggcggcgagaggaaccacggcgacggcgacggcgaggagaatgatcgacacgcggcgtttcttggagccattttttttttggcactgtatattagtgatgaaggtgaagggtagtgttctaggggggcaatggtctgggatttataggagatttggatgatgatgttgcaggaatggatatattcatatgctcctagcaaaaaaaatgaaaaaaaaagtaggtgcacattaatacaagagaagaggagttttggattgccaaggcatttaaaaggactattaaatgggaaaatatacctgtggtttcaagcaaatcttccaaagaaattaattgttcgagtatgtgtagttgattcactggctaagtggtatcatatcatttatactagggttctactatactaaaaaccaaggacttcctgttgcagtagaaacgcatgttgctatggtaaaaatttggaggcccccactgttcaagttgctatagttgctcgacgcgccactgttcatggtgtggcaatactcatcgcaccgttgtcaagaaattgttttaaatatttagtgactggggttttgattttataattgaaataaaaaagggtaagaaaaactctgtctaccacagggccacagaaaattatgcatgcagacagctactcctccgtcccactcgataatataaaaattcatatttgatcaatagtattttattataaattaaattttatttgataaaaataatatcattgcaatgatattagaatttacttttatataatatgaatttattttatactttatttgagaattgtaaagttaaagattaattttaaagaccaagctaagtttaagcgagccttaatcagagggacggagagagtacgacttaaatgagtatggtaagaccatgggtttaatcaacttcatactactaatatgacatgcaaaagagaggaaattccatttgtacattctggatcataaatggcactagctgtgtgaatggtgtgatccagaatcaccaaaacaggagaacaccgtagcacaaagaagaaagataatagctataaacatgaaagagtgtctttgatttccgtcttttcatggctgagagtactttcaaggaaacatatgttacggagtacatgtttgaacaaaagtgtttcttaccaattcacatccatacatctttgttgtatcgcaacacataactcttgcaaataatagccagtgttcatgaagcattttagcattaaaaataaaaataactaacagtgacgggataaatcagtctagcaattcatgcagtattgttcactaagcatgcttaaatttattcaatcaaataataatacaaaaaaaactgaagagcactaactaaactgcctatcaaccaaagattctacatttgaaaatgaacaagggctacaaaatgtagaaacaggtcttaaaaaatacaaaagatttatcttggtgtaagtttctccagccatgacaagataatcccagctcctttatcccacgagcaatcaagcatcatatcatgggctatcccttcgatgcagactggttgcacattataaaatcttgcagtttctgaaagcccttcagcatcctaaatcaaggaaaatgaaacagtcaaggtggaatgcaaacaagtttacactatacaactgtaaagaaataaatacggtatctacagagagaaagagagttttttttttgggggggggggggtgcgtgtgtcccttacaacaatgaagtcactgctggcgcccacaacgaggatgtttactgtattatttggcacagaagctacaggcaatgatgcattgagcttccttaggtcaaatagtggtaactttgagctgtccttcattagcccttggtaccttcaagatattgacatagataatatgtcattattgaaaaaaaaaacacatttcaaatgtagaagctcttccatagatgtcattattaactggatctttggtgtgtaactaagcagatggcaggggattgatggttgcttatcgctgccaatacaccaaaacaatgtttgcatgttatagaatggaccaaactaaaagatcacctagttcagattctaatttattgattcttttttaatccatctaaaagtcattataataaaataccaggttaaccagttcaggtgacagtaataacaactacttcatctgtttcatattataagactttctagcattgcccacattcatatatatgttaatgaatctagacatatatgcgtgtctagattcattaacatctatataaatatgtgcaatgctagaaagtcttataacctgaaacggagatagtatcaagtaatgactaatgaccaattcactagtacattaccacccatataaaagattccctccaggtatatggcctaaatttacaaagatgaagtcatttactatgaagaatacctttggaccaggtcatcatccatctctggcgagaaaaatgtttccttacagagggacaacgaatttgcaaatcgttttgcagccaagctgagtgtcacctgattcaaagatgcttaagatttcacatatcatcaacaatgcataaaggaattgcaaacagcatgaggaggcatatacacttctgggtgtggatgaccataattgtgatatcaatagcagtcgactgcttattaacataataatttgtaaaatggaatgatgaatcaggggttcaaagctatgaaacaaggtgaacagattaccagcaagacgtaagcatggtactacatagccaaaccaatcacattaatatgacaaagtttatctaattataggttgcttatatttccttgaacaacaaggaggacacatgttgcatagtagtataagtagttaagtgactggcaggaagtttaaatatataaaaaagaggtgattggcaggaatggataaatgtttcagcataattccacgagaggataaaatgaatggaatttcaagagagccaagtgataaagatcaggttaatttaccttgatggcagcaactggtttggtcaaaaggtaacgccacaccaacccactgtagatagataacacaaaggagttaaacccagttatgtaagacaaagatgtaacattgcagtgagttagatgagaaatacctatttcctgagggaggcacagagcatacaagaacagcaccagcaagctttggatgcagaagttctgaaccttggaataaaaaagttaataatgattaacttttgcatgaaataaaacaactattactgccacaagctcagaccataagctgctacatcagaacataggtaccagtaccactaccactcattcccttcagttcacagaataactcacattttttattactaatttaagtaatcaagaatccattgagaaaccttatagtaattggcagtttggcatatctatgtgattggaacttttaaggctcttgatgatgaaaattcagttaagaagaactgaaaaatattaagaacacaaagaatcaccaggtttaatacataggttacaggaattttttcgatcattgagagggcatacctcccaaacaagatatatattgctgcacaatcaagcctccaaatgaatgtccaatcaatacaggtggcagggaaacctccttccggatgaaatcagcaatatcgccagtatgcgtctactgcaagttaatttaatattggaccaactatattgagatggtgaaatggaataccctaataaaaaaatatttgttacaacatactaattttctcaagtgacacatctatgcaactctgctgaatgtactagcttgatatctcctaatatatttatttcatatgatatttataattaacaaaaaacatctaatgaaaggtcagctgaaattaatcatatatcttagatatatgaaagttactccaaaggtggtggaaaacgaggatttgccagtttgccaccctatctcattgacaagtgtgtcctggtcccacaagtcaatagacacatgagtggcaaatccccaattgccacccagaggagtagaaaaatcctcaaatggcatgcatcaacattaaccatctagtacataacacatagcaatatttcagagttggagaattcagtccgattatgtttctcagaattacctcaagtgtgccagccactttttctggcggaacgctactttcaccctgcaacagcacaaccaagtcaatgaagcattacataccaaggaaaaacagtcggacaatcaaaaatcaagacatgcgatcagtcattactcaaaaactgaaagtgtcgaatgctctacagagcagagagcagtatcaagactgggcagcaacagacacgctatgattcatatccttaagattaaagtgcacacacatagaccccatagttgcataaactgcatttttttaactgaaatgtgagtaatgccacgctgttttacttggcttggctaatatataggcattctaaaagagcgctgctacaaaacgggatcccgttgcaacgggatagacatattaactattctcttgcacgagtatcacagatatcaggtcctagatatcatatgtaccgggtaacaggtatcagggtaccatgcagctagtaccacaataggtatcaggtattaggtactgtctcatagaagggtatcatattccaacgggataccggtgtctaggttttctgttctcaaaccgtaaaacgatcaatcaataggattattatttttttgtcaaatgtttttaactttcggtttaggagacggagatacgcgtgtttctgccagcgcctagaatggctagaagtaaaatagtccaacaccacagccatgagggccatgaagcaatgatcctcctccccattaagacatttcaacaaacactttcgcggggtgtacacaagtgactccacctgacctgggcgcggaggctgagcgcgtagcaggggaacccggcgctggagaagaaggggagccagtgctccgcccagcaccacgccgcgtggaagctcccgtgcacgaacaccagcggcggcctcgcggcggcgccgccaccgcccgtggccggggcaggcggctgctgggcgataacctcgaggtcgaggccgcagggcaggcggtggaaccgctgcgactgcccctcccggagcgcgtaggcgcacgacgcgcggaggaggaggggcctgctcctgctcgtccttgccggcggccgccgcgcgcgcagccgcattggcggcgaggcggggaggaggagggtgagggtggcggaggcggcgggggtcgccatggccatgggtggtggcatttttggtgaggaggatgtgccgatgcggatgacggctgctctgctcgcggggttgacgacccaaacataaatactttaatcattaaaaaaattaacatatgattaattacgtttttggcaaaatttacttcagaacactcaaaaagatatgtaattagctatgggacaccgaaaaaacgtaaattggctataggatatcgcaaaaaagtagtaattagctactagacacggaatacattattttattatttccaaacaacagggagagagaaacaatcgtaaaagactaaattgccctatgagtctagccaggtcaacgattatgtgggtcaaggatgtcagcctctcttctattttcttgttctcttcctcccgacgagacacaccgtgctgcagcgccgccgacgccgtccttttccgccgcaccgacgcacgcctcgccgtcacgcggttcgtctccgttgcatgaacggagcagacacaactttgggcgggccacatgacgacgaagaactgctgcccatcggctgtgccttgcacggcactgcaccgcgagctgctggccgctagccgctgcctgcacccacgcgccccatcgcggccacgagttgccgcaagctgctgcacacccggcgcggcgccatctcgcacggccagtgcactacctagccgagcagccccgcatgacgccgaccaccgtgcctgcgtcgcagcaaggccgtcgtcgccagccacaccgcaatcgcgccgtttccgcaccacgccgcgcacgggcccgtagtcggccgtgcctgcacccgaatccagcgccggcaaccccctcctcacccaggcatggtctctgcgcacccgcatcgtgccgcccggccgcggtgctcttttctcgcgcgcactgtccttctccgtcgcgccgtcacgcagcgtcgctccagctccaccttctcgttgtgctgtgccgcactctccgcctgctccctcgccaccgccgccgcggacacccgcgctgcgcagcagctcgacgtcaaggaccagaaactggagcaaaacgacacgggggcatttcggtacttttaccattctttaacttcccgtttccatcaaaaataataaaaataatgtcaccggtgtctagtagctaattatcatttttttcggtgtcctacagccaattcacgtttttacggtatcctacggttaattacacattttttgagtgtactatagcaaattttgcctaagttttaattataataaacttaaaaagtaaatttatctgatacttaaaacaacttcatacatatgggtgtatatatacgtagttttggttgttgctaactgatttaaattatcatatgtagaataatttttttccctcttttagaattataaattatttgattggtaatctggtgcaaaggactgtttgggtcgatcaactagggcaatgagaccgggtttacaaaaccgatggaatttcgtggggttttcgtaaaaccgctagatctcggtttgtgaaaatcgatcagtattagcccgttttcatacggtattgatggaaagttatcaatttttactggttttcggtcggatttcggtaaaccgctgaggagcggtttttctttgaaatcgaaaagtttaaccatgaggcaatgagtagcttgaaatcgaaaagtttaaccctgactgttccttctctctcattgtattttacttcctcatttcaatggctaggattgttccttgctattttgtcattttatggatccaactgccattatttaacagatgacgaagaatccttgctattttgtcattttatggatccaactgccattatttaacagatgacgtggctcgtcctggttgctattgagttttactttccaattagatagatgtgattgcaaaactaatgtaaactaatgttacatctcctatatcacgtgtaaatcaaatgaatagcctacagagcttgatgttacaatacgagcatgccaaacggcctcatggaagatcgcttcttcaatgtttcggaaacgagggcagctacacaatgggatcccgttgctacgggatactttaagtgacttatccctttcctttcttttgtataggtgagattccacgtgtgctcccctggtacctggtaccatgtactagaggtaccagaggcacgatacctatccggttcctactcggtatcgcgcgcgtgatacctctgttggaattaatgaatgggccttagcccactcgaagattaattctttggaaaatcacaaaagcccacctcatgggatggcatgcatgtggagtttagtaccaccttgcttattctaggagaggggaacctccttaaaagggaggatgccctcctagccacttgaagcatgtgtggtggagagaagaggggaaacacgcgcgcgcgctcgctcgcctcgcctcgcctggcagggcaggcggcgcgcgtgcacgacgtacgcgtcgaatggtccgaaaaattggctcctcacccttgcgcagatgcagcctccttttgcagttttgttttgctgcaaattcggattcgttttgttttggaaacgttccgaaaaatccggtgcgtgcaaacggcgtggagtccggataagttacgcgcgacttatccggttcggttacgcgcagtagagatcgtgcgggcgccctgatcaagcgacccttctctatataaaccgacccgccgtcttcacgcaatatatgcaaaaatcaatctagggtttgcctcctactctgtactgcgccgccgctcgtagactactacatcccgctcgccggcgtgcaccagcgatcgggagagcaagtctccggaacctctgcctttgacgtcctgcaccgggagaaggcggcaataaggtttttgggaagcgcttcgcgcgactgctccctgttcgttcgcgacggctcgcctttctcttcgctcgcgtgtttcgtgccttcgtagacacctgcgaaaagtttcgaccaaacagccggtcttttggtcacctcggtacgtgttcaatatgttgcgcatatttgatctgttcatgttattctgcgtagtttacatgtgtagatctaatgatgcgttcatgctagttttcatctgtaatgtcatgatttatttatggaataaattaaatcattatatgcccataatctcaacaatccaaaaaccttattataggcactgtgattttactatggctggttttgccgatgcactgaggccggataaattcaccggtgtgcattttaagagatggcagattagggtcactctgtggctgacagctatgaaatgcttctgggtgagtactggcaaacctgaaggagttcttactgctgaacagcagaagcaattcgaggaagccactactctctttgtgggatgcattcttagcgttcttggcgatcgtctggtcgaggtgtatatgcatatgaccgacgctaaggagttgtgggatgcactgaatactaaattcggtgctactgatgctagcaatgatctgtatatcatggagcagtttcatgactacaaaatggctgacaaccgttctgtagtcgaacaggctcatgagatacaaaccatggctaaggaactcgaactccttaagtgtgtcttacccgacaaatttgtggccgggtgcattattgcaaaactacctccatcttggaggagtttcggtactgcactcaaacacaagagacaggaatactccgttgaggggttgattgcgtctcttgatgttgaggagaaagctcgggaaaaagatgccgcgtctaagggcgatggtgggcagtccagtgccaatgttgtgcacaaggcccagaacaagagcaaggggaaatacaaagctcagcagaccaccaacttcaagaagcagaagaagaacaacaacaatcctaatcaggatgagaggacttgctttgtgtgtggccaagttggtcatctggctaggaagtgtccacaacgcaaggggatgaaggcacctgcagggcagacttctaagtctgctaatgtgaccattggcaacactggagatggaagcgggtatggtaatttacctactgttttttcagttaatcaatctactaattggagggttgatattggggccaatgtacatgtttgtgctgacatctcattgttttcttcttatcaggtcgcacggggttccaccgtcctaatggggaatgggtcacatgcttctgttcatggtgttggcacggtagatctgaagtttacttcgggaaagatcgtgcagctgaagaacgtgcagcatgtcccttctatcgacaggaatcttgttagtggctcccgtctgactagagacggatttaagttggtttttgagtctaataaagtagtcgtgtctaaacatggatattttattggtaaaggttatgagtgcggaggcctgttccgcttttccctttctgatttctgcaataagtctgtgaaccatatttgtggcagtgtggatgatgaggctaatgtttggcattcacgtttatgtcatattaattttggcttgatgtctcggctttccagcatgtgtttaatttctaagttttacattgtcaaaggttctaagtgccatagttgtgtgcaatcgaagcaacctcgcaagcctcacaaggctgccgaggagagaaacttggcaccactagaactcctacattcagatctttgtgaaatgaatggggtgttgacgaagggtggaaaacgatatttcatgacattgattgatgatgctactagattttgctatgtgtacttgttgaaaacgaaagacgaggctctagactattttaaaatttataaggcagaagttgaaaatcaacttgacagaaagataaaaaggcttaggtctgatcgtggtggagagtttttctcgaacgagtttgacttattctgtgaggaacatggcatcatacatgagaggacgcctccctattctcccgagtctaatgggattgctgaaaggaagaaccgcacactgactgacttggtgaatgccatgttggacaccgcgggactgcctaaggcatggtggggggaggcattgttgacctcaaatcatgtgttaaacagagttcctaacagaaataaggacaaaacaccatatgagatatggattggtagaaaaccatcactttcttatttgcgcacatgggggtgcttggcgaaagtcaatgtaccaataacgaagaagcgcaaacttggacctaagactgtggactgtgtttttctaggatatgctcatcatagcattgcctatagatttttaatagttaaatccgaggtaccggacatgcatgttggtacaattatggagtctcgtgatgctaccttctttgagagctttttcccaatgaaggatacacatagtggttcgaaccaaccctctgaaataattcccagttcaatcacaccaccagaacaaactgaacatacacatgaacttgtctctgaggaggatgtcagtgaagctcctcgaaggagtaagagacaaaggacggctaagtcttttggtgatgatttcaccgtgtacctcgtggatgacactcctaagtcaatttcagaagcatatgcatctcctgatgcagactactggaaggaggctgtccgtagtgaaatggattccattatcgctaacgggacttgggaggtgacagagcgaccctatgggtgtaaacctgtggggtgcaagtgggtgttcaagaagaagcttaggcctgacggtactattgaaaagtacaaggctcggcttgttgctaagggctatactcagaaagaaggcgaagatttctttgacacttactcacctgttgctagattgaccacaattcgtgtgctactttccctagcagcctcacatggtcttctcgttcatcaaatggacgttaagacagcttttcttaatggagagctggatgaggagatctatatggatcaacctgatgggtttgtagttgaaggtcaagaaggcaaagtgtgcaaattgttgaagtctttgtatggtctgaaacaagctcctaagcaatggcatgagaaatttgacaaaacattgacatctgcaggctttgcagtcaatgaggcagataaatgtgtgtactatcgccatggtgggggtgagggagttattttgtgcttgtatgttgacgacatactgatatttgggacaaaccttgaggtgataaatgaggttaaatcattcttgtctcaaaattttgatatgaaagatttgggagtagctgatgttatcttaaacattaagctaattagaggtgagaatgggattactctcttgcagtcccattatgtggagaagatcttgaatcgctttggctacattgatagtaagccttctccaacaccttatgatcctagcttgttgcttcgcaagaacaagagaattgctaggaatcaactggaatactcccaaatcattggctcgttgatgtacctggctagtgcaactaggcctgatatctcctttgctgtgagcaagttgagccgatttacttctaatccgggagatgatcactggcgtgcgcttgagcgagtaatgcgctatctgaaaggtactgtggaattggggcttcactatactgggtatcctgcggtactggagggttatagtgattctaactggatctctgatgtggatgagatcaaagccactagtggatatgtattcacactgggtggtggtgctgtttcatggaggtcttgcaaacagacaattttgacgaggtcaaccatggaagcagagctaacggcactggatactgctactgttgaggcagaatggctgcgtgatctattaatggatctgcctgttgttgaaaaaccggtgccggctatccttatgaactgtgacaatcaaacggtaattgtcaaagtgaatagttctaaggataatatgaaatcgtctagacatgtgaaaagacgattgaagtctgtcaggaaattaagaaactccggagttataacgttggattacatccaaacagcgagaaacctggcagatcccttcacgaagggactatcacgaaatgtgatagacaatgcatcgaaggagatgggtttgagacccatgtgagttatactatggtggtaacccagtctatgtgatcggagatcccgtgaattagatcctgggaagaacaaaccattaataaactagaggagagtaccaatatatataccctatccaagtgaagatgcatatactctcgtgagctgcaaggcaggttggctatgccttaatgagttctgttggctttaattagcaaagatgttgtcctgcagagcattcttgaaggaactcacctttgtgagcttgactgttggtcgcagtctatgaagattttgggtgaatcttctaggaagcttactaaagacctaggagtatgacttatacgctccacccgaggggtagtctacagacggtctagtaccagataagactttgagtgaaacttgcttgcacaagacttgcaattcaaggcgtagtccattgttcaagttgtgagtaagtgtagcttggagttctagatggatgttcaaccttaattggtctccatcgaaccgctggtatataaacagtacattggaaaaggcaaatctcagtgggattttgagatttggtgggggattgttggaattaatgaatgggccttagcccactcgaagattaattctttggaaaatcacaaaagcccacctcatgggatggcatgcatgtggagtttagtaccaccttgcttattctaggagagggggacctccttaaaagggaggatgccctcctagccacttgaagcatgtgtggtggagagaagaggggaaacacacgcgcgcgctcgctcgcctcgcctcgcctggcagggcagggcagggcaggcggcgcgcgtgcacgacgtacgcgtcgaatggtccgaaaaattggctcctcacccttgcgcagatgcagcctccttttgcagttttgttttgctgcaaattcggattcgttttgttttggaaacgttccgaaaaatccggtgcgtgcaaacggcgtggagtccggataagttacgcgcgacttatccggttcggttacgcgcagtagagatcgtgcgggcgccctgatcaagcgacccttctctatataaaccgacccgccgtcttcacgcaatatatgcaaaaatcaatctagggtttgcctcctactctgtactgcgccgtcgctcgtagactactccatcccgctcgccggcgtgcaccagcgatcaggagagcaggtctccggaacctctgcctttgacgtcctgcaccgggagaaggcggcaataaggtttttgggaagcgcttcgcgcgactgctccctgttcgttcgcgacggctcgccttcctcttcgctcgcgtgtttcgtgccttcgtagacacctgcgaaaagtttcgaccaagcagccggtcttttcgtcacctcggtacgtgttcaatatgttgcgcatatttgatctgttcatgttattctgcgtagtttacatgtgtagatctaatgatgcgttcatgctagttttcatctgtaatgtcatgatttatttatggaataaattaaatcattatatgcccataatctcaacaacctcatcgccggtgtcgctcctctgcagccggagcagcacagcacaggctggtacctggtacctgatacctaatactagctaccggatacctggtactcatacctgatacctggtacctgatacctggtatcagtatggtactaactgcatggggcatggtgtgtggtacttggtacctatagaattggaggattcaagatgataggacaggggaatcgatactgtccatataagctggagaaaaaatcagcaaggaaatcacaagcaaaaaaaatagaaaaatacacatgaggaagggatgcaaagcggctgtgaagcactgccaacgtggggggaggggggtggagaaatcagtcagagtggaatggagtgcgagaggtacctgcaggtatcgaaggaagggaagcaaagtagcggcgtagcactggcggcatgaggaggcggattgacggaggggagtgacgatggaaggtagagggacggaggagctcgcggtcctcgtcggcaggggcgcgacgacgcgagagctcgcacgctgctttgccgctgtgccgcacgttcttgagccggcgggagcagctccgcgcgacgccgtcttccctgtcgccggtggaggagggagagcaagacgccggcgaagcaccgccgcgcgtaagcgacggcgaggacgacggaagccgctggagattcgccgccgccgtgaatggcaacgacactgatgaagtcatctagaacgccaccatttttccaagagtcacgggtgggtggaggaaaatgaagcaggcactaaacgcttctgttcagaaaaacggtttatacactaattaatcgcgtcgctatcggtaattgcaagtttaagttctcccgttacaacggaaagccgtggagtagattctctgttcggaaatctcttctttttcttttcatttcatgcattcatggtctgcgcacagtatagcgcgcgtttattgctagttctgtttaaggcaaccatgcgcaggaatatgcccaagttcaagatttgaatgcaaaatgatcgagataaatgaagacctatctggttcaagctggacgctaaacatgaagacatggtgcttactgaagcagattgaaaaataaatacaacacctatctggttcaagctggacgctaatcatgaaagcatggtgtttattgcagcagatggcagactaagagggcttctgctggtggcataacagcttgacatctcatggtcaaggacgcattactggcccttgtcatttgggggcaaagacctccagattccagctaaaaggctaccatacaccgaatggcagacgctagaaacagcacagggaactgctgtgagaggatttccaaaatgcttgctcgcaagaactacacccagcaccgaattctgcaggcaggaaaatcatgcaaagaaaatgaactgatacatgaatgatggtaagagtatgacatttgttccataggttgcaatgggaaaatgataggacgtatatgtatgcgcgtatggctttctagcaatagttcattttaataatatcctaatacaagcatgagttgcaatctcaattgtaacatggtaagctaaatgtctgtgctttgctgcggataaaaggaaaaatatcacaatattttctaaaataaataaatcatattttccatgaaatatgttacccacattctccctatccacattaattttatatgtggccatctatttagatttagttgttatgtaatattaagaagttcaaggggtaacatgtaaaaattgcagcaggagtagatgaagtggcagattcactgccaccaccattggagtccttttaaaggagtacaaataatgagacttccgttatagaaatactccatccgtcccataacataagggattttggagggacgtgacacatcctagtacgaatatggacatggattagttgcaatgttaaaacaatctggacatgtttattccaaaggcatggcatgacaacaggacaaaattaatatctaagttagaaaaccatggcatggtttagcaacaagccactttttttaattaggaagagaaggaactgtaaatttgcttgtaagttgcaaacaaaaggaagaaattacctgcatgccaacctcaatagagattgttcgtgatgaagagatatcgatgccaatcgttctagaaagaacataaccaaagaaaaagccagatgcatgcaaccaacaaacagacataaccacttgtagaccggatgatagaatggctgaagcattctgtgcgatagcattgccacaaagaacagctacagttgccacagcaatgaatggcatcaagggagaaactaactgaactaaaccgttgcagtactgattaagtagagcaccaagtagcacaggtgctaggacaacctgcgttcatgtatatccaacttagctaggagtaaggaaattcagcagtataacatcagattgatttccagcacctgagatgttgacacaaacaatcccattggatctactgcaacatattgtcccgccagtttggatgtcagaagaggagttaagaactgcatcaggaagttacaaaagcataaaaaagagcttttggagttcagtttaaagataaaaacagatctgagagtggttcattaccgctgcagcaaaagtgcttgctgctgtcatcagtaccgaaagagcaacatttcccctgccacacagtgatgctaatttgtgttaattgtgtgcattttcatgatactaaaaagaacagaaagatgtcctctcatagtgccacaaatttgtccacatattgtgcagttaataatgcatcttctaatatttttgctatagaaatttgatgcaaatgctcaatttcatagaaaatacatttgtgtcaaaagtcaaaggagagaatgaactccagtctaattcaagatacacctgaaatttattactcagctagagaacaggttattttgtttacatttctgttttatgcatcacggggatccactaattcaaccatatagttaggatactggctgctggggtccacttgacagtaagagaggaagaagacagggatactttgggtaattcaagtgataatgtggcaaatgagaggatatccccctagttaccctcaaccatgtggcaaatctgcaaagcacctcaactttgtcgaattctggcaattttccctatttcataggcttgtgtcatagtcagcgtgaaaaattatcaacagattgacacattttccaacattttgtaacaaggccatgactaaatgaagattgctactccctctgtcccacaataagtgcacttctaggattcaaaaaacattatcaggggtgggaaatgacctagatgcccctcattaaatgaggtgattgggagccaagggtgcttgggggtaagatggggagaaatttgaatgatggatgattggaaggaaaagtagtactctagaagtacactctttttgggacaaaattcaaatactagaagtgcccttattgtgggatggagagagtacattaatattttttctcattaccttgctaaatatgtaacaatgttgcttgctgtgcctgcaaagagtatttgcctttctcagtttaaaatctggcaccaatataaacaaaaagactaaagtgtgtgcacacctccagggcaacaggacaccaatatcaatccagcagcataataggatggtaagtttaatagcttgctgatgagaaatcctgacagtggcatcacctgtacataaatcattagctctagacttttggatataacatggaaacagcaaaccacaaaaacatgcataatcacaatgaagtttaaatgtacgatcctctgcactggtagtgtacaaacaaataagaattcgatatggttttttctaaatgcatagcatgtcagctgcacatgataatcttgatgaatgtatagaacatctgtccattgattcaacaaaggatcttttttttgacgaaaatgattcaacaaaggttcctacacctctagtaataggcaagtccaaaactgcagctattttgttttttaattgaaatgatgatctcatggcctgtaaggttatgaaatgaagtggccagcaagtttgggaactgaccgagtattgaagtaaaaacccagatgctaactccttgggcatcaatagtgcagttttcaggtcatctaatgtcaatgtcattcccattcctgaacaaaataaattcaactatatatcagtcacaaaattcaactaacttaaaccgccatgcacaagaaaattcagttcacagcacccttctctcttcaagaataaaattgacaacaatataaggaaaagaatttcatgtctgtcaatgaccaatctatgtataaccagccatctctgatatttgatgtttcaggtgacatgtgctaaaaattactcccctccattccaaattgatctacatatagtttttttgaggttattcctaaatgatctacatatttgtgttcatttattaagtctattcgttatttgtgcattggagtaaatggacattgatgcatgcatccatgcacacaagtacttataacccacatgcaatatcttgatttgctattggctaggaaatattggggatggtgcatgcatcgagtttgttgctaaaataaatatagtatgagagagttattagcttttcttgatcttggtgtacctatgaaatatgtagatcaatttggaacggagggagtatattgaagaaaccttttatgcatatgtagtaaagctaacacttccatcttcaatgttagaaccatcacaaacaaaattgattttttgagtgcaggcatggtgatacaacaacacagaaggaaagtagaaactactaagtagtagaggggatgaatagtacagacccagcatggtaaaggaaatgccgacaatctgggccatgggactgacccagaggaaggccggtggccgccaaagcgcaacggcgcaagcggacgccacccacactgggaacccaagcgacagcacctcgccaacctgcaaaagcagatcccgccaacctacaactccagcctccaatgcaccgctgccacctcctggtatcttggagggcgccggatcagcagccgcatggcacctgctcgacggaatgccacaaaggtgtcgaaccgggttgctgctgctgtatcggatgcgaaggcaggtgacagggagagatgagacggtagctctatgacgggtgttgtgtgtactgaagaggtgaaggcgcttgtcatggtggatcggggtgcggtggggagcagccggcggccggcggaggagaggcatgacgtgggatgttgacctgtcaccttcaacgattactggaaacaaatgtgagtccaagattcagcaaagtatatgatataaatagtgaacatcttagagaaaatagtccatgttcaggttaagcattctcatagccacaaatgcaatgcataagtagtctacatgctcatttgctcgtcccgtcacatatagcatggttcaaatccaatgttcaaacatatgcaatcaaccaaccatccctcaatccctggattcaaatggtaaaaaaaaatgctcctaatccaaaatcacagcactacatacagtaggtcagtagcagtctagcaagacaatagttagtactagttacctttggccgttgggagttgggacttgggcgtctcggcctcttgggggcggcggcacggcgcggcgcggcgcggggtggattggatacgaggcgcgacggcgccacccaaaagacgcggcgagccggcgacgggtgacgggcgaccaccgacggcgcggcggcacgacgcgaaggcgggagggattggcggcggcggcgtcacggacgcacggcacgtcggcgtctcggcgtcggatgggcggcggcggcggcgcgtcttcctgtcgagcgtcgagaggaggtggagactggagagcgagtgagcgaccggggatctgggaatggggaggagttgggggcaaattctatttttggtctttctttttttttctttccctaattgggcttatttataagaatggatatttttttaaagcatatactcctactaatagtatatttataagaatggagtatattggaacatatcaggatataacatatcctatgtatacaatgtgcacaccacatgcacaccaattagcaaatatcacgaaaaattctaaaaaaaacatttactcctaatagtatacacatatatgcaaagtctcgtattcaaattcattatattttagccgtaataaaaaattaaaaatttgatagtttaaggcgtaaaaatttgtcagaattatatcttttttgttactgctaaaatataataaatttgaatataagattttacacgtaggtgtaatactattgaaaatatgtgtccaattttctgcgacatttgctagttaatgtacactggaagcttgtatgcataggatatgtttacatgtacatatgaaatatatatacttcattttcacgttgctgacttcatttaccatgtatcatgttcatggaacatcatgaaggaataggttaagccctctttgtttacgtttataagtcggcttatgagttaaaaagttcaagtctaaacaaataagcagttttttcgtttggttttttaaaagtcatcactcttacactatgaagctaaaagctaggttggagaagcttttttagcttatttgagatagaagtatgacaccacccttaaatttgggactttaaatccaccagcttataaatcatataagccaaaaaaaactaatataaagatttaagccaataagtctaagcctaaacaaagagaacctaaatagacgtcctattttagagtcttgttcttattggagaggagacgtaggaatttggtcaatgctaggagcttgctcttcatctttgtcatcagatgattgcacaaccagtttatgtttctttatctcggccttcttcatgctttgttcggaggccaacctattgttctcttggggggtggggggttgcctactgaaggtcctctagcagcctatccggcgccgctaatggttctccttggcgagtgatgagtaggcgtaggagggtcaaagattataagtttgttttcctgcacaagtgaattttgatggttcatatcgataaaaccgttgaaacatttggattatagacagggttcaaagctgcatactggaggaggagggttaaataagtgaaagggcaccactaggagtttgtgagaaacatctacggtgatcccagaggagaacaccttacatcctcttgcatacgagttcatagcctagttattctggatcttcttggtttggatccttttgaccctggtattcaaatgttgacttggctctgtctttgattggagccagtcgacacttgatgaagtgtcaagtgacttgttcttctactataccttttctcatttatggcatttattttggagaggaatcctttctgcttcggctttatcctggccttcaggcatggaattccaatcgaagttgtagattggaggaagaccgatgaaatcaaggcaagcaagaagagggttggagatgtagaaccaattttgtgccaaccattgttggtggacttcaagggaagagcgagataaaaatttccggaggtcaccacacaactagaatttggagctgcctagtacacaaggattttctttagtgggtcgggttttcagagagaacatataccggaagaggcagggccggctctacatattttagggccctaggccaactccatgacatgggctctcaggcatacactctcactatatatacacatatttgttttgaaacactctctctctatatacacatatgcactttggatttttaaagtatacttttaaagcattcatccgctaatcacgctgaaaataaatatcgataatatcctctatatatgttgctaaaaatacaaaaagagcattaaaatggaattactatggttaccttgaattcttgactaaggatcaagctccagggacttcattaataatacttgacaaaagataagatgacagacatccatttgcttctcataaaaaaatacttcttcgagcatttcttgatgcaaaatcattaatgacggtatcgagaccaatattgtccaagacattcttctcaatgcagcacatagccgagccatttaatctttcttgtgacatggttgatctcaaatagtttttcaataactttaattttgagaagctttttttttcagctgaggctactgtcacaggtacggttaagatagattcgataggcaactgaaacatttggatagcaatctgcagctgtaatgaattcaagaatctcaggtacactatggttgcagcacaacagtgcgcaagtacctgtaaattgaaacctgcagacactctggaagttgaggcagattcatgttgtgtcggccgatgtcgagggcgaacagagtcaacagacaaaggcataaagctgtgaagggctaaatgctgaagggatcgccaacggtccggcgtaggacgaacttgtggaggcgccatggagagcgctggaggcggattggcggagactgccgccggcagaggagaggagatgagaagacaaaagtttggaactcggacggtcgcgtatgcccggcgcttatgcgggcaacgattcgaccagaaacttgtatacatgcatatggtatacctaatacatacctaggtctggacccctacttttcctaggccctaggccatcgcacttcttgccgtagcccagagccggccctaagaggttaaaatgcgtcacgattctaagaaatatctcgcacaaatgaataaaaatggcgatatggagaattgaattgggatttagataataaattttt

SEQ ID NO: 28328 - DNA, 1321 bp, Oryza sativa
caaagttgtgtatggattgaagccaaaatagcctaagttcaatattgaaatgacctattttcttaggtatgctaaaatttggcttcaaaccaaatagacataaaattaccaaatattagtaagcctaatttatgcctcataccaaaccagcccataaaatactcctctcaattcaaaacttgcactaaacggccaaaatcttccatcgtatagttacgtcacaccaaacacaaccgtgcaaaaatcacccaaaaaaaaaagagaggaaaaccccacattttgctccgctccccccaaaaaccctactccatcggcggcgatggcggagccagcggctgcggcggcggcggcggaggccccggcgacggtggggcaggcggtgatcccgctcgtcaacaggctgcaggacatcgtcgcgcggctggacggcggcggcggcggcggactggagctgccgcaggtggcggcgatcggcgggcagagcagcgggaagtcgagcgtgctggaggcgctcgtcggccgcgacttcctcccccggggccccgacatctgcacgcgccgccccctcgtgctccagctcgtgcgccactccgcccccgaggagtggggggagttcctccacgcacccgcccgccgcttccacgacttcgaccagatcaagcgcgagatccaggtcagccctgcagcttcgcttgtttgcttgcgtatagtactacttttggcgcaatgcttgagactttgagagatctttaatctgtgaaatgatgattgcaaggtggattagcttgcaatccagaagaaaaaaaatgtaggttgtagtttgcagttttagaaaaagggtctgttcactttgttgacttgatacattaccagcattagtccagaaaaaaaggatactccctccgtttcaaaatatttgacaccgttgactttttagcatatgttagaccgttcgtcttattcaaaaaaaaattgtgaaatatgtaaacactatatgtgtacatgaaagtatatttagcaatgagtctaatcatatgaaaataataaataattacttaaattttttgaatacagcgaatggtcaaacatgtactaaaaagtcatcggtgtcaaacattttgaaacggagggagtattatggtaaaaaaagcatttgggctaaatttagtgtatggagatcgtttggtacctttgctttgttcactgtattgtactgggcagtgggcactgatactttcgcgtacttataataatccttcttttttttggttgggggggggtgggtcttgttttatgctttcgtgattcttacgagatgaat

SEQ ID NO: 28329 - DNA, 1308 bp, Oryza sativa
gaattttgccaccattattaagccaatcctactaaagatttagcaatgttgtcattttcttaaaatttggaattgctaaattttggtaaggtttattttggtactaatctgagcaaacctttcagtttggttgctcattgatggctatatatcccagcttattctcaaacctggtggctcgcttgattggcagtcctgtaagctcatcttgcatacaaattttggggtactaaggctgcttgcatgcaccaagaacatttcttcccttatgtgtaagcttaaaactgaagattgtgaggtgttctactacataataagaaactttgagtcaaaaaacataataagaaactagaattagatcttgaaaacgatcgactccaatagatgctcatcatgagcttttttttttccctctattccaattgattggaagtatctggcagcactacgccagagtgacttccgaagcgctacggacgggacagctaacgtcaactacatactatgtcccaaaaataaaggactttaccaatacatatacattctcaaaatcttttatagtatttaaatacaaccgtttaaatttccaacgacacactacatattgcttgcaccagtctaccagttgagcatgaccatccagagggaaaatgcacaatattactcctcgagtgacagtcgttctgggttggtaaattactgcatccattcttaataactgactgtagtattatttattttgaaactttaaccacttctttttaaaaaaaaatcataaatacttcaaatgtctatattaccaaagtgtgtagtgctcacaaatataaccaaacaacttttcgttcatcatgatatcatattcgaatcatttaaaactaatttttgttcaaaataagatgccaatagtcaacaaagagtgttttcaggctttgtatttattatctaaaaagagtatttttcgtatttatcatcttatttgaagcatgttttacataagaaccaatacacgattctatagatctgcgatacctcatttcactatacatataagcagagttgagatattagtcactagtgaaaaaattgaaatgaatattatcttcgcctcatacataccaaatactctctctattcaaaaatataaagattactcgcattcaaaatttatgccacaatataagcatttcttagtcacttcatatgcacagaaattcatacattttcagcccaaccataagatacttgggaggggaatctaaataattcaaaactcataatttactcactgatatgtttgaaagaaaatat

SEQ ID NO: 28330 - DNA, 7203 bp, Oryza sativa
cgtgcccaagcacaaccctgtgtaccccaagttctcgtccttcttcaagagggtgacgattgcgctcgacccgtcgctgtacccggagaacccgctgatcatttgggagaatgcgcggtcggccgccccacaggaagggttcgaggtgaagaggaaaggggataaggagttctccgcgaatatccggctggagatgaactataaccctgagaagttcaagctctcgcagcctctgatggaggtgctcggggttgaggtggacactcgttcgagggtgattgctgccctctggcagtacatcaaagcgaagaagctgcagaatccaaccgatccttcgttctttatgtgtgatccacagttgaagaaggtctttggggaggataagctgaggtttgcgatgctatcgcagaagatatcacagcatctctctcctccgccgcccatcaacttggagcataagattaagctctctgggaatggcgcgcatgcgagtgcttgctatgatgtgattgtggatgttcctttccctctgcagaaggagatgtctgcatttcttgccaacactgagaagcacaaggacattgaggcatgtgatgaggtgatatctgcttcgatcaagaagatccatgagcaccgcaggaggagggcattcttccttggtttcagccagtccccagtggagttcatcaatgcactgatagcgtctcagagtaaagatttgaagctgatcgcaggagaagcaaataggaatattgaaagagaaagacgtgcagacttctataatcaaccatggtaagctcaagcaaatcttaaggctttactcattgtacttcctgcttgaaaccatatatcaatgtgctgactaataaattgttttccattccacaacgaaacagggttgaggatgctgtcataagatacctgaaccgcaaaccggctagcggtaatgagggcccaggcggtggtgctggtggttcatgaggaaaggggttggtattactgtagtgccattttggtgtagaaacaagctatctgttatgtactagtaaaaattcagatatgttagcgacaaccgatttgtttgctgctgtgaatgatcttggcaggtgtacctccattgtctgtccaaacgagttatctacttgtatgattatgtgataagtgatccctaactacggtggcagtatgaattgtcatgctaattgctaaatgctgaagggaaaatgctctgttctagttacctaacatataggtatcatatgtgggcacaagttttctctgtatgatgctgtgtgtggcttatcatttgtcccactggggaggttgtggagggggacctgagactccgagaaagctgtatcttttgtatttgaacatgcttattggagggaaaaggaaatggaaagagtccctatctttaagtgcctggaggatcaagtctcttttgggccagcagcatatgttctctcttttgctggatcatcgtgcctgtccactgttggctaacatgtgtgcatatacttgtggtgtggacatttatgctgaaaactgaaaaggcagtattgggctgtggtgcatttgttccctgctggttctatgcctgatgaagtgatgattggttgccccatttgatactttggtctgtcatatcttcatccatgcttggttgtcctatgtttggccactgcttcctggatctgtcaggtgttgtgattccagttgagttgagtttagagggcactaatcatttcactgtaaacactgcaggcctgcaatttcagagctgattgcaaggattcatgtgccatatctatctcccctcttctgtactgtagtagtgtgtaatttgagctatggattcagaatcatcaaacagtcggcaatggttgttgagcaatcgcgactacaggccgttattttatccccatattagaactatagaatagaataaacacgcacgtacttttcattgtaaactgtagcatcacggtcctaccaatattctactcctaatcacgaaatctaccaatattctaactcctaatcacgaaatccaggatctgaaactctgaatccagcaacaataatgaaatctcaagctctgaactctgaagcagatgtggagaaaagccagctcgatgtgtgtacgtactcctatgtaggagtatcaaatgtatgattgattgaagccgtgttctttgttcttatcctcttctttcgatggagtgcatattcggacattcagtttgatgtcacgggtgggcctctttttcgctttggaattgcatcaaccagctcagaatctgaacgaaacatgccaagaagaagcaggcgcatattacaaatggatggcgattttctctgaatctgccgcaactttgaggcccggtttagttaccaactttttctttaaactttcaacttttctattacattgaaattttcctacacacaaatttctaatttttccatcacatcgttttaatttcaatcaaacttctaattttggcgtgaactaaacacaccctgaacagctgaactgaattcgcgctcgtagagagagagagagagagaggggcacatggaagcaacatgtgccaaccattgcatcctatggtgagttaggtttagattgttactaatgtaagactcggttgattttattaccgttttcaaactagagttggacaaccgggcgaatcttttttgtagttgtatgcagcaattcttggagagatatacaaatatttgtgttgaactttgtttgtttatagcgttgtgctttgggtactacattttcctcttgtttcatcctaacacacttatgataagatcctttataatgtagtaagattttttaaagcaattttaacgggaactgaatcagtattgtgaatttttttgccataccactcctgtgtttcaagggaaaattaagatctatactatatttaaatgcatccccttgcagagtcaagtgtccctaaagtccattttcagcacttgaagtttttaatagcagatcagatgtagcttctgttggtgattactccctcagtcccataaaaaacaaatctagggctggatgtgatatattctagtacgatgaatctggacatatgtatgtccagattagtagtattaggatgtgtcaaatcccgtaataggttggttttttataggacggagggagtacgcattgtgtgtttttttctaccctgtaatttcaattcataagctgcaaattgacctaaacatatgctttcctctgttataaatatttaacgttcaagataagaattattcaaaatattaacatttcaaccataaaaaatatctcacatgtttagctcaaaaaaaaaataaactgcatataattacctcgaaaaatgctatcataacagtatcatgaactttactatactccctctgtttcaggttataaaatgttttgattttggtcaaaattaaattgtttcaaatttgtctaagtttatagacaaatatagtaatatttataatactaaattagtttcaccaaatcaataattgaatatattttcataacaaatttttgttatgaaaatatattcaattattctactttttctacgtgttgaaaatgttactactttttttctacaaacttttttgacgcgcttttttctacaaacttggtagaatttaaagcggcttgactttgactaaactcaaaacgtcttataacctgaaatggagggattacaagattaatggtaaaaataatcttaaagatttgagccaatcttgttccaagatgtcacggtaggaaatcatcaaaaatcataagattggatcagaaatcgcatgctttcctttcttctagtatcatttttcctccctttttatttattttttcgaacaatccgaaatccgatcatcattagctggttcccttccccatatcgagcggcttccttcttcttcgcttcctctcctctcttcgccatttttctactgcttttactgcgccccaaatcaacccaccctccgcggcggcggcgcgattactcccgtgctcgctcacttaaccctagctccctcgccgccgccggcgatgtcggcgccgcccgcgccgccccatccccagccggaggagctgaagttgccgaggaaccccccgccccggcgggaggagtggggaacgacaaggtgctcgcggcggcgcagcacatcgtgaagtcgctggccacgtcgaagaacgccgcggacgacatgatccgcatcctctccggcttcgaccaccgcttctcctccatcaccgccgacctcttcccctcgcccttgccgtcgtcgggcgccgggcccaccccgcctccgcttccgccgccgcggggggcgttcgaggccgcggagaggctcatccggcagtgggacgcgacctcggagctgctggtgttcgagggccccgagggggacgtcgccgactacctcgaggcggtcgacgtcgccgtcgaccagctgctctccggggtgggggccgccgccgccgacgccgaggccgaggcggcgggcgtcgtggtgcagctcgcgatggcgcggatggaggaggagctccgccacctcatggtccgccacgcggtgccgctggacgcgagcgggctcttctgctcgctgcgccgcctctccctcgagtccatggacgacctcgacacctcctccgagttcgatcccatcaccccgcacagcctggagggcggcccggacaccgctcgcagcgccagcctcgtggggaaccccttcgacgaccaggtgttcgacctggtgcgccctgaggccattgacgatctgcgctccatcgctcaaaggatggaccgcgcggggtatgccagtgagctcgagcaggtctactgtggcgtccgacgtgacctgctcgacgagtgcctcgcggtgctcggggtcgaacgcctcagcatcgatgaagtgcagcgcatggagtggaagcttctgaatgacaagatgaagaaatgggtgcatggggtcaagacggtcgtgcgttccctgctgaccggtgagcgccggatctgtgatcaggtgctcgccgtgtctgatgagctgcgtgatgagtgttttgttgaatctaccaagggttgcataatgcagattcttaactttggtgatgctgtggcggtgtgctctcgctcgccggagaagctctcccggattcttgacatgtatgaggcacttgctgaggtgatccctgaactgaaggagctgttctttgggaattctgggaatgatgtaatctgtgatttggagggggttcttgaaaggcttggggacgcagtgaagggcacacttctcgagtttgggaaagttcttcagcaggagtcatcacggcggcctatgatggctggtgagatccacccaatgacacgttacgtgatgaactatcttcggttgttggttgtttacagtgatacgcttgacaaactcttgggtgacgattctgctggagatgttgatcatagtgatacgcatagaggtggtgatgatgaggaggagtatttggagagcttgtccccacttggacgacatttagtgaagctgatatcttatctggaggcaaatttggaggaaaaatcaaaactgtacgaggatggtgcactgcaatgcatattttccatgaataatatactctatattgtccaaaaggtgaaggactctgaacttgggaggattttaggtgatcactggatacggaggcgccgtgggaagattcggcaaaattcaaagaactaccttaggatatcatggactaaggttttgtcttttctcaaggatgatgcacacggcggcagaagcggaagtggaagtggtagtgggaatagctctaggatcaaggagaaattcaagaacttcaacttggcctttgatgagatatacaggagtcaaacgctctggaaggtaccagatcctcagcttcgtgaagagctcaagatatctatctctgaaaatgtgataccagcataccgtgcttttctggaaagatatggtagtctagtggatagcggaaggaattcaggtagatacatcaaatacaccccagaggacttggagaatcagctgtctgatctatttgaaggttcactagggcctgccaaccattctaggagaagatagtagctcccatttgactaaatttggtgacaggtatgcttttgctacaagggatgctatgtgtccgaactgctgagtcatcacatggactgattggtgccttttgagtttagattgtccccttggttattacaatattgtaatactatacaaggatcccttcgtttttctccatcagattatatgtaccaagaagtgatgtacatacattgctttttcagtgtgttcatatccttgcacacttcatttccatgatccagtacctttgcactttgtagggtggccagttcttggaatagatcagacaagtaataggcatttgttgctggagcaatcttatctggcaagatactgatatgaattaaatacatttattgtcgattctgaaataaacgtaattttagtccatctgtaggctattgctaggaggtaatgatggtcttttgataatattctttgagtgtgattcatacatctgcattttggaaaagctatctcatttttttagttatattataagaaatagcattttgctatgtttacgggatctgtactcagggtgttgcacattttaagttccttttctttttctgatcatcttacacagtgttcttgttctagccctcttattcttatttaaaatgaaaacttgttattaccactgtccagactggtcaacatctaatttcatactactatgtcctttcacgttatcatttgaaaaggctatctaattaatacttgccttatcccaatactgttcataatttacattttgcgagtattattgaagtttctttggaatgtacaggggaaacaaaaagaggaatacacatccctggtcctcattagttggatgtcaattagtcagcaaaatttacacgcgtgacaactaaagaatgaaatatgaccttctatctaaacagttgcatgctaagtggattaaattccatgcattttccagctccagaattatgaaatgtaccactattagttgcttatatcaagtggctttcacatctgtgccaaattcagcagaacact

SEQ ID NO: 28331 - DNA, 7106 bp, Oryza sativa
ccatcagcagtctccaggtaaagattttgatttttggagccatacatttatcttttcttacctgtttcataatcggttttaacttgttcacttacctaggcatcttgaggagcttctctcttccagatttctttatatgcactttttgaattacattctccgttagatgtgaatttccagcaaagcctgtctgctatattatcttggataattggtacctgcaaaattttgttgactacctgttgctcaaagacggagttcaacttctgtatatcctagcatttgtcttatgtccagagatctgcaacattattaggcaattgaacttgcatagagtctagttttaagaaatcatggatatcagcatttagatcacaccaaggttagctccaaacagacacacttccatcagctaactgccaagacacagaatccttgagagttttcctgagattcagaatcgagctccaaaagatagatttgggagaattcttagaggctctccagaaggaagtatttgggaaatatttacctttcaggatttgagataccggctcatcaagcttactgactagtctccaggcagcatttagaatcaggctcctgttcgccatctgaatatctcttatacctaaaccaccatcctgaacaggtttgcaaatatcagaccaggatttaaggcagagaggcttcttgtcctgaccctccctcactcctgtccaccagaagattctgatgatagaagtgagtttggcaatgatctttttgggaaggagggtggtagccatgtaataaacaggaagggaggcaaaaacagttttgattaaggtaagcctaccagcatgggaaagtttgttagcctttagattagtaagcttggctttgaatttatccacaatgaattggtagacaaaaatttttgttctattagtgacaaagaggggatggcccaaatgtttggtattggaatcaacagaagcaacatggaagatggttttgatggaattctggatgtaaagaggagtggatttgctgaaaaggatggcagatttactccagttgggagtttggcctgatttgttgcaaaaatcctcaatgatttctttgatttttcttgcttcgatctcagtagcttcacctgtaatgattaaatcatctgcataaaggagagagtgaatggccggcccctgagggctaagtttaatgcctttcatctgattattaaggagatcctcattaagctgatcagaaagctcattaagagccaacacgaacagataaggagaaagaggacaaccctgtctaacacctctattagcattgaaagcatcataagattgaccattaaaggtcacataaaaggaagaggagctgatgcaaccctgaaccaaattgatgaaattagagtgaaagcccttctttttcatagcagaagcaatgaaatcccattccaatctatcaaaagctttggagagatcaattttcagcagaaaacctttgtttttgaaagagttaagaccaaaggaatgaacaatttcctgggcaataataatgttatttgcaattcttctcccaggaatgaaggcatgctaagagttaaagattaggtcaggaagtttacctttgattatgtttgcaatggatttggcaatgattttgtacatcacattacaaagactaatggacttgaaatctgcagggttagctggcctgtttttcttaggaatgaggacaatattggttttgttcagttctttgggaagattacctgtgttatagaagtcttcaacgagcttcatgacgtcatcttttatccatccccacgccgccttgaagaaggctacattcatcccatcaggctcaggagaggcattgctcttcatgtttctgatgatttgccaaacttcctgttagtccgggcattgccagtccatttgggctgggtcatcattacccgaagaatatgtactcggcctgttagttctgtctgaacaaaagagatcagtgaaataatcaatgaaaacattagcaatgtcatcagggttagtaaccaaatgattattagacatgatagaagtgattctatttttccttcttctcttgatggcggcttgatgaaaaaatgaggtgtttctgtctccatccttgacccaatgcttcttggctctttgcctatgatgatcagagagcttctgtaggagagagtcgtgtttggcaactagctctttctccttctccacctgctgatgtctgtcattggaagactaaatgtctaggatttcttgttcagtgttactacctccgtttcaggttataagactttctagcattgctcatattcatatagatattaatgaatctagacgtatgtgtgcttagattcattaacatatatatgaatgtgggtaatgctagaaagtcttataatatgaaacggaggaagtagcaatttgctgttgaagaggtttcttctttttgctccaagataagagattgagacctaatttctacgcttttaaaacaaaagaaccattaattttgtcccagctatttttggcaaagtcatgaaagtcattctcagttagccaccaattctcaaacttaaatgaattttttggttttctgtgagaaggattaagtaaaatcaaaataagagcatgatcaccataaatgaaagggagatgataaatagtagtattaggaaaattagcacaccattcaacattagccaggcatctatctagtctttcataaataagatctctacctgaccttttattagttcaagtgtaagcagggccattataacccatatccatcaagcccacatttctcagatgattacaaaacatggagatacgattaagatcagggagagcattaccatacttctcccaagggttcataatgtcattcaggtcacccatacaaatagtagcacggtgattactttgattaacaaaactactaatctcctgccaaattctgctagaactatgatgagtaggatcaccatatatacacaaaaggttaaataacatgagtggcctgggacctgagtctgccacttcagtagcatagttgaaaagaccggaccagtgagtgacccagtcaacctcctgttcaccggtccgatggttagatcgatggctaattgatactccatccgtaccaaaatataagagatttagaagggatatgatacttcctagtattacgaatctggacaaagagactgtctagatttgtagtactggtgttggtgacatgggggcgagggtatcgtgactagaggcttgggtagccgcggtcacccacgtggcctgaccccctcgggggggtcgggcccgaggatgatgtggccacccctccctctgtctcccctaggggtcaggccgcccctgtttcggccccaggggctggggcgccccgaccccccgtgattttggcgccacgtgtatgggttaggtgagcacagcggggctcacctaaccgcatttattgcgggttggacgagcgcgccacgccgcatttaatgcagcgcagcgcacgcttatccggtccgtgaccggtcgcagtgtgtgaccggtcacagaccggtcagatcgcgggttaggtggcaacaggcagcctgtcacacgccttgccccgtcccgtcggaatgatgagagcctccaggcactcgtccctagccggagccggcgtgctaactcctggagttggtgtgtcagtcccggccagattcattccaggcttcatcgcaaccatggcaaggaagtcattgtatgaagaagggcagacgtgcggcatgctaaactgacgcgcggtgaacaagaatgaccggtctgtgactggtctgacgccggtcacgtcatcggcagacaaccgtgttcccacgttgcatctgcttccggcggagtggaggtagatatgacccatcccatcggagggtcattcggacagcggccattgcaaatctccacccattaatgaaggaatgacagggttatcccctatgtcaggcgagtgacggcgctgggcctcactcaaggacaagttgtgatttagcttccaggcgaaggcgcgagccaagtcttggtcaagatagggtgggtccccacccaaaagaagagtaggtagaagtggtgcatgtggtatccccttgagatataaaaggaggaccttgcccaccgaagaagggggactctcagacgacactgaggatacctgaactcgtagaggagagaaagaggaagaggggttctagagcctgaactctcttgctctccggctctctgtaactccttcacacacagatccaccagaacacaggagtagggtattacgcttctcagcggcccgaacctgtctacatcgcccgtgtcttgtgcatttgctctctcgcgaacattccacagatcgagggtgaagaacctcacttagcgcccccggccgaaccggcaaaggggggcctgcgcggtctcccggtgaggagccccacgctccgtcaactgggtaatgtcacatctctccaaaatacattatattatgagtcggagggattacaaatgctttatatttccatatcagcactaacaacccaatgcttggatcgctacaggagtcaacttccaacccacccacttgagttcaactccccaccattcccccttttgttggtgatttttgcctaaatatctagttatttcgagcattcgagttaaatgggccttcttccggcttatttaaacaattcagatgtctaggccagtccgaccaagaccaatttatcacggttcagtaatcaatgccaactatgctcagtagtaatcaatgccaactcgtctctctcctatctctggcgtcaataacaagagtattaatttactggaaaagctacaaatctatcaacagttttttctctaaatatatttcgatttctagtccattgatcttgtgttaagatccgtgctagttgtatggagaaatagaaacacagcaaccacaagtgtggggattcgatcccaagaccatgatcacacacatcacttcttaacaaagtgagcaatcagacagtttatagaattaaaactagagtgaattccactttggactaggtttagttacatatgttacaaagtataccaggcataagtaagcctttttaactagaactaggtattgttaccaattttgcaccttgtaccggtggcccacattccagtagatctttctccttcttcctcctcaaaactccctgagcccaagtctatccataccggtgagcttgtctcttcagccagtagaagcaaatagcagccggccagctagccctctcgggcccactccaactcctgttacacggccggctgcggcctgcagaagtgccaggagcgcacaagacgaagaacaacgagattgaataattgaatcaatgcatgcatatggcatgagaatggtgcaggacaaccactgcattatcagctctcctccaattgtcttggacttaattatttccttcaaattgcaaatcgggagtgtcgcagccctcagcggaggtcgagcgtggctgcagcgctagtagagtttgagcgtgcttagtcttctcatccagcctctcctctctccacctcaagtttgtctagagcatctagaataaatggagatgaggcaggatagatcaagcgtgcgtcggcaggagttgttgagaacagcggcagtggaagaactggcccaaagtgaaacattaatatagacttccctggtccaaagtgaaaacttagtcctatctctagtccaagttacaatttagataaaaaatagtggtccgatatgaaatttactcttaaaactaaaattacacctaagttagttacatagcaattacagtataattatatacaaattatatttgaagacgaaacgagcatgtagttttcgagtaattgtgggacacatagctggagaatttatttatttattgagccgtctgtaacaacaaagtttgagccgtacgtacgaaagcacgcacgcaagtgatgcgagttggcgcgacgggcgacggcggtcgatcgcacaagcttttggttttgcttgaccggccccgcccggccgcacctattcgtacgctggtttggccgctgaaaacttccaaaagaaccaagctaaaggctaaagccgcttgcacgcacgtgtagacaggagaccacctttattagggtatgtacgatggttatcaacagtggtttaattctttgcattgctaattaggaatacctgttgtctgttgacatggaagaaagagaaagaggaagagacaaacatcgttgttatacataacaacggctcttaatcgagatttctaatgggtgaacgatcgttctaggcgattggtttttttttctttttctctcaaagtaagtttatacgcctaaagtttacacatctaaaatttatccacctaaagtttgtaaagcgaatgtttataagtcaaaagtttatatacccgattcaaattcaaatttgaattcaaatattttatattttcctcttttagtaagtttatacacctaaagtttacacatctaaagtttatccacctaaagtttgtagagcgaatgtttataagtcaaaagtttatatacccaattcaaattcaaattcggattcaaatattttatataaaaataatttctatacataaagtttatgtgtgcaaagtttacggtataaagtctatgcacataaatgagagtattagatttttttttctaattttatttactaactttgtgttttttttgaattttatgatgaaaggaaagaagggaaaggagtatagggggaggggcgggttgatcgcttccagcgatcacccacccattagcctcatccgctcttgatcactataatatagaaatatggttgcatgagggtaaaaaaatggaaagaatattaagaaaaggaatattttttgagataatgattagagtttttatcgtcttaactattgtaaagacatggtctctaaataatcttatagcattgtttaagagaccatagtcgtctctaccattgaacaaactcttaagctttctttgatatac

SEQ ID NO: 28332 - DNA, 16915 bp, Oryza sativa
taaaactatatgtttacataaaagtatatttaacaatgaatcaaatgataagaaaataattaataattacttaaattatttgaataagatgaacggtcaaacatgtttaaaaaagtcaacggcgttatttagggacggagggagtaacaattaagcgtgtcatcaagcgacgccggccataagctggctgctatatatactctacaaacacatgtatggtcagtatggatagccaattaagcaaggaataaatcgaacgaatgaataccatgggctggactggctaaaggttaggcgatgatctgttagctcgatccttcggtgatctcctttatttttgctaaagctggtacgtgcgtgtggtgcgtactactgaccggtacacctgaccaactcaattgcctttgttcccttggctgagttgcagtgcctgtagctacagagtacagactgggacaatggtacggaagcacaggagatcgatgcgcctcttgcgagtgcggctgtcacggaaagcggccataaacggccctcagaataaattaatcttgtataaggtatgatatattttaatacgtataaggtataatatattctaatacgtttttatccagatttatagtactaagataatttagtctgcatactgcagcggtctgagcaaatgctatatattacacgtaactgctttttaatagctgtagcccctgttttgctggttgttacagacgttgcaggggctgcgaggaggccagttgatgagctcccgaaaaagccgcatccctccattcctgtcgatacaaaggaggcagccagcgaacatccatcaccgccttgatcgccgctgcctggaaggcatcagagcggtcggggatgcggatttaggaggtgccgaagaagaggagatcggtaacggtggggttgaaaccaagataacgagtgggtgcaagccgactataaggaactgacccctcaatgtcgacgtttgcgagttcaggggccatacctcgtaagagggtcggacgacggcggcacaagctatgggctcgaggctcctcatcctctcgcctcgacaccgcggcagttgtgaagactataatgtgataaggatgggcggaggttatgacaacagggagggcgtgacctgatctggcgagccccgtcctctttggtgttgggagttggtggggccatcaggaaaagctctgggtgggtggcggtggagcagtaagcttgagtggtgggtggcggtggaacagtgagcttgagtggtgggtggcgacagagcgggagctgatagggctgctacgtccctgtatccaacgttggcctgccaccctggaggtcattggccggccgttccggagttcgttgatagggagaagaagaaaagaaaagaaggaagaagatagaaaacatgacattgctagcaaggttctaattttacaaaatcagcatcagctaactgatatcgtgaataatataatagtagtttcataaatcagcacatctacactgacatgaattcgattaagcctaataatataaaatagtcggtggacagcacgcaactacacgcacaacacaagagtccaaaattattcgttcctgcagccgggtggctagctatagtaggttgtggtatatgcataccttaagtgctcctcagatcgtcgccggcctgcatgcaaactttccagccaaccacgcgcctatacgctcgcgcgcacgcactctcgatcggtgaactttacggccggccgggccggccagccagctgcttgcattgtgcatggtcgtagcaacagggaagcttagcgacgaaggctaagcttagcttttctcataaacagtgcgtcccaggcagttagggagtccgaatcatgtcacttcttgcccttgcaaatcgcaatcctctgtagccatgaacagtacgagcaagagcacgtacgatgaaatttgcgcagctcagggtttttttttttctgaaaaaaaaacatcgtacgaacacacgcagacgcttgattacaatgcacgcatactcgtctctatgaatgcacacacgtacatcatcacaccatatccttataaatacctctgaatgactagagatattaacgattatctgtaggattataactgctcataaattttacaggatctttagggaatttgtttcaatcatataaaattctcataattaaaaaccatctgttccaactgtactgctgcccttagctttctccttcaccatatttaaggttttcggcgaattggctgcgtacataactcaacaatatggtattagagcaaaatatctttagccttggtgcagttagatgtttaaaacatcaaagaaaaaaggaaaagtactccctctttttaaattactcatcgtttcagctttgtaataaatcaaatatttttaactataaacaacattttctataaattttatatagtttaacatcataagtttatgttttagattcatcgtaaatattttactttcataatttgttaaactatataattaaatttctagatattgatggtaaatgttagaatttctaaaagcaaaaagaagtacaagagatatctctatgaaaatgcatgataaagtagcagcagctagctagccagcacacaattgtacaaagcaccttaattgataacgagcgcacaactgcttatagatatggaaataagcgcacaaacccacacacagattattaacatcatgctgtacatatacagtaccagagtacgatatcaaaaaaaggacaggctaacatgcacatcaccgaaaaaaaatcgaaagcacaaacatgggaactaaagcgatcccaacacatgaccaaaatcatcaataaccacatcgacaaatattgcgcacacgcacgcacgcttaatgccttgtttacatcaatcccataattgggggcttaatttgcaccacacacacaatgttagagcacaacacatacaccatcacttttactctctttctgccttaaaatctcaataatctctctctgtgtgtgtctctacaactttgcatgcatgcccatcaaataatcatctttagtgagttaccttttgctttcttgctgacagctagctacacactgcctttgttatattaccacatgcacacactctctctccttttatgtgatgtttccttagcattgtaaaccagctttcatgtgatgtttgaaacttgaaacttctagaccccacttggtcaccactcaccaccttattgcatctctataaatacccttgctatcccacattccaaactccatgtccaaccatccaattccaagcactactactcatcactagctcacacacaattgcatacacctagctcaaaagcctttctatttcactaattgtgtgtgttcattgctagttgcattgtggttttctagttaattaacaagctagctatacctagcttataattagctagagtgtgagcttataattagttagttagttgaaaacaagctaagatgaggagcaaggcgtccatgttcttgaagcagatggtgtcgacgatcgtggcggtggtgaaggcgaagtcgacggcggtgagggccaagacgagcgccatgaagacgcggctgctcatcttcggcgtcctccgcaaccggaagctcctcgccaccgccatcaaccacaagatccacgccatcatgggcggcgccgccgcccaggacaccaccaacgacggtggcgtcgccggagtggaggacgacgacggcggcggcagcaagaaggccgtggtgctgtacaacaccgcgccgagcttcctcacggagcgcggctactacgatcacgccggcgaggaggaagaggaggaggaggacagcgacgagtacctgacgcactcgttgttccaggaggaagacgacgaggacgacgagctggtgaacgcgccggggtcggtgatcgacctggtgcgcgacgccaaggaaggggaagtcgccgagttccggctgtaggacgagatcgaccacgtcgccgacgtgttcatccgccgcatccacaagcagctcaagctccagaagctcgactccttcaagaggttctgcgagatgctcgagaggagcgcctaagttcatacccagatcgccaaactttttggctcactgtgcatggtgaagaaaaaaaaaccttttttttaccgttaagccaaggttaattaattgattaattacacacacaacttggtgacttttgatccatgcacgcatgtaagtagagagaataaagtgacaaagatatatacttctcttgtagaaggggttcactactttacttaattagggagcagctgctcatgtactttataatttacttgtcttgttctttagttcttttgatcagggggaggtatatcgttaagcttccaagaaattattgagtaataaacaaataaaaaagttgtagattcctgacattcagttgggtctatatctcacttctgttccatgtagtctaaactagggatgtaaacggtcggaaatggtcgaaaacggtatcactattttattattttttcgaaaacgaacggtaacagtaggaaaatttctatatttatgaatttatctatttagtgtcaacttcaatatttatctatttagtgtcaacttcaatgccacgttgacagaaatttaaaaaactaaaatttaaaaacggtaaccatcggtaaaaatattattattatattagttttacggaaacggtataagtacggtcgggaaatttctataccgtattcacccctagtctaaactatatttgtctcgatcaatttctctcatactattaactagcatagatagtcgtgcatttgcacgactttaaccccctctatacaaaatgtgtctgcatttcgtggttttgaaacatactatttattactttttaaataattcatacataacaattaaatgtgtcagttagtgtaatagatatggttagggttcatattcaacttctctgtcatagttttcctctacttatttactcaaccataatcgtctatttttttgtttgtgccttagctgctgctttgccacttttccgccttagctgctgttttgccaccaaaggggctcatcttttcacttatgcttatgtttatcagtcaaaatttgaattttcaacattaaattttgagttgattttaaggttttttcatcgaagtttatttttcagcctttgcttttatatcactaaaaacacgtatataaaagttttattcacaaaacccttttcgtttgcaaatatatcggttcacttattccgcgaataagtgaaacgatggctccgcaaatcaccaatggccacctacattgttgtagtaggagccctttattttcctattatattctatccattgttcatttcagcaaaaaaaaaattacatacttggatacttgctaaaaaaacgtatttagcaagaaagcataacatagctaaatttatcttgatatgtaataaatatttttttcatgcaaattaatagtttacaatgattatgctaaatttgcgaaattactgttgtataattttactgttactcctctgttcataaatattataggtttaattttgaataaaattatgtatcatagtcacaaccataatataaactgttttgagatgttaggcttttttttcctttccattgttttgtaatatttaattttttttagagatcactttgatagtttatttatgcgcgttcagtggtggtctcgtggagcttcccggctcgcgagctttctgttggaagcttcttgaaggccagctcccgaagccgtattgcttgatctttggcttgtacagcagtacaggaatataatccaacggtttatatcacttgctgcatgcattggacggtgtttaatttgtagcttatgtggctcaatcaggttttgagaaagtttactacttccaattctactggtgggccttaatcccggcacatttgtggataggcccattttaattcatatctcaacccatccacatctaatgggccggaataccggcctgccaaacaattcaaggcttcaggggtgaggacagcttataacagcaaactcctattgaaagaaaaatatttacatatacgattctaaactagattaatggaacatgtaaaaaaaccttggcaggattacatgcctattctattaaggcggagcataaggaaaattatacagattggaatatttcctgtattcatacctaaagatagctttattttaagatggaaaactcaacccccatcattccgctgtagctgattataaaccgcaacatttattagcgataggaaaaatttatgtgaaaaacttttatatatgtgttcttagcgacttaaatgtcaatcctgaaaaacaaaaaaaacaacaaaattaattctagtgtaaatatcgtaaaactatatatactctgcacgatctatcacaaaactacagatttaagaacttgtttcacaagacaacatatttagtgtttttgtttaccacaaaactacaggtactttgcacaatatatcacaaactacatatttaataacttgtttcataaaactacagatttagtgtctttatttatcacaaaattacaggtttagtgtctattattatcgtagttttgtgataatagagacactaaacctgtagttttgtgataaatgaagacaccaaaattgtagttatgtgataaacgaatacactaaatctatagttttgtgaaacaagttcttaaatatatagttttgcgatagattgtgcaaggtatctatagttttgtgaaacaagctcttaaatctgtagttttgtgataatttgtgcaaaatacctgtagttttgttaaacttactcttaattctaaaactaagttctaaaattgaaattttgatcgtggctaataggctaacgatggagctgcgaaatggagcatagcttaactggttaaggacccctttgattcacaggatatgaaaaacacaggaattgaagtagcaggtttctcaaatcctaggaatgagcaaacatgctatgggaaaaataaaggaagattcacaaagaggtcacacctcttactatatttcctatgaaatgcaaagcataggaatacaatcctatgaaaagttttctttccttcctatgaatcaaaggaacatgtaggaaaaaatctataggaatttaaatcctatacaaatcatttctcagtcatatgaatcaaagggccctttctttatggtataactaacctgtccgaggttaagttatagttttgtgtatgttcatagggatgagaatgcatgcgttgtgagcatttctagaaggctacagtaacctacgcagagcagtattacctccgtcccaaaatacttgtcgctttcagtttttgtttgtaacttttgatcatttgtcttattaaaaaaattatagaattgttatttattttgtttgtgacttgctttattatcaaaagcactttaagtatgatttgtcattttttatatttgcactaatttttcaagtaagatgaatagtcaaacgttacaagaaaaaagtcaaagcgaccactattttagaacggaggtagtaacatctgcactgtcggttcaaaatcgtgtggctgagggggtgtttagatggggctaaaactttttagcccatgtcacatcggatgtttggacgctaatttggagtattaaacatagactagtaaaaaaactaattttataaatgagagctaatccgcgagacgaactttttaagcctaattaatccataattatcaaaagtttactgtagcatcacattgtcaaaatcatggcgtaattagactcaaaagattcgtcggagcgaattagtccaaggttatggaatgggttttgaaattaatgtatgtttaatactctaaattagtgtctaaacatccgatgtgacagggacttaaaataagtccctggaaacaaaacaggccctgagatcgatcaatccccgaacggaagccgtacaagtcaacgtaacatcaacaactgtttcgcgaacaaaaagagtacaactgtttcgaaaaaaaaaagagtaaacatccacagctatgggaaatcatactggccgtccgatcttgaattaatgagcgcgagagataagaagggtttttttttatatataacagagagataagaagagttaaacaaacatctcttttgtctctggaagattggggggacaaacggataagcattaggcactgccgatgacgatgcaggtgggcccatttgctctaatctgccgagatgaggatgcagatatgagatatttgtctttcttaacataaattatctcgtgcacatatcattcgtcccttgaaaaaagttatactaccaaagttgtttacacacgggcttttgattataataacaagtaaatcaagcatatgtccggcctactactgaaacagttaaaacagtattttgtgatcaatatgaaactctgtaaagtttattatagaataataaccggtattcaacgaaaaaattgtgtaacatagatatgtttatacgttaattaagttccttacgtttaatcatatgacaacaggattttgagcaactatttttcttttttaaaaaaagatctagtcatttttctcatccttggacggaaattaaaggttgaacaatgattactgtaactaaaacatccaacaaaattatataactagtaaaaaaaatcacaaactatacaagtacccagacttgcatagaacaccactttgaaaccatataaaataaactaaaaatgcacattatataggggtataattgctacgtgcaattttaggtgactagaaaattgtatgaatttccacatgactaaagtccagcaaatccttatcaaaattgatgttgtgataagaattttcccaaaaaattgtgacctatcgagttgctgtaatatttatggcctatttcaatttgctataaaaacagcaaagaagattatcccaaaattataactttatggacaccttaacattactaacccctggagccaacatgacatagaggtgatatccggcatgacgagacgactacgggatatgttagcatgacatatcaacatgtgcattggagcactatatcaccttagcagacaactaagccacctactttaatccggctgtaacttcacttgtacagtcggtgcagctggatcaaaatgcatcaagcttaaaaagggcaaaaagacaagatgagagggccatttatcctatccggggatgggtttttgacctaggtgcaccaatcaagtgacgtttcaagtagacttgattgcaatagtgtaaccggatcggagtgacgggccgagtagttttctaatgtggcatgccactacaatttatacattactaatgtatcaggctaacatgttccgctgtctcgcccatgctaggtatcatctctataacattccttaatatattatgttagggtattcatagagttgtttttttttttgataattttatttgctacccttgtaacaaactgaaatgtgtctctaaccttgcagcaagcacttttcttgtagctccaaaaaaaaaactccagttttcttgtgcctctagcattttgcagcttctacacgccgcccgccagctcagttcaccggatccccgggaattaaaatcacacgagatcgatcagatcgcacgctgagacgtatagacgacgtgggtcccgccaaagtactgggcccaccagtcattggaccaccgtacgacgacatgtgtgcacctaccgtggacttcgctggaaaaaccaccgaagccgccgccacgtcatgccccggctgcggttttctttaataaagcccagaacacaactgccacacccaccccacttctacccaccctcaatgacgagtgggccccacgccaaaaccgtccccaggacgttagtgtccgtagccgacgcgcgccgcgtcggctgacatgcgggccccacctcctcgcggtcggatcagcatttcgcctttcgtcgtcgtcgtcatcatccacttccacttccaccctcctctgcatttgcaaccacgcgcagacaagaacaagacgcgcagcaaagcgcagcagcagcagcagtattaatcgaggccaaggacaaggagcagtggcaattgttgttgggagaagagcgagttgttgggagggagaaaggccaagaagaggaggaggaggaggaggaggaggaggggatcaatggagatggagagcccgcggagcccggaggcggagatcgggcacagggtggaggacctgtgggaggtggcggagccgcagctgtcgccgtccgagaagctcaactcctgcttcgaggacatcgccgtcgcctccttcccccgcccccttggctcgcaaggtaggtaacttactaacgcctcttcttcctactttgctcctcgctgaccttgccatggcctctgctgctgctgctactctctgattaatcagttcttgatgcgagctgagctgacatgaccatttctgtgtggatttggagtgaactgtgtgctgttcctcttcagttggggtgatggatagatggtgaacaaatttaggcattcagaattcttgttggaattgatacggccagcagccagttagttcactgattgaggaatgcgtttgctgtttctcctgattggattgaagtcattaaactggtagcattagaacctatcttgtcactattgtgggttgagccatcagacatgtctctttcgtgtcctgtcctactatatataccactacatatatagtcatttcattcctttgtgcagttgctggggccatatttgcattcttttctgaagcaaatgttccttcgtgcgggttagtgccgatggcctacatcctacctccagcctggccaatttttgttcttgacgggttgaaaagggtggcactgttttatgcaatcagtgacaatgcaataggggattgtaggacttcggtcttatctgtatgatgaagctttttggttttagacagtgaactgtatgattgagtcagggggagcatggtgattgctcttgttgaagggtccttttcacttcttagacacgctaaagaagaacctttctggatttcctttttatttgtgccaatatgtgaacattcaatggcatataaggaatcttctctataaatatagatatctgcttactgacaaatgacttcgctctcatgattccaagagatgttctagaacggtgagggtccatattaccgtctgatttcttaattgtgatctttgctataagactaagcagaaaagttatttgggaaaataggacctgtttaaacttgtccttggctttcgtcttgttaatatctgtgttaaataatgtgcttttcgttggtggttcctggtggtcgatacagattgtacagataggtgtagcttttaccaatagtcagcattttgcctatctcggctcacagctatttttctatggccacatgatgttaacatggcaacctcaacttcaaaatcctaagttggacatctggtaataacaaaaatcatactccaaaattgttaactgaactggtttgttgtaccaatgccacattgagtgtgcttttattaaactcattgacattatacggatctgaagttttatacctgaaaattgacttcactatagaaatttgtcatgagggagaatgcaccttgacttgtacaaaatggatttccaaccatcaatatatattgacatgaactcattaattgccacaaaaggtcatatcttgttacaatgtcagttttatgagcataccatgtctgataagcagttcctatccactttgcttctttcagaacttatgttcttggcttcacagaccaacctctttggtatttcatctccatgcatctcgggatcgataaacctgttatccaatccatacagatattttagatgtgctttgcttgagttttggaaaaagtgtagtctttcatcatctttcggtcacacatgctttcacaaaatcattttttttaatcattgtactcaagcgaatgtgaaaaaacaattgattctgaaacatgctggacctgtgacatcatattatgcaccaagaggctagtatacttatatgcaccaagagattattctgaaatgctctaatactacatgtatatcataggctcaaaaagttgtcaggtttaattatgcaaaattgattactggaatattattcaagtaatacgaattgagtactttctatataccataggctcaaatagtttcctgtagaacacttttacttaatatggtttcctgtagagtgcctctttttttttgtgcaaagaatgcttttacagctacagttttaacaaagataaacattttttttcccaagaagaacctgtaatctatgattttggtattatctaatcatcaatttaagctacaacttttatgttctttttctgcagtaatcgagataccttcaaatgctagtctggctgatactgttgaaatattatccaaaaacaaaattttgagtgcacccataagaaatgttgatgctccagaagatgctagttggattgacaaatacattggcattgtggaatttgctggtattgctatgtggttgctctatcaggttagccaccttaatactagagcactacttagttcctctctgtttctttttcagaaaaatatttgtctaatattatgttgtatcatatcatgctatatttgtgcacgctgttgaattttagtatcataccacgctagttgaatttgatgtatcatatctagtccagctttaatgacatggtagattctgacatgcttaatatgtatcattaaattcaaccctaattatggtgttcacaatgagctttcagtttcttttctcaagtattgacagcattttcatttttttttggaattcaaatacccatgcatgggaagtacctcgatctaggcttagtatttgttggactgctcatcaattcattcacaactgctaaaccatgaaaacacatttttcagatattacttacatgcttgttctttgcaaaataacacttgaatctgattgaaacacaaaaatagttcgtttaaaagaaaaatactctgatatagggaaggtaattttatatttggtgatacaattataggaatttcatgaacatcccatctttctgacatgggttgctttttctgttcctacaatagtctgaggctgcagctaatggcacggctggttctgccgtagggtcaccagtagccaatctagtatctaggctaggctctttcacattcagaaggacatcatctggcagggtagaaaccaccactgacccagaatcagatgaaaccgcatcggtcggtgggagctttttcgaaacactcacttcctctgaattctacaagaacacaaaggtgattttcttttcctctcagttgaaagcagttgtattcaccatgatccattcttgacaccacctgtgccaccataggttggcgatatctcaggaagcttccgatgggcgccattcctggcactgcagacatctgacacattcctcaccatgttgctgctgctgtccaagtacaggatgaagagcctcccagtagtagacattgggggagataagattgagaacatcattacgcaatcttccgttgtgcacatgcttgcagagtgtgttggacttccttggtttgagagctggggaactaagaaactctccgagctggggcttcctctcatgaagccatgcaaactcgttaaggtacctccaaaacttcaatgggcttcactcgtaaatatatgttaggcaccttcatacgcatatatttatttcaagtaaatacaatgagaaatttaaactcctgttcaaaaagtatccaaaagcacattgcaaatgttgtattcgattattagcattgcttgcacaacagttcttatgtgttcgtgccgacggtgagtataaacagccatccgactgtttgtgtcaacaaggtttaagcaagataaaatttactagaagcatgctgctttaatagctagaaacaattgcctgtaactaacctccctgtgcaagcatgttatatttgatcttcaggttcggggcactagttacataggttcgacaataaactgttttgacacacctgtataatacaggggctgggggtttagaaggggaatattaaaccttatacagcgccatctacaatttttccttatttttctgctcccttccacatgagatctataactgttctctgttgtcaaccaggtaaatgaagaccaacctgtgttaaaagccttccaactgatgagggaaaaaggcgttggtggcctcccggttatggacacaagtggcacaaaagcaattggcaatatcagcatcagagatgtccaatatcttctaactgcccccaacatatacaaagattacaggtttgaagttcttaccacacttgctcctattcttttcccatgtttgttcaccaatgcaaaaaaaaacttggtgcttcaacttgcactcccaccacatgcatcaagacacacttcaaatgcattgtaggaagtaggaaaaccaactgcaacttttaacctttttgatccaaccacaggacaatcacggccaaggatttccttaccgcggtccggcaacaccttcaggagcaacacgaggcctcgccgttgctcggctccgtcatcacatgcagaagggatgatgaagtcaaggacatcatactgaagctggactcggagaagatccacaggatctacgtgatcgatgacaaggggaacaccgagggggtcatcacgctgagggacataatctccaagctggtgcacgagccacgccattactttggggatttcttcgatggtgttgttcccctgcctccaaacagcactgtatgacacggcccttgagatttcatcacgctggtgtgctcttgtaaattgtacattatgtccctttacgacaatggttccaaatggatgggaatagtgtacagtttgccttgtgtagttctttggcagtggaacaactaatggactaatggatagcacgggtgtacattcaataacttgaaataatatctgagctcccttctgtatgtttttatgatgagaatgacgtctctttcttatgttcaattgctcccttctttttttctttctttttcttttaaagaatattggctccatggtttcatcttcagcttatcagccataatcaaaatttgagtttttttgctgcctgaactcagaaccgaaatgctaaaactcagcatcctaattgctgtggaattctggagtcactgttatctctggcagtgtcaaaaaacagttaaggagtacagaagcggctccttgtttctacagcctattggaagcattctagttcggatgccgaagtgtgttcatccacttaaatgtcttgaaactgtgaccagagaaaaacaaaaacaaacggtgagtcaaacatcaaaataacaaaaggacatgaaaagcgagaaataacatgctactactaccaaataacaaatccagtatcaagtgaaattctgctcccctcctgagaaagttgctgtacctgctttttttttctttggtacgcatgggaacaactaaatttttgcctgtagcatagcaagttacttacaagtttgtggtctcttctgcaaaaaaaaaaagcatttaaattacttacaagcttgttctttacaaaatactccctctttaagacatctctttagccccacactctcaagacatgggcaaccacaattgagagccggtctctagtgcctgacagtaccaaggatcattccagcattccatgttgccttccactacatctgtcaacgccatgacattactgaaattaatggatctgcactgcttgattaagtatttgttgttttgtctgagtcagaaccgaaatgctaaaagttagcatcctaactgctgtagaattgtggtatcaatgtgatatatctgtgtacagcatataatcgctgactgtgtcatcattttgtcagcgaactcccgggttttgctctaaccaattttctgtctccaagacatggatattttgcagaaattgtgcttaatttgaaattttgaaaaacgttagtagctaatgcagagagtatgaagtctatgacatactcgcttctgtggaagacgtgctgaagtacagcggagttggatctggaccatcatagctgtatcacattgctaatctgcaaaattgtgtgaacgtactcttggagacatgatggacctgacaagaatggcaaaaaaagtcaaatcttgatggcatggatctggaaaacagaaacaatgaaacagctatgattttaataaacgttcttactggcacttgataaaatttacaaaatcgccattgttatcatcatactaaaacaacgctacaaaaataggtgcgacacagtggcatgcctactggtacattattgaagaaatagcttgctcgactgaatggtaggagtaccataaattaaaagcccaaaaataaaccaatgagtaaatttcacaaaactgcagttattttgcacaatttatcacaaaactacagatttaagagcttatttcacaaaactacagatttagtgtctacttttatcacaaaactacaggtattttgtataatttatcacaaaactacatatttaagaatttgttttataaaactatagatttagtgtattcgtttatcccagaactacacatttagtgtcttcttttatcacaaaactacaggtttagtgtctccattattccaaaa

SEQ ID NO: 28333 - DNA, 17652 bp, Oryza sativa
aaaaaaaaaagagaagtaagccaataagaccgttaagtaaagtgagaatcaggatggttggagtgctattttgactgggcacttttgctcttctagcattcaaagtactccctttgtttaaaaatataagttttttttattttatttcattatcacataaggctttggccaacaattatatcatttatgtgatatagaagcataattaaccatataattaagtagtacttttgaatacaaatttaataaattcaatttcgtgtcatagaaattatacccaaacaaagtaatggtcgatcaaaatctcactctaacaaaacaaaactatatcttatattttgaaacggtggagatgaataaaaaaaattgagttccacgaagagaaaaaaaaacaactcttcaaactacacactattttccttaagcaacatctaattaattgctctttcccaacatgaaaaatatgtcaacaccatctcttaattaaagtcaaatccgccatatatatatttatgaccagaaacggtaacatgtttagatcccactgtaaaattttacaccctatcacatcgaacgtttgaacacatgcattaagtattaaatgtaggctaaaaaaataactaattgcacagattgcgactactttgcgagacgaatcttctaagcctaattatattgctacatgatttgacaatatggtgctacagtaaatatatatgtgctaatgacggattaaataggctgaataaatttgtctcatggtttactgacagatactataattagtttttttattagtacccgatcaccccatgcgacaccctatatagtacccgatgtgacactccaaaactccacacccctgggtgtaaacaccccctacgtgtgttgactggcatcttgcttctgacagaccagtattcaaatttcaattaatttttttaacccaaatttattaacctggctagggggtggcacaggctcaatgtaccttgctttccttgccacacgcatttcaagttcccgaacatcacagaataagtccttaatcccttcatcccaatataaatggaccctagtatagatacgagatcacaattctaaattcagattagtagtgtcctaagatatgttacatttgtgctaggttatatttatattgaaaaggaggagtaacttaaactcctaggtaaccaatcaatcagatgtgagagatcaatttgtggatggaggatctacagacttgggggcagtttggtttgagaaaccagaccctctatatgatgggttcctcacgagatctttgctcaaatttggtaggatgagcccattcctcatctatgaggtgatcagtgatgatggacaaatttattgcatttctaaaaccaaatatatttaatatcaagtagtattagtcaattggtcatcacatttcgtttattaatccaaagtccatacccatctttttgaaaaataatattgattttatgaaaaatagcaagaatatgattcggtaatcaattatgcattgagcttatgaccctatctaacgaattctttgtgcggcaacgtatatttactagtctgaagctaagcacagtacagatacctcggtttcatttgaagttcggtatgtaaagttgtaaactttaattttcttatgctgagtgtacatgtctcggttgggaacttcttttccctgtgtatacaaaacgaaacgattcagtcgtacataattaattaagtatgaactaaatagatttaaaaattagatcaatgtgatttttttagcaacttttctataaattttcttttaaaaagagaaaaaacatacatcatttacatgttagaaaatgtgcgcacaaaaaacgagagaagttatgatacgttatatattcgaactcatcctaaaaatgtttattaccgagtacaataaattgttacttcctccgtttcacaatataagtcattttagcattttccatatttatattgatgttaatgaatctagatagatatagatatatgtctagattcattaacatcgatatgaatgtggaaaatgctaaaatgactaacattctgaaaagatggagtagtaatttaagacagcacaaacaggttacagattcctttcacacacacttgcaagccactctatataaaaagccctccactttgaggctagataagcttaattagctctctcttaagcctaaagcgagacaattaatttaataagcaccccccaccaccagccatggagcaccaccaccttctgctgcaactctcgccgccaccgccgccgccgccgctgccggcggcgcacctcatgatgagcccgagcttcttcgacgccggcgtgttcgccgatgtcggcggcgactggatggaggacctcatgcatctcggcgagctgttcggcgtcggcgtcggcggcgacgatgatgataatggcggtgtcgacggcggcgtgggcggcggtgatgatcggatgcaagagtggcagaataattgcgagggcgccggctcgccggaccaccagcctagctgcggtgatggggatggcgatggcgatggcgacgtgagccctcgtgatggggagctcggcgacggcgacggcgacaactcggcgacgaggaagaggcgggaccggtcgaagacgatcgtgtcggagcggaagcggagggtccggatgaaggagaagctctacgagctccgagctctcgtccccaacatcactaaggtacgtactcagtgcttgattgctcgcgtcggcgtcgccatggcggcgccgccatgcgccattgccaacacaagcttaatgattgcttggcagatggacaaggccgtcgatcatcgccgacgcggtggtgtacgtcaaggacctgcaggcgcacgccaggaagctcaaggaggaggtcgccgcgctcgaggaggcgcgcccgatcaggccgcctccgccgttcgccgccgcgcaacggccgcagagacagccacgccgcgtggcggcggcggctgcccagctggcgagggccgcggacgccgccgccgtgacgacagcggcgggggcgccgcacggcgcgagggtggcgcacgtcggcgcggcgcaggtcggggaggggcggttcttcgtgacggtggagtgcgagccggcggcggccccggcgagaggaggaggaggaggcgtggcggcgccggtctgcgccgccgtggagtcgctgtcgtgcttcaccgtggagagctccaccgtcgggtgctcgccggaccgcgtcgtggcaactctcaccctcaaggtgcgtcacacccaatgcacctaactgtgtaattatactcttgatcacatctgccacgtcacttaactacaattaactaatgatgagttacaagcgattttacggtcctcagagtaggcattgaaggtgccttattatctaacataaaaggtatctcttggtatcttcaacgtgagaagaaaaaaaaaagaagttacactaaaaattacggtcttttaatactactcggtaactgtaaaattgctcttaagttaattgggtattttattttggaaggggaaatattagcaccatttacctgaaaattatttttcgtaagaaaaaagaagtttagttttggattagagatttagtggtaatgcaattcatgcctatatatactatctccgtttttcttttatgaacctagaagtttcctaggtccgattttcaatatttttacttgtttgatgtggtttttcactggatatttctctattatgtactccccctcttaaaaaaaaaagacaaaccctcagtttccgtgttcaattttaactgtccgtcttatatgaaatttttttataattcgtattttcattgttgttagataataaaatatgattaatattttattcgtgacttgtctttttatttttttttcataatttttttaaataagacgaacggttaaacgttgggcacggaaatcagagtttgtctttttttttacggagggagtaactattattccattgggatatgtggattaaccgctaattaccttgtggtgtgtgtaggttagtgaagcagaggaggatgtgtcggcgatcagcgagtgcacggtgaagctctgggtgatggcggctcttctcaaggaggggttccggccgcaaccgacggtccagatctcctgatccacccaacaccggccgatatcaacccttggatttcatcgccccatccctatgtatacaactactgctctttcatgtgtaacatcctaacaaatggtgtgaagagtatattgggagggtaattgagtggttaatcttggccatccacggccgatcgaacggctagcgtaccacctaatgcttcttcttctttttaataaagagtggtgcatgatgtatacatataccgtatttcggataattagatcaggaatgaatacttgttgtatatttttcacggttaagattatgattaggaagagtgagattgtttctgcagccaaaagctctcttggggactgacgtgtatgcactagttaaaaaaaaaactgattcggtgcaacttttgacaagaatttaggaagaaagtaacatatggcaagatgtcacacctgaaccaaacttgtatgtgagtaataatggtactcacagtaggacaggtttagaagtaaccatctctgattggaagtgagcttgtaggctaaccgtaactggttgcacctacaaaaatcgatatttatttttgcatatggctctttataggttcacatgtcaaaatctattttcgcatacgaacatcttaccagtatgaaaacaaaaacaagtataatttcgcagacggaccactgttaacagtgaaatttggtaatcggcaaagacgtcatcggcttagaatcgttatcagctgtagcatctcggaatcagccgatgtgagttatcaagtcgccaatagtcggattcctgctatattcggttaaggaaatcaatctactaaaggaaacttatccctaagtgaccgagtttaaagaggatgcggcatggcagtttatctattaattaggaatagtttgttagtttccttttatctttaggaaacaatgtttagtgtccgataaggactttatattttccttttatctttaggttagtttctttcttgtccgacaaggacttgtatcaacccatgggtataaatatgtacacccggggtctatgtaatctatcctcacgatcaatacaattcggcgcatcgccaccttttaccttttctactttattttatcgtccggcgggacttggcacctgacgcggggctgcatcggtgttcgatctccggctaaggggtaagtccaatgttctgccagcccaggcaattgtatcgtctacgtcggcgccgttcaaggctgcatcagtacattcgacctcttggattactccggtttggatgatatatttgcctacctatttatcatatgtctctgttaatctagtcttagcatatcaatctagctctatcggctgtttcttgttttagggtttctgctggtatcggctaaatcgtgttgctagattaaattagcttagacatctaccaccctgaaaactcagtcaacggcttgattgtctagatattatgtttcttttcatacttagtgctgcataagttaagtttgatctactaagtcgttcttagaaccataatctctagcttacttcttgattgccaataagggtttcatcggggttttagccggtgagttatctggacgttgcatcggctcataaggattgcatatacatataagttggatttagccgatgacaacaaaggcttcactatttaatctaatcttgtggatttcatgacatcggacctccagccgatgtatgctctaaccttcagatcggtgcttattctatcatatcaatgctagccgattggtttatactggactatattattgttatattttattatcagtagccgattgcctatatatcattatttactaaagtgttagaatctacattggacgtataaccgattgcttcaaccctatcgctatcggctggtatcggcatcggctattatcggctatcggctggaactactccatcgccttgttagccgatcgactgttttgatctactatttgcatatcttgtcagttgcaggatcaaactgactggcacgcccgcatctcatcaacctttggacctgcacaggagctaagcagatatcccgagccagtgtgttcgattttttcgtcaacaaccacttaaacggttggatgggaaaatgcatttttaagtctcatccttatctcctcacctctcatttttccacaaccttgtttcctatctctctcccccactcatttttctctctcaactctcctgtcacaccccaatctggcaccgccgtacaacgtcacctgataggagcgtgtcgtaggaaaaacggcgcggaccgcttcctatgaaaccgcgatctcagtaccagtcccaggacatagtgctggtacccacggtgacaaatatgaatcattgcaatccttaaaataaatagaggacttatttaccttaacttaggttgcagctcagaacagcccgagattgcaaccgacgacgcgaacgaggaaacaccaacaacagcggcagcagcggaaccaacggactaacacccaacaccacaggcgacggctgggaaccaggacgaaaccctaatcttcactttacttcatcttcaacttccgggcggaggaactatatatatatttatatagagcaagggtgagtacttttgtactcagcaagccatgggaatttaggtgtttaatgcaagcttggaggagaggcaaggttatttttgcaaatcttttgttttgaaatcattttgaaatcactaagtgatttatttctttctaagtttgggccgaaaagagacttgcgtctcgattcgactttaagagatgtttttcaacagctcatttggtaatgtaccgacctcctgggtcagatcattacttctcggctcccaaagccattccacttgattaatcggctcccagagcctttttcattttctcggactcccagagtccagctacccagcagcacaacaatccgcttccactcgggaagcctagtctatgatgcccgtagacatcccgaatcacacagattcgtttcttgaccactcaggtcatccatctgccacataggctgattctgggaatgattcccacaccacaacaacttttcacaaagcacaggcaaacaaatctacgctacaggaaacacctcacatccgcccatgaccgtgggcatggctgttcgaacagtcagttacccacacgacattactaacccggatcacccagcccatgagatcagccacgtcgggagaccttaaggctttcatgacaaggcatttcgaaagccgacacaggttcaccatatgccaacgagaggggtcccagaccaacaccagattaggtcccagaccatactgtgccaggaagcccgagggttctccccgacaccaccccgttgaatccacatgtctcttggcatcaaggcttccttggtttgctatttactcagccaggggcgtcccattgcacccgtgtggtcgcacttgttatatgctcggatgaatttcccacaggaatcggtacttatatgcgaatacgggacagtgccacacaggcacaacccccgcattgcgagttttcacaatttattttgttttcaaacacaccgacgccacatgtcgggttttcaaggcttctcaaacccatttcccaaattttcgacagacaacggtgtatgtggaatagttggtatacgcgctcagagaacacggatactgaagtaccacaagggtggagcgacaaggaaatcagggtagtacaatctacaggaattagtgcgactactgggtaggtccatcggtttggcacgcatactgaggccaagcaagttgagtgtgtgattctaataatgcaagttgcaaacaaaataataatgattttccaattataggagcaattggtcaaagggtgacttgccttgctcaaggtcttcatgaagcttcacgaatcttcgagaaaacccgcgatcgacgaaaatccggtaaccgcaactatacgcaagcaatcaaaaacctaaacaaaagaccaaaagaaagatcctatttagactaaataatagtgccattagatagatctcaattttatggaaatactggaagtggaacggagtcaatcggacgagcggtcgaggagatatgaattttggaagtttaatcggaatttctagaagatgagaaatggtctatggaatttatagaaataatattctcaagaatattattgaatttcactgacaagcaggaccaagggaaaatgattcatagaattttggaataaggaattgatttgtggaacaaaggaaaaaggatttattaaatccctttttggaagggaaatcaaggagggatgtatattagacttgggccgagtgaagagggcgcggcccagggcatttgcggcgcggccgaggcaagcgggccggcgcgcgggagggaggcggcccaaggccgagcgaggcgtggcctatgcgacgcaagccggtggacgcggtccaccgtgccgggcgcaaggtgggacccacaaggcagcgacacggctcacgcgggccgggtgcacgcaaggcggcgcgatggattggaggaccgggaaacctttgaccggtctccgcggggccgggcggctgaggtggcatccacgtggacgccacgtcggatggggaagggagaggaggccgggaatggcatcggacggccggcggcgagcgacgcaatccggcgaacggcggtgggagggagagagaggtggacaccggcggatagaggaggtcaaggggaaacaattcaacagagcggattagctggggaaggaacgacgacggctggcggcggcgaccaatctcgccggcacgccgacgtggccgcgcgcgaaaagagcgaagggcgcgcgggctcgggcttagccgaaccggtatggtgttgcgacgcgcacgcggtgacgcgggacccgatggtcgccgtgttcgaactcgcggcggcgctatgcggcggcggaaggggcggcatggcgcgggagcggtttgggaggccggcgactagggcggcagcctgggaaggttcaaggggacacggggagggtcgcggcgcaaggaatcggcgagagaagggccgacggcggcggattgcggcggcggccatcgccggcggagaaaaggggaaaactcgccggggcaacgggagtccaattcaccggggaaggagcttctacatggctccgggaactcgtttcaagcaacgggtggcgacgagctagcctagggggtcatggcgacggcgaggtggacgcgacggcggggcgacgcggcgaaaaggggggagaggaggggagcggccaaggcgacgtcccggggaggctgctagggacgcggggagggtgatggcgacgggattcggcgcgggaccgaccggcggtagcgcgcgactgcgcacggcggccgcggaagcagagcatcggcgtgacgaacgcacaaactaccatgtcccagtgctgtttaggagtcgctagaggatgtagacgagaggacttggaccgggagctcaccgacgagcgggaatggcgtcggcggacggatggcgtcgcggcgaggtagacgcgatggcggggcggcgcggcaccgagggggcgcggccggggaagaagggagggagaggtggtgatgggccagaccggtggcggtccattgacgtctcggtcccggcggcggcggccggcgacgaggaggcgacggcactccgttcccaggagcacgggaccaaggggatagataagggccgcggggttgggcttttataggaagatggtgctcggctagcgctcataggcggtgcggcggtttcgtgggcggtgcggaagcggcgacagcgtggatgtgatgggcggcgaaggcggtggatcggacggcgaaaaatcgggtcacgagagcgggaggagcaatttggcgcggtcaaggtgggagcggcgtgctggcacggttgtggtggaggcatgggcgcggcagagcgacgtcggcgactctgcctcctagcacagggggacaaggggaagagagagggaaagggtggaggagggcggtggaaaggggagcttgcctttgccaatttgggaggaagagggaaggaaagggggggtctctgcctccgagatttggaagcacgcgcgcaggatggcgggaccgggtggcagcgcgggcacaggcggtgctagggcttgacgcatcggcgaccaggcggtcggccacgcgcgagcgcgcgcgggaacgagcgaaggcggtggaggtttggatggtggcggcgggatttcaaaggcggtggcggaaatcaaatcacggtgacggcgcatagcgcggcgagaggagagagagaaaggaaacagagagagagcgaggaaggagagagaaagaagagaggcgctgcctctctctcccgacgcgtgcagcgcgcgggcggggaggaggaggagcggccgagaggagagaaccgggttgagaggagatgggccgaaggagggaatcggcccacaaaaatccgagggacacaaaatagacttttgacagagagattgaatttggagagaattggggcttggaaatggaatttggatatctttggagtcgggcgaatatttggcaaggttttgagatttggaatttgaatttcgaatttgattacttggactcagggaaacagggaggagtcaacaacgggattcaaaaagggaatttgatatttttaggatggggacaattatttggcggggattcaaaggatgcgattcacctttgggatagttgaatcggaattgggatcttgaggtggaggattttgttggcgatgagagagaacaacgatggagatttgaattgagatccacggcacgacttagactctcacacaaagaacgaaattttcacatataggattttgccgaactagtttttaacgcctcacgaaaagcggagcgttacatctcccttcctctcccacttctcccctcctcacattctgaaggtgggcttgggttggcgatggcaggagtgcggtggcgagcacaggagctaagcaggatgctggagtgctggagcggcgcgacacgatgggctcgagtagatgcggcggatcctgcgggagtgcggcaacggcaaaggggagggttggcgacggtgtaggatcaaggaggccgactagaggggggtgaataggcggttttaaaacttaatggcacttaaacaaaactaacctaagttgctaggcaaggtaaggtgcaaggttaactaagcaactaagttaagttttgcaaacctaggtgacatgggctcaaatatgtctctatgaatgtaaatagcacaaatgtaaatgcaacaaataaatgagacaagaggcaaggaatttttcaccgaggttcggaaactcgccggtttcctaatccccgttgaggcgagcccaactccaccgctcaaccacgaagccaccgcacgccccctttgtcaaggggtgggcaaggcgggagccggcccacggagaggactacccaagcctcgatcactcggggtagttcttccttcactccgaaggtggtgaactccaaaccactcacaaacggcgccggacctcctccacaatctcctcggagaggtcaccgggcaacacctacacaagccgtctaggaggcggcaacctccaagagtaacaagtctaggatgcttgccgaggatgatcaagtgccacactagctataacaatgaagcaatgcacttggattggcttaactcactctttaacacctcactagataaactaagtgcacaagggtgtgagagctcttgcaagggttcaagataatgcaatggagtgccaaaaccttacccttgttgctggggagtgggtatatatatacccccaaccaccaaaactagccgttgaaaccgaaatccccaactctgtgctctgccggtcagaccgccattgtgaggccggtcagaccggactactttgtaactagccgttacagggcaatcattgagcccactcaacctggtcagtctgaccatagtgtagtggccagtcagaccgtccacggctcggtcagaccgctgccggctcggtctgaccggttgcggctctggcggctctgtatcgccaccaaaaaccagaccagtacaacagaccagtgggccagtcagaccggccttaccacgccagtcagaccggctaacaggcccggtcagaccggcctaaggcccacgatcagaccgcaggtcacttttcagctcaaccaaccgttagtaaaacagcgatatctcttgactcgggtctcggaatttggcattcttggactctatggaaagcttattcaaagggctatccaaaccatgaacaatccatccaagaaacacaacttttctctgggagaaagggctcacactccaaaggatactccaccagacataaccacatgaggctacccaaacctataggatttgcccacatctctctttgtttaggacttgagaaaactcaccacaggctagacaagcccaccaaatacacctacatgcatatgaactaatatggcacaagatcatccacaagctcgcttcatagacccctcttgatagtatggcgcctatctagcaaatccggtctacaccaaacaccaagaccgggaaaagactaagaaaacattcttagctccattatacctttgccttgcgcatccaacttggggtcaagcttgagtcgagatcaacacttgtgaccatttgattcaaccatgtttataccaaggtatttaccatcatttgtcaagactttcttcttatcacaagcttgatttcattcttgccaacatggcgatgtccttggcttggtgaccattaacccatcgtgtcatccattagccttatcatagtaggacctattccttttcacatttcaaaggagaacattagtctcaacaaatcggttgtcatccttcacttgatgaccaaccggttgcatatgaaagatatggatatgtttgttgagttttcattaacatcacaagtgtcatatactcgtatgcaagctcaagtgcaaagattcgatataaataataggtgaacaacatggatctagaacatgcacaataaatgtataggatttgctccccctaaatatatgcatacaaataaatatacaagagatgcaagtgtatgcataattagagaatgaccaatgggggtttatcctatacacatagagaaggcatatgtagtaatgatgtagaccaacataaaacatataccttcatgatctccatgttctcaatgtaaatgagactaaataagataagactcaagtaaacattagtctcacacttatatatcaataacatggaaatcatatatatgaatctatcaaaaagtaggagataagaagtggtacatatcattttatctccatgcatttcatccttgtcatgattaaggtccatcacaaaagaatgcaagtcttccacatctcattatcgggaaataacctagtagacaacttatgcaaaagagaggttaatcccataaacatcggtttatcatctatcaccaaagtaacaattacacaaattgtttaatccaagatctttcaatcttttctctctttggtgatggataataacccgatataaacaatatagagagatgagatgaaagatgatttcaaatcaagatagaaatcttataataaacaaaatatagaataagctccccctcaagtgtacatacatatggatacaaaggaacacatatgcacataatcaatcaagatcaatgagggagctcacactatattttggatccacaagagagaccaagttagaatatgtgaagtttaatacatacctctcatcatttttattttcatatccaaatgagactagtcaaagaaaggctcataaaaacgttagtctcatatagttagatttgtcattaatcaccaaaaccaaattaaggcacttgaacttacagacggtattagcacggtggcgggctcgagcaggcttaggcaggcaaggcgggagtgcggtgacgacgagcacgacagcggtggtatggaggcgcggtggcaacggatatggcggtggagagggcagtggcggcggatttgaagatggggagggtgacagaagtggatttggaggtagggtgggcggcgacagtgacgacgatgagcagcgacgatgacgagaggtggccgagcgatggcgatgaagaacgggattgttggagttttatttttttttcatgatctttatttttgtgtgcgaacaacataagcacctgcacgcaaaatttctattttcacatgcgaatgcgccacccacatgaaaaattagcgattttcacatacactttcagggcatacgggtggtccaaccacacggaaaaatgggttttgaccacatgaaaaattctttttttttaagtagtggttagtgtcttaggggcacaaccaatcattaaattatgagtaatttgtatatgtagcctaatttagggcaacaacttagaagctgttctttattaatatttggatagattacagacaattgcttatagggatgaaataaatattacatagtgcaaagttacaaacgaaatagatacttaagacaagttatgcaagcaatgctagtgcagaaagcttttcgaagaaatcgtagtagttcgagaactatggtatgtatgataaatcaatatggtgaaaagaacgaaggttgtattcgggaggagaggttagggagaacaaacgaaatagatacttaaaaacgaaggttgtattcggtggcgggggaagaagcagggtccgggcgagagaagaagtggcggccaggcgggagaagcggcggccaggttggagaggcggcggcctcccctccgttagatccggtgggaggggaggcggcgatggtggagcgacggcggccggaccggaggaagaatttgtgatgaatttgtttgagaattgtgatgtatttgatctgtgatgtgaacatgttgatgtatttgtgattttttttagaacttatgatgtaattttttcagaatttacgatgtatttgatctgtgatttggagatgatttagtgatttcacgatttgggattatttggggatgtagtgaaatcaatatgcaaggagttaaaaacaatgaaaaaaaaaccctaccaaccaggacctggctctaccatctttagtctcagttggtagcaatctttaatcccagattcatacccccggtttgctactcgggactaaagggggttgcaaatcgggactacaaagggtttgtgcagcagtatgagattatcagaattgttggagtggaactaggaggggcaatagacttgaaaattatgtagggtggctaaattgagttcttgtgcctccaaactattttcttttaaaaaaaactgaaaataacatttggctttcttcgaaagtgcccgttcctaagttttctcatgtgaattgctgcgaggaataagttcactttggcttctttaactagtgattgaatctgattcgtttctgttggaggtatgtcatgagggccttcgcccgacctgccgaaaccgtctaaaccatcaaacatcggctaaatcccagatggacaccaaaggcgaaaccaaggggcgcagcccttgggcgaagccggatgacgaagactaaggggttcgccatcaggcctaagcgaagccaggcaataaaaaccgaagggtacgccaccaagcccatcaatcaaccgaagatccaccaagggcgaaggccgtaaggcgaagcataatgccatcgcccgaagtagaagatactttcgactaaaggcttgggaggccctacggaccatggaggcctttcgccaataatgggccggcccaggaagattgccttaggcccaggaatacaaaagacactgtgggctggtttggtttgaggcctaaattaggcttaccaatatttggcaatttcaatagtgtttagtgtctatttggtttgaagccaaattttggcatgcctaagaaaataggccatttcaatagtgaacttaggctattttggcttcaatccaaacacaactttgccttaccaaaattagtcatgccaaaacttgccaaaatttggcattgacatttttcattatagaatcagccctatcgcttaaggttcctgttgagtacgatcttttttcgaacttacaggggcgctgcgacagctaaataaagcgagcactcggcaacttcaatctcacctctacccgcattgaggtcaaaaccatctctcgatcggggctatactactgagtcgagtttgaggtagtccctttatgtttgtaccttaaaatggaaaaggggcgtggtgccttctagcgggagctgtaacaccacttggtccacaaaccaaaccaaccttgtatacccattttaatatccctatcataagggtaatcatgtaaattcccctataactaaaccctagagggtatgagcctatactaggactataaatagccccctaggccatgtaatggggtgatcctaaaatatttttaccaatcaatatattgttttactattccaacaattcatcgagtttaccatatccttcgacgtgaaacagttgtcattcgacaatagtatccttgaaccacaacaccaaatatcttgacccttcaactattaaaaccgtccaatttgacttcctttggttttagagggcggtttcgctgacgttgcgtctacatggcagcattgacttggtctataacgttgacgtgtcgcttagatggtattagagttaaaaacatatatgtgggatccatttatcattcacacactaagaaaaaattattatgagccaacatataggactcacatgtcatcctctcctcactccttgcactctctcccttctctctccttgcactctctcccttctctctatctcgctctctccccttcggccgcatcgccgcctggcgccgagcggcaccatgctgccacctgcatcgccgcctgctgtccgtcagtgcctctccttcacctcccaccgcatcgctgcctgccgccgagaggcgcccctcatgaagggagagagcgaggaggaagaaacggtgtgaaggtttatctttcttcactacttgcacgatgatgacgatgtggagctaaaattagaagcccatgaaggctcaactgttacagcccagcccataagaaacggttgcccaacacccaactcaaccccctatcttccattctctctcctcccgaaagaccgaaacctcccttcctcgctcgcttgacaccccccctctctctcccccccaaaccctagctcccgattcagatctcgcctgtccctcgccgccgccgccatggtcaccggcggcaaccccaacccgaactccacgccgacccctaaggcgcgcccgagccagccgcatcagcagggcgggtcccc

SEQ ID NO: 28334 - DNA, 748 bp, Oryza sativa
  unsure (1)..(748): unsure at all n locations
ccgcgcctgattgagatntcgatttgaaagaaagcaccccatcagnatagtggaatcctttaacgccgtcagctccctgattctgggtcaatctgaaaactttattgcctataaagatatcctcggcaaaatctcccgtaatcgtatgtacaccatggctgccacggcaatgtgcaccgagtcgatgtccatcgttggtgcatacatgaccatgctggaaccgaaatacgtcgttgctgcgctggtactgaacatgttcagcacctttatcgtgctgtcgctgatcaatccttaccgtgttgatgccagtgaagaaaacattcagatgtccaacctgcacgaaggtcagagcttcttccaaatgctgggtgaatacattctggcaggtttcaaagttgccattatcgttgccgcgatgctgattggctttatcgccctgatcgccgcgctgaacgcactgttttgcaccgttactggcttatttggctacagcatctnctttcaggggcttctgggctacatcttctattcgattgcatgggtgatgggtgttctttcagtgaacactgcaagtgggcagattatggcgccaaactggtttcaacaagttgtgggaagatgatttgagaaattggtgccgcttcttcgcggctgaagcatcatttgggttctgggttctcggtactctctcattcggatattgagtgcaattaaggcttatgagagcaggtactggtttttccttagg

SEQ ID NO: 28335 - DNA, 601 bp, Oryza sativa
  unsure (1)..(601): unsure at all n locations
cgccccctttgaaccctttgattagcttctactgcaagtacttcatcattgcaattcctagtgaggtacttaaaaaacttgattaccttcgatctaggttttattggcaaggggatggacataagaagaaataccggcttgctaagtgggacattatttgtcgtcccaaagaacaaggggggctaggaattcatgacctcgagataaagaataaagcgttgattagtaagtggttatacaaactacttaccaccgatggaatatggcaacaaccgctacgcaataaatatttgggatcacaacatttatctcaagcctattggaaagcggggggattcacatttttgggctagtcttatgaaggtcaaacatgatttttccgttttggatccttnanaaagaggcgcagctcccaagttannttctgnaaaacaaatggttgggtaatgcctcgntaagagaacagtatccgtgtctctataacatagttaggcataaacagtcgactatcgcacagattttccaaacccaatcccccgtgctttttcatggcgacgggnatttaattggtgcaaaactagctgcttggcataccctatgg

SEQ ID NO: 28336 - DNA, 3871 bp, Oryza sativa
cgggtacagccagtgtcgcgtactgtggaaggccctcgccccggtggtgggctcgcgcaacgcgcgctcccgcatggtgtggtgggtggacgcccgccggtgtctcactctctcctcctcgcggaagctccgcgccgcgatgcgcagctacgtgggcaacgtcacgaccttcgcggtcgcgaaggccaccatggaggagatccaccgaaagcccctgccgaaggtggcgtccatggcgcgcgacgcgatccccgcgccggcgtacggcgagcacttccaggagctcgtggactgggtcgaggagcacaaggccgggaagcagcggtacatcgacacggcgagcgtcgggctgggcagcccggcggtgagcgtgacggcgttcgcgtcgttcgaggtggacaccgacttcggccacggccacgccgcgatggcgctgcccacgtcgtcctccagcgcgaggctgtgcacggggttcgtgcagatcgccgcgcggcctggcggcggcgacgggtcgtggatcgcgagcgcgctgctgtggccgaggctggcggcggcgctcgagtccgacgagcggctggggcgcatcttcaagccggtgacggcggagtatcttggtctccggccagcgagtggtagctcggcgaagcgggcaggcatgatcacctctaaaatctgaactccaatagactttgcctatgcgggattcaatatttcagaaataaaataaaaccctttcgtaattttaaacaatttttgactgaatttgaataaattttgctaaatacgaaataataaagatgtcctgccgaagctggtcgaggtggtgcgacaccgtgagcgggcgctgccgctgcggtgctggcctcaccgtcgtacagcgcgtcgctcgacggggcgtccaccgcatggggatggtgtggttggtggacggccgtcatagtattgaaagttgatactccgtctattatttcatattataagtcgttttgatttttttttctagttaaattaatttaagtatgattcagtttatagaaaatgatagtatcattttcaaaacacaaacaaatatattatcaaaatatataatcaatgctagatttaatgaaacttattttttttagatgtggctaaatttttctataactttaatcaaacttaaaaaaagctttaaaaatatttaaaatgacttataatataaaatggagggagtagctattattcaagagtgcaatgcactattgttacgagaggtcgagcttgttgtttttaataaaaaggttattataacatgggatcttgtttgggtgggatgatacacacgaggtattaatttcttatactgctggcgccgaactgttgacgcgaaaaatatacactggccttggagatctgcttagctccattgcaggtccaaaggttgatgagatgcgagcgtgccagtcagtttgaccctgcaactgataagatatacatatagcagatcaatgagccgatcggctgacaagccaatagattaatttcagccgatgccgataccagccgatagcgatagggttttgagctatcggctataattctgatgtagattttgacgcctgatgtaaataacaatataaaggcaatcgactgatgataaatgcaagaaagcaacaatataatccagtagaaaccaatcggctaacaataacatgatagaataagcactgatatgaaggttaaagcatatatcggttggtggtccaatgtcataaaatccacaagattagataaacagtgaaatctctgttatcatcggctaaatccaacttacatgtaatccttgcaagccgatgcaatgtccagaaacctcattggctgaaacctcgatgaaacccttattggcagtcaaaaagtaggctatggattatggttctaaacatgacttaatagatcaaacttaactgatgcagcactaagtatgaaaagaaatataatacctagacaatcaagctcttgactgacttttagggtggtagatgccttagctaatctaatctagtaaaataatttacccgataccggcaaaaaccataaagcgagaaacaaccgatagagctaaattgagatactaagactagattaattaagacatatgataaataaataggcaaatatatcatccatactagagcaattcaagaggtcgaatgtactgatgcagccttggacgacgccgacgtaaatgagacaattgcctgggccggcagaacgtaggacttaccccttcgccggagatcgaactaaaccgatgcagccccgcgtcaggttccaaattccgccgattgataagtaaaaacctcataaaagagggtgacgatgcgccgagaatagttgtattgatcgagagatattacaatgaccctgggtgtatatatttttactaatggggagatactagtccttgtacgacaagaaagaaatttttctaaagataaaaggaaaacataaagtccttataggacactaaacacactttactaaagataaaaggaaactaacaaactatttctaattaataaataacttgccatgccgcattctcctttaacttggtcacttctggatcagcttcctttaatagattaatttccttaaccgaatatagcaagaattatcacatcggttattggcggtgtgataattctctcaggggcttaccaaatttcactgttaacaagaaaccatctttagcaagaccccttccttccccctctttagcgatgagctcctcggagacatagtaaggcagtgcggtctttcctcccggcgacatgctatccggtagcacggcaaggcggtggggccttgctccattaagcctctcatgctacatgttgtggtggctgccaccgccatctttccctagcggttcaatatagcgttggccatggtggcgttggaggaggtgaggttgccgctgctcaattattgggcgtgctgagaagtggtcgggcctcggcgtttgggaggagagcacgcttctgcttcgactccacgtagagcgattcctgcaaattataggagcgaaacaatgttattttgtttttgaattgattctaatcctcacaggaatgttcactcgtatatatttttcttaaattcaaattaaatgcttataaatatttttaaaacactataatataaatatagggtatagtaacttctatccctcactaagggcctgtttagatctcccggcatgcatagaatatttggacacatgcatagagtattaaatataaacgaaaaaataactaattacacagattgtgtgtaaattgcgagacgaatcttttaatctaattgctccatgatttgacaatgtggtgctacagtaaatatttgctaataacagattaattaggcttaataaattcgtcttgcagtttacatgggaaatctgtaatttgttttgttattagtctatgtttaatattttaaatatgtgttcgtatatccgatatgacacgcccaaacttttcacccacgtaactaaaacaccccctaaaaatcaagtttcaaactcgatcaacgatgttgggtgagcttcgtgacatagagtcaaaggaatcttgtgtttctcgatcggcagcaagtaattaatcaagacgaatattttgtggtaagttattgagatacgaaattgctcgtgtgatatatatatatatatatatatatatatatatatatatatatatatatatatatatatatatatatatacatatatatatatatatatacacatacatatacatacatacatacatatacatatagtatatatatatatacatatatatgtatatgtatatatgtatatatgtat

SEQ ID NO: 28337 - DNA, 22793 bp, Oryza sativa
atacatatatacatacatacatacatatatacatatatacatacatatatacatacatacatacatatatacatacatatatacatatatacatatatacatacatatatatatatacatatatatacatatatatacatatatatacatatatatatatatatcagagccaagtgctcgtaacctccccaagccatcttctccgaaagggggggaagatgggtcgggtagcgtgctgaagtcgcggtgatcccgaacggtgtggtggtgttctgaagtcgcggagttcccgaacctttgatcggttgcccgaagtcgcgttgccttgttgagccacagaaggagtttgtcggcgtaattcgttgactgggcacttatcaaaggcaaaggatgaacttaattgtgggaaatattccctgccgttgactggaacacatcatatccaaataggttgatcataattgtgggagatttccccgccgttgtctggtaactacctacctatcttcctatctttcgtataagatgtcttggttggttagatcacgaagagccactgatcgatctgtagcctcgtgcagtagcgagaagtctgttggcactatgtcggtaaagaatgcttcatctatatcttttgaggatattgagaaaagtatttccaactggaagattcctaaggttaatattaaggaaatatatcatgtaggtactttttcgttacttagtaactactatattaaaacaattgaaaaaactattccaattagttctttgcatgaaaccctgcatcttctttcagaaagagaaatcaattctataagagctaaacatcaatatcactaccttcactttggtcttatacaagttgctatcagatccttgactagaaagggtttgaacgtctctgttctggcttgtctaagagattgcagaaataaaaggttcaaagattccttacttggcatgatggaagccagcctcagtaatggtcttgtttattttaacacctttcctgatttttctgtatccctctcagacacagatatccataaagttctcactctcaacttacaaacatctggttatgaactagaactagggagtgaaaacatctccgttacctacagagtttactacaaagccatgacaactttagcaccttgtgccaaacattatacaccaaaaggcctaaccactctccttcaaaccaatcctaataacagatgtactacccccaaaaccctgaaatgggatgagatcaccctgcctgagaaatgggttttatctcaagctgttgaacctaagtctatggatcaatcagaagtcgaatccttgattgaaacaccagacggagatgttgagataacatttgcttcaaaacaaaaagcctttctccagtctagaccttctgtcagtctagattctaggcctaggacaaaacctcaaaatgttgtctatgctacctatgaagacaactccgacgaaccttcaatctcagacttcgatatcaatgttatcgagcttgatgttggctttgttattgccatagaagaagatgagtttgaaattgataaagatttgcttaaaaaagaactcaggcttcaaaagaaccggcccaagatgaaaagatactttgaaagggtcgatgaaccatttagactaaagataagagaactttggcacaaagaaatgagagaacaaaggaagaacatctttttctttgattggtatgaaagtagccaagtcagacacttcgaagaattcttcaaaggaaaaaacatgatgaaaaaagagcaaaaatccgaagcagaagatttaactgttatcaagaaggtttctacagaatgggagacaaccagtggaaacaaggtagactctgttcatcctccatttgaatccattcaattatctcataatagaggaaaagcttgtccactaaaaagtatttctaaaaatacatatggagaaacagcaaaggttgaacacataggacatttggtagaacaacaaaattatgcaaatatatctctacgttctcttggtcaacaaacagatcgaatagagacaatccttatggaaggctacaaaacaagaagacctgaggtaaagataaatattccctctaattctcagtcttctagttctcagtctgttagtcctatgtttgtcccaacaattgatcctaacatcaaacttggaaaacaaaaggcttttggacccgcaatttctgaagaactagtcagtgagctagccttaaaactaaataatttaaaagtaaataaaaatatcaatgagatttctgataatgaaaaatatgatatggtcaacaagatttttaaaccttctacacttacttccacaactaggaattattaccctcgaccaacttatgcagacctacagtttgaggaaatgcctcagattcaaaatatgacttactacaatggcaaagaaattgtagaatggaacttagatggctttactgaatatcaaatctttactttatgtcatcaaatgattatgtatgctaatgcctgcatagctaatggaaacaaagaaagagaagctgccaatatgattgtcattgggttttctggtcaattaaaaggatggtggaataattatttaaatgaaactcaaagacaggagattctttgcgcagttaaaagggatgatcaaggaaggccattgcccgatagagatggtaatgggaatccaaccggtaacatttctgatgccttagccactttaatctataacataatttatcactttgccggaaactatcatgatatctatgaaaaaaaatagagagcaattgataaatttaaaatgtaaaacaatgtcagattttagatggtataaagatactttcttgtcaaaactatataccctaccagaacctaatcaagacttttggaaagaaaaatatatttctggtttacctcctttatttgctgaaaaggttagaaattccctaagaaaagaagggggagggagtataaattatcactatctagatattggaaaaatcacacaaaagatacaatttgtaggggctgagctttgcaatgacctaaaaatcaaagattaactcaaaaaacaaaggattcttggtaaaagagaaatgggagatttttgctatcagtttggttttcaagatccttatgtctatagaaaaagaaaaacccattccaaacctatgacaaaaccaaatgataaaagcaagatgagctttcaagctaccaaaagaaaaccaaaaagaatttacaatatgaacataagaacacaagacactgaaagcaaagaaaccatttgttacaaatgtggcttgaaaggacacatagctaatagatgtttcaaatccaaagttaaaaaagagatccaagccttgttagattcagaatcagaagatgttaaagaaaaacttgaagcaatactaaataatatagacaatgactcaagttcagatgaagaaaaaaatgcagagattaattgttgccaagacagtggttgctcttgttatgagccagataattcagaagaagagtctgatgaaaatatactcgttttaaccagtttagaagaatttgttctcgatacttttgaaaccattcaagatccagaagaaaaaagaagagttcccaaaaaattcctttcaagagtcaagactgataaggataaactaaaaaaggatattcaaaagagcaaattcctccctattgatgaagtgttcaaaagattagatgaacagaaaaagaagaatgagaaatcagatttgatcagcctattctaagaccaaaaaattatgaaacaagatttagaagaaataagaaagcgtctatacatgttagaattaaaagaaggattccatatggaagaaaaggacgaaccaattcaagaagatgatcaggttgttggaaccattcaaaaatatacgaagcaaaaatggtacgcagaagttatgtatcgttttatagacggatcctattttcagcatatcactttaattgattctggtgctgatgtcaattgcattcgagaaggtattatccctcataaatatttctgtaaagccacccacagaattcgtggggcagatggaggacttttaacagtagaatatcaaatccctgaaatctatatttgcatatctgaactttgcattaaaacatcttttctactcgttaaaaatcttaagcaagatgttattttaggaacaccgtttttatcactcattcgtcccttccttgtcacaaacgaagatattcaatttgagataatgggcaaacaggtgagcctaagattttcgtctaacacagatgagattcttgaccagcttgttcagaccaaaagagaacaagttgtgaattcaatatatttacatgacaattctttcccaaaatctatggacttgccaggtaagacatcatgggaagatagatatttattaaaagctactaaaaattttgaatatatatgcagggaaatggcttcacagaagtctgaatggttcacgaatatgagttcatggagactgccccaactgccgagaggccatggagaacgatttaatcacaatttcagagtaacagagctacaacaagagttattaaacctcttgtggaaggcaaaaaacaaaaaataaaaagctcatgccttaaatggcctggcatattatttcaaaaatttcgtgccctcagatcaaaagataacagaaaaaagggctaaactacaagatatccctcatcatgaggagaggttactagattatcgcgagaagaaatcccgtgatggccaagataaacttcccatggaagttgaacaatctatggcaacaaataagaataccaaggtattctcagataagattttgatctcaacagatcctgcttcgagcatggttgctttccacataaatatcaataacctattgcaatcttttccacataataaaccatcatcatccacaaaaaagcatgataccattccccaaacaccatacatactgcataatcatcccaattcattccttccacaatatatactctggacccagccaaaagctccatgtagatcttgtgcctacaaagattcttgccaaaagaaacttaaaagccaaaatcccatgagtaccacatacgaaaatctccaacctagattaagcttcaagacggagcaaactttatcttgctttgggcaagacatcctcgatcttgtttggcaaaagtttaaggagagacaaatgaaaatattccttggactccaagattatttctttgatctcttagaaggaagagaaagaaacccagccatacgagtaatcatatatatgctccctctcttaaggctagatgatcaggcaatctctgacccatcctatagattcctggttctcaaagctgagataaatctccaaagattccggaacctacccacatacaaccatgaagaaatatctctccaaaccattatagatcatggtcttgtgaattccatctatgcaaccctcgatcagatccttcaatctgatttaggaagcgctgtgaaagatgtctgcaggagacttggacatggaagatacaggattatcttctcctccataccaccaaaattcacaccacctgttcatccaacaattcattatatatatatatatatatatatatatatatatatatatatatatatatatatatatatatatatatatatatatatatatatcatgaatggacaatttaattttcaagaagacagtcctagcaaactatcggatgaagaggaagaaatatatacaacaattgctaatcatgaaaattggagattattttctgaagctgcagaaattgaagaagctatcaccaccagattatgaatatcagctagttttccaaaacaagatcacaaggatttttatcagcaaatattacaaccaaagttatgaatacttcaagggagcagggcgcataattaaaccggattttggaaatgaatgctccaagaaaagttactacagaagcctggctcagtggtttcagaaaaaaacagagccgtcagagatcgacacggtgcaatcagcacccacgataatcaacgaagataatgaataaagatcttgtcatccccgacaaagatcactattcaagataaggaatctacactattcaagataagataagtccatagtcaaaaggcgatattatgacatctttattaaaggtctaaagcgtcatcaccaaagattctctccatgaagtctaaaggggtatcataaactctttgaggtcaagaagagatatcatgaagatactctaccgagcgctatataaggggctcaccatcacatttcacaggcatcgcatttcacacacaacacatctcactcaaccattcctctcacctctccaccagccatcacactccactccactccatctaagtgttagtactatagtataacctaaataaaagactcatgagagtctaagtgtgagagtctatgtaagagtccttgtgagagtcctgtacctgtataattacgaacgtgttgtaccaagtccttggtgtaatcttcagaaggatctaccttcaacctatcaaggtatatgaatgaacacctggactgttctatataaacctactatgttctcaatatctaattttatatcttgtacataatttgtatttatagcttgtctttatttcttgtactgcatttatgtttgcataataatataaaaaaaattaacaacctggattgccatccaattgtcacatactaatctcacatccaagattgcatatagagttcatgatatcgctttagacttcatggagagaatctttggtgatgacgcttttgaccttcaataaagatgtcataatatcgccttttgaccatggacttatcttatctggaatagtgtagattccttatcttgaatagtgatctttgtctggaatgacaagatctttattcattatcttggtgacaagatctgtcgtcatatctcgactaaatgtgtgttggattgaaatctaatattccttcatctgaatcattatcttgcttaattgagtaataaggaggtattggcgaagatggcttaatttggctgcattgtaccatatcttcgtctagacttctgcatgtagaactagattttggggattcttccaatcttttaaacatagtttcatatacttgaagttgcaattctccctttgtcaactcggatcttgcctttaataattctcttgttatatcttcttttaattgagccacatgagatttcttgtttttggctcaaaactttcttccttcaattactggtgtgattgcaaacttatcccaccatcttgcataatagtttcgctttaaggttgctgggaactccattctttgaatattgaggtcccattttagtatccaaggcatccctgtttcggcacaaaattgcataaggataaaaggatattccttgagatccttttttgattcttgtgtaataactttgatgatttcttgtggtaggatttcaggaatggcccctactttcagccaccaattactgaaaaaccacagtggtatctcctcacatccttctttgaagcgaataaaccatgaatgcttcatctgggaattttgtacaaggagtactctttcccaggccttctgataatcccaatagttatatcttttatttgcacaggatgtagaatatatagtcctggcaacatatggatttgatgatttatcccaatcatcgatacttataattttttgggtcaataattttgtgaatcccaattcatcactattccttgtatggaatatctgtgcacttcttgtctcgcataatatggtctcataataattttgatctttccctggatatttagggataaaatattggtgttgtgggaaatactttcccataatcttgataatattgagatcagagtctccaaattctaatggcagaattacttcctctatattgaggatataagatgaattattcccatacttttcttgaactgtaggggttctaggaataatatttcctagttcattatatttatgcttatttggtgaactttctgtagttctcccttgggctgataagtcccttttaggtgccatagccctgtaaaattcatgagataagaaatctggtagggagtttaattctcccttgatatgttctatttcaaagtcaaagcatgataatattgcttgccatctggcaaaattttgtttggagactaagttctccacatccttttggaggacatcttttgctgccttacaatctatacacggcaagaatctttgattcaataattctccttggaattttgatatgacctttactatggccaatgtttcttttttgatggttgaataatatttttttgagccttattccaggtcccagaggtgaacctgaccaactgctctctggaatcctttttttgtttaagaattcctccataaccatgatttgaggcatctgattcgataattttgaaggcatcttgatctaggatataaagacagggcaaggttttgaccttacctttgatcttcttaacagcttgagtatgtttagctgtccaagctggaggctttttctttaacctctcggttaaaatctttctgtcttttgcaagatctttctaaaaatcggagacatagtttaaacaccctagaaatctttgcaactgtgttttatcttttatctcatctggaaatttttctgcaaattctattactcttgctactggttggactcgatcatatttatatatgtatgtatatatatatatatatgtatgtatatgtatatatgtatatatatatatgtatatatatatatatatgtatatatatatatatgtatatatatatatatatgtatacatacatatatatatatatatatgtatatatatatatatgtatatatatatatatgtatatatacatatatatagtaaatttgtttggtgctccatggtgcccgggcaccattgttgaaattgagtatatacctaattcaaatgagtatgaaactttttcaattacttaggtattaacattagctactttactaactagttcaaagcaagtttgaactgaatttgaacttgtttttgttagattttgattctaggtatatagcatccatacatataattagttaggtatgtaatcatggattgtgaaataaagttaaatttgagttgttttgttgataggtataggtatgaatcgagttattataactaggtatatactcacaatttgaaaattttgaaaaatttgagtgattttgtgtatttgataccatggtgcccgggcaccatggtgccccatatgagtgtcctatatatatatatatatatatgtatatatatatatatatatatgtatatgtatgtatatatatatgtatatataccgtttgaggtttacccaatccgaagcttcgttgcatcgatcgctgtcatcatcgagatccggcgtgttgacgatgaaaacactaaatacgaaggaggtcgcaccaacttttcacacaaaaatttttaacattgtcacatcgaatatttggatatatgcatggagtattaaatgtggaaaaaaaccaattacacagattacgtgtaaattgcgagacaaatcttttaagtctaattgcaccatgatttaacaatgtggtgctacagtaaacatttgctaatgacggatcaattaggcttaataaattcgtctcgcagtttacagacagaatatgtaatttgttttgttattaaactgcgtttaatatttcaaatgtgtgtccgtatatctgatgtgatacgcaaggccaaattttttttttaaactaagctgggcctaataggaggtggatttttcatcccataaatattttatgcatttcatccaaaaaaatcatcaaatattcttataaatgataagatagatcgtaaggtgctatatcactttacaaattatatgcaagtttaaattcaacatgtaactttttttcaacttttttttcaacttgaatttgaatatttacatgattgaagagtgatgtattacatattaatctatcgttaaattttttaacaaaatatgatttttttaacgacattaaaaaaagaggcgatgtccctagaggaacggataaacttttatggtagaaactaattatttattatctctaatactttaaagagtaaaatgcatgggcggtccctaaatttgtgcgggtgtgtcaattaggtccctaaattctaaaaatgaaattttgggtccctcaacttgtctcgggtgtcatataggtccaaacaggttccaactcactccatgtggtgacgtggcataccatggtgacacatacgtgtcagtagaacccagttcagccacatatagaaaaaaattaagaacatattttttcttctctcttttttcatttattttttcaaaattaaaaacatacttttcttctctcttttttaatttttttccctacttgactgacatgttgatgccatatcatctcacggagcgggttagagcccgtttggatctatatgacacacatgacaggtttagggacccaaaaatgtattttgagagtttaagaatctagatgacacatctgtataagttgtataagtttaataaccgtttgtgcacttcactctactttaaaaatggagtcgtcctccttccatcatatacttttcttgtatttctcatcgacaattaactaagaagggtattccgaggtaatgctgcatcataatgcatacgatttggatgagtaaggaaataacataattaggctagttgaaagttttgttaaaatatataaccatcgggactatgaaaacactgtagagccacagtgtttgtctttatattttgaatatgggaccagagcatagcattgactcaacgatttctttgttgatttctttgtttagagcaagtacaatatagcaaagtctcattctagcgccaaatacatcatccaaatacacatgtggaggggagcaagaaaattggagagagggggtagcgggcgcttattctagcgccaggctgcagcataataaacaatgtaaatcataggtaacgatgcaaatcaggaaattgcttcccatctgctgtccgggcaaaagagaaaaatcgaacacgcttcatgcaagcctgtgctttcaagtgtgcatggggtgtgggacccatggaagggtcaatcaaaatgagagggatgtatcgagttaagacttcaaaattcaaatgtttttttctcctaaactacttatccaatctaaaatccggttacaccattgtatttgttggaactaaatcattataacaaagatatcacatgattatattccaattaaagaaaaatataagtttcaaactattaatacttcatgtttcatacgttatatccatatgtttcagcgcctgtttttaatgtgtttcacaaaattctcaaaaataattgccactatcctctatcaatgcttgcatgcatacattttagcggtctttaaaatgatttttcttctaaactacttatccaatctatgattcgatcacactgttgtattcattgtaattaaatctttacaacaagatatcacacgattatattttgatgaaagaaaaatatatgtttcaatctattaactctcgttgtttcataagtgatagcaacatgtttcaacgtgtatcgtcgctgtgtttcataaaatttttaaatgtttccgttgctgtctttttgtttcaccatatataaattaatgtttcacttgttgatcagctgcaacattttaaccgaccgatgttttttgagatatcagacgtccgattggtagtattctcctgcaaatcaacgcaatgtgctggccctatccaaagaacaaatatcattggacagagataagcaaataaaattgagaacatagataattacttcattgtctaggagagtgtgtataggcagcttagcaactagctaacgtctcttattggcatgtacggccaagtttagttttaaactttttcttcaaactctcaacttttctatcacatcaaaactttcctacacacataaacttctaattttttcgtcacatcattccaattttaaccaaactttcaattttaacgtgaactaaacacacccaaaaatacgaaccatctgttcagattctcttctcgatcattctctctttaatttatgctctttccaccgaatcagcctatacatgccacgtgtatcgtgcatccgttctagcgaacattcccaactagtactagtataaaaaaaaggaaaaaactactattccatcttgaaaaatatttaaccattagcgggagagcgctacgcgtcggacgtacggcgcgagacgaaaaatcggacgccttgcgcgaccgtccgatccatgcacacgtgcgtcagccatccatcatgcatggatcaaacgaattttaaacaattttttcccttaaaatatttatctaaatcatgatccgattgcactattaaatccgttgcaattaaatgtttaaaacaagaccacacatgaatataatccaatgaaaaaaaaatagcttattattgaattattttaaaatgttgcatgctgttgcgccaaatatatcggaatagtttcattgagtagatcgaaaatgttttatcggatgctgtttcaccttatatgaaaatagtgtttcagcgaatagcgaaagtatgtttcaattcactgcaacatttgatccatacatagtgaaacatcatgagtacattaggtgaaacattttttaaattaaaaaaaatcgaacggttaaatgttgcagttgaccaacaagtgaaacattatgttatatatatggtgaaacaaaaaaaatcagcaactagaacatttaaatattttataaaacatggtggagatacacgttgaaacatgtcgctgtcacacgtgaaacaacaagtattaacggattgaaacacatgtttttcttttatcaaaatataatcaagcgatatcttgttgtaaagatttaattacaacgaatacaatggcgtgatcgcatcatagattgaataggtaatttaagagaaaaatcattttgaagctttgcgaaaatacatgcatgtatgcatgcatgaggtggagagagagtagtagtgggtagtttcaggaattttgtgaaacacactttaggcacatattgaaacatatcactatcatgtatgaaacattttgttttaacagtttgaaacatatgtttttcttttgacataatataatcatgtgatatcttgttgtaaagatttaattgcagcgaatacaacggtctgattggttcgtaaagtaatttaggagaaaaaaaaatatttaaatagaggagaaaagaatgaaaagaaatagttagacatgtgcatgtatgttacagtacgacaagggtttgtccaatccaccaggctactgatttgcagtattttcctgacatcaatagagagaaaggagaaattagcaagtaaggactgagctgaccgtaggcgtccgacgtttttcatctgatcggacgttcgaagagaagcatttttgacattagtgtttactaatttaacacctataaaccggaggcaactccggcttggacgtccgatgtttgggggaaatcgggcgctgacgttagcgcccgatttacgtgcaaaaactactttaaactgattttaatcttaaattacttatccaaatcatgattctattgcaccattaaattcgttgcaattaaatcttcaaaacaagaccacacatggatatatttcgatgaaaaatttttttagcttattattgaattatttttaaatgttgcatgatgttccaccaagtatatcggaattgtttcactacatagatcgaaaatttttcactcgtttaaatcgggtgttgtttcaccttatataaaaataatgtttgagcaaatagcgaaagaatgtttcagttcactacaacatttgatccatacatagtgaaatattataagtatactaggtgataaatattttggtggaacaataatagggggtttccaaaatatgtgggttttttgttgcaatggactatttcagttcactgcaacattagatctatacatagtgaaacattgtgagtacactaggtgaaacatttttgatggaacaaaaaataaaccaaattcccttaataggggtttgcaacggcgcgttccataatatcaaaatccactgcaacatttgatccgtacatagtgaaacatcgcaggtacactagctgaaacatcgtaaaactactggttgaaatatcaaaagagatcatatgcaatattaaaaaaaatatcaatagaaaagctaaaatattttttatcaaaatataatcatgtgtggtcttgttgtaaagatttaattgcaacgaatacaacggtgtgatcggatcgtagattggataattagtttaagagaaaaattgttttaaaactagttaaaataggagcggcagaggcgcgggggcccgaggcgtccgatttttccaactgccgtcgggcgcccgcgcggagcattctccctgtaaacctacaaatgttatacacatatggtaagttattaaacaccacatctaaaatgatatatagttaatgccataaaaataaactagtactactagtagcaccctaaacccaaattgatatacgtctcttttcgaaacaatgagcttcacttctttaagagtctccggctatcaaaaactcctcaaacaatttagaattttcacctaaaatctaactaaaagccagaaccagctgttttttagaattttaagtttcacaaacaaacattttaaagccatcagtcgattacaattcagctagccaccatcactccacctgctgaaagcactgcccgagtagcagagcagtaacaactggagtagtaaacaagtaggaatacaaagcaagaagaattaatggccagcgtcgtcaatgccgccggcgacctgcacgtccgggttgtgagccggcgactcgttcaggcctccgacgaatccctcgtgccgcgcgtcctcgccgtctccaaccttgacctcctcccgcaatccatgcaggtctccatgctctgcgtctaccccaagcccagctcgatcgccggcggcttcgacttcgacgacgtcgcgtcgtcgccgccttcgtctccggcttgccggactttctcagccacttcttccccttcgccggccgcgtcgtcgccaacccgttctccggcctccccgagatccactgcaacaaccaaggcgcggagcttgtcgtcggcgaggtcggcgtggcgctcgctagcctggactacggcacgatgggcgcgtcgttgcggaagatccagctcccgcacggcaaggacgtgccgctgtcggtgcaggtggtgtctggcggatacaaagggtggtccgggtggttccgggaccacccaaaaaaaggcgatgaacccctattaatctttttctattataaaagttttaagatgtttttaccagaaactttcgtacgtcacctttgttgagtcggtttcgtattccgaatataaggcttctgtagaattttttttgtccagcgtcgcacacgctcgcgctgtccgattccatcacccggcatcgagcgcgcgttttccgcatcccgtgtaaaccacgcaaggcccacgactgcaagcaatcaaacccacaagccaaatatgaaacccccgtttcaaaagttcccaaattagaactctaaatttcaaattcagatgatgaaaaacaccaaatcaacacgaaaggaagttggatatggatttgatttggactcaaaatcgggtgaaattaaccccataaatacaaggatttcatgggactgctacaacaagaaatcgaacaagattgatcaattggtgagatctcacctaatttcacggaggcggctttcctcgctggcaccgtggacgaggacccgccgtcggagccccgccggccgaagcgcgcccgtgccacgggacttgccatccacaccgccagatttgcaccctaggtcaacacctccgctcaagccgacgccagatcagccgcatacagcccgcgaccgagctccacctccagtgccttgacccaccgccctgaggtttgccgccggtaccgccgtccatgacttgatctccgtcgccgcccgtgcccggagctaacaccggatccgccgcctgcgacccgagccgccaccgaatccgccgcccgcagcacgcgaccgatctccacctcttgtggcttaacagcaccaccccaagctttgccactggtactgccgccgctcgcgccccgagccgacgctagatctgccgcctgtaacctgagccattggcggggcaaagggcgcctagctgaggggtaggggagcggcgtcaccagtgtggggaggaggagggggagtaacgccgctggtagggggagagggagggtgtcgccagctgataggaatgcgcaacagagaaagagaggaggggagatttgcccccccaccagagcgaaaagtaggagcggtggaggcggcagcttgatgtgccccccaccgcaggtccacgccatcgccagatccacatggactggctcagctcgatgccactctgctcatcgccagcctcctcggctggctcagatcatcgtgtgctcgccgtctcccagccacctccgctgcctccgttatgcatgcagagaccggcgaagccggtcgcctcttccatctatcaggcaaaaccggatcgagtagtagcgcagtacagtggagcatgagaattggaagatagagatggacggggaggccaccgcaccgctcccaaagaccacatgcgaacttgcaggtggcattgactcctggcatttttttattttaaaccctaatagtatcttttatatatcctatacttcagtaaatacaaaatatttttaaaaatacccctaggttagtactcgcacattaatatccaggaccttggaagtttcaactttttgagactgatctgatgtacaaagagtaatcttttatggctttgcatattgagttgactatacagtccttaacctaatatatatatatatatatatatatatatatatatatacattatataaatttcgtgattttcatgtggtttgacaaattttgttaatctctactattataaaaattgaagatgtttccacggatactttggtgcgtcatccatatttgagtcggtttctaaattcgttcgcttttaaaaatacataaggagtcgtataaaaaaatcctttagaaaaaactggcatgctcccctgtgattagagtcggatacctaatttcttcagaattttaacaagccatagaaaaacaatatataggatatagccatcatcccaaccaggatacggattagatatcaataatatctcaaaataaaattcccatgtactttttagataaaaatatctaacaataatacgattaaaatagcattcacccgttgcaaagcacatgcatgttttctagtaataaaaaaaagaaaaaaagccatataatccctattccctagtcccgacgcgctattccctaatgacggctgcagagacggagagacccacacacgcgcgtatggaatcgatctgacgcgatcacgactctctctgtctctctcctcatcgccgccgtagcctatagcaactgccctagcctggctagcgacgagccgatgagagagtctgcggctcacgcttcagctcatggtgccagctggcctagcttggtgcggctgtatgagcccgacagaggagtaggacgacgcggccaggacagcactctcgtacgtcctccccaacaacagcgtgggctccttccgatgtatgacttctttggccaaggccacggtggcgcaggcgtacgtggtccttgctgtgcggatagaaacgacactccatgtcgagctcagggcatctttttgctgcttgatgcttcattgcctcctctccgacctctcgccaatggccaccaccgatgaatccatgcctggagaaagaatgacacgtttcactcacatgtgggacccacaatctaatggaatgccacgtaagcgtcccctaaaaccaggctgattaataaggatcttgtttacaccggttttaggagatgagtgatatgttgtactatcaggtttgtgatcgagggatgtgattaaaattcaagcttaagatgaggtatgtaaagtaaacttattccatttggactatatgctccggcaatttcggcccatacatgctgtcaaatctgtctcttagaaaatttggcctatttcgcacgcaaatgcggcccactggcccaatagtgattgcaattttgtcccatatccgcatgcaattttcggtcgacttaaaactagccaacgtgaagttttgcgctattggggagaactacaaatcggacgtccgatgttgtaaaaaaattgaacggtcaaatgttttagaagtggacggtcaaatgttttggatgttgtaagactagcatatgggctgaataacacggaagtgcaatgtccattcataatcaatagaggttttatactatctatatctatgtttttaaatagataacatcgttaaatttctgacatacatttaatcatttatcttatttaaagaaaatataagatagatagttaaatatgtgtttaaaattcaagaatatcatctattagtagaaaacagagggagtatatatggtcatttcatcactataggccctgtttggagaagtagtccagagttattttgagagccctccaatgaaatagcccttgagctgtttggatgcaagagctatttgacctttagtatacttttccaatcacaaataccccttttctctctttctccactggatcttttgcacatgtgtcttggtgtggccggctgcatggtcagtgctctacatggccggctgcatatgccatgccgttgtgctctatcactaggacagtgctctatctcataagcttgtagcataaagggagaaaacaataaagtttttttatttaaaaaaagagatcaaattgctccgtggaggcgtggagtgctcattccattgcataagcactgatacatgcattgcattcttcgtgcatacattattcaagcatgtgcatatattattcaaacaaaaaaaaatcgaagccagatgcttggatttggatctttcgagaagaaatcgaagccaccaccctccatggacaagaaaacaaatcgagcagtggagggccggtggcggctcaagtgggggccggcggcgaagcggttgacggccggcgaggagcggggccggcggcgctggtggggaggaggtgggggcggcggcgctggtggggcccgacgaggagtggaggcggcggcagcgaaaatgccccgcgcttgcgcgcgtagtcgtgcggagagagagagaggaggttgcgttttctgatcccgtgcgtctatgggagagagaaaagccaccttttttagtgggccccactcaaaatagctccaattagcaccccttgagtggaatagtttttttgggtgggctatttccaattagcccttaaatagctcacccttttgaatcttttggagctatttgggctatttaagggagggataaaaatagcccttggatacaaacagggcctatgttccattcatgcctgtgatatttatatcgtactgtttagatgccaaatttcataactactttcatcatccttgttaaattgtattctgtctggattttctttcttttttaaaaaaaatactgcatgtctatactttgtactgctaagtcctaatctttacaagtagtaagataagaataaataacaaatcataaggtttttagtcatcaagttttcagctttctccattttaaattatttatacatcgttctccgtttatcatcctaagtaaaaaaatttctatctctaactatcaatatgttaaaaaagaactgtagagtttaacggtggagtagttctctaggtgaatctgaagcccatagttcgctcgctaactgcgtagtctctgctactttaacgcctggtcctcttcccaccgagaaaccccgtaaaaaaaggaaccggcccatccttctgaaatgaaaaatgtaaaataatttatgagacttcctttttgtcagcattgcaatgtaactagttctgtgaaaagaatatatagggtccaatttagagtaaattgtactttgggccatgttttattgctaaaattttaatttggatcaccctaaaaccaatcttttttactttagattaggtaactttacctttgttgtataatgaatcaccctaactatattcactagtcatgtctaatgtctccttgataaaggtatggcatgcatataggttaactatattcatcggcatgtcgttaataatttgctcgaagtcattgaagtgatgaagatatggtttagggtggtccattgtataataaatataaaattatcagtctaaaatgaaaagatcggacaaaggtgatcccaaatgaaactttagcaattaaacatggcccaaagtgaaattaactcaaaagtttatagtaattacgacttctcacaaaactttcatccctttaaaatggttcagattgtcccgcagattcttgtcatctaaattctgaaaaatatgtaatcgtagaatgcataaaataaaataaactaaaagctagaggaactgaaaaaccagaattttaactcctcgcacagagtcataggccctgtttggggagcttctcccatctgcggtttttcccaaaagctgcttctgctagaagctaccccaaacagtccacagcttacagattctgaaaaatgaactaagaagtcagaagctgaaggaactaagaagtcagaagctggagaagctgggtttcagagcttttctagactctcagaagctaccaaacagctgctgctcaaaatctaaagctccccaaacaggcccgtagtactaccgtcataacattgcttccgagcagagaaagcaggatgcagatgccgttacctgcatatatagagccatagatataaaaccggagcatcgctttttggccacttccaacggacgtagccgtctcatgcctaccaaggatcgtgcttcgtgcatgcagatagttcacgattaatttatttgctttgttcatttgtgaaaaaagtacagttttgatttgtctgaagagtgcgtgccaaacttcaactttaattaagtactagagagtaggcaccagagacttgaaaagttcagcaacttttggtaaagtaggtaggtagattcaccattgcattgtgcattgaaattattataggaccaacacgttgacaatttaattttcctaagctcgatctcatcatgctgataagttattaaaaagtaaaccaaacaatttaaaaaataaattatggataaaaaaattatatattcgtgttggttgcagtttaaaagctaatgctagaaaacagctatgatgagaaagctaaaaaataattctaacaataaattttaaattttaaattttggttgcggttgaaatcggtcgatgagaggcataaatggcttgccttggtataatgctgtcaacgattgagacgtgcaagctactcgctagctagcaagcacacatgagatgatcaagcagctccagttggtggccgaacttttaggactatcctgaagtgggttatgagctactatagtttaacagtggagctacatatactatttcgagataacatgtatgattagctataaagttttcttccctctctttctctcacttatataaaacatatgtagaatggcttatagcctactattaaacttgctcttagggtgagtctttttcctattggttgtggtagctcgacgacatataaaatgagacaagtcattagtttattatgatcaattgagtattaattattacaaatttaaaaaataaatgtatttgacctttttctaaagaaacttctacataaaatatgttcaaaaaaacagacataccgttcaactattaaaaagagttgctaacgaaaaataaaagaataacagtgggacctaagatatggagtatagtggtgacggagcgtggggctcctcaccgggagaccgcgcaggcccccctttgccggttcggccgggggccctggtgaggttctaagctcctggtctgtgtgtggaaggttcgcgagagtggaaaaagcacaggacacgggcgatgtatacaggttcgggccgctgagaagcgtaataccctactcctgtgttttggtggatctgtgtatgaagaagctacaaagtgcgagccagcccccgatcgttccaggatcgttttttccttttctccctttccctaagtgggcaaggtcctccttttatacctcaaggggataccacatgcaccatttctctcttttttgtggggacttatcctattttttcctaaacagacggagacttggcttctcttcattaatggacggagatttgtatggctggccgtccgaatgaccttttgatgggacgggccatacctaccttcactttccgccgaaagcaggcgcgacgtgggaacatggctgtctgctgacgacatgaccattgttagaccggtcacaaatcgg

SEQ ID NO: 28338 - DNA, 11713 bp, Oryza sativa
ccccccccccccccccgagggggtcaggcctcgtgggcgattgctcctgcccaagcctctagtcatgatactcccggtcctatgtcaccgacagtagcccccggcgttatgccagggcgatcgccctcctcgagggaagcggtcgggcgtgacgtcacttcctaaggcctggtgacaggtgggaccggtctcaacagttgggcagaaacccaacggtcgcaaatcacgcacatcggcaatggttactcggctgtcaataatgagcagtctcttcaagactgccacattactcgagtaacacgcgaatcgggacgagccggttcgtttttcctggagatatggtgatggcgcttcggtcggcgagcgtaattaacgcgcgcacgagatgttccatctcgactgccacagccgcatatccacctcatgcaccgcaaacgggcgaatgggattagtggaagcgtgggcgcgagaaacgagggggcaagatagtgggcgcgagaaacgaggagccgggcacagcgttggcaagggtataaagtcgccgaggaagagatttgcttccttcctctcgccattattccccttgtcttcgcctcttgcaccctaactccttgtttcctgtgccctaccttcgccacacgcgctcgctctcaaacatctcttcttccggcgtcatggcacggggttccgctccgcttgacggtagcgtgctgccgccttcccgcatcgtgagcgagagacaggccgggctgccgcgccgcttcatgccggaatctgccaccggccgggagatagtctcgttgggcgagggatgcccggcgccacgctacccggggcggtccgtcttcttcctcccttttgctatggcagggctggttccgccattttcttctttcttcatggatgttctggagttttatgatctccagatggcgcacctcacccccaacgcggtaatgacattggccatcttcgcgcacctgtgcgagatgttcatcggggtgcgcccatcccttcggctgttccggtggttcttcaccgtacagccggtgtcgccgccgtcggtggttggtggctgctacttccagccgcgggggccggtgctgaaccgctacattctctgcgtcctccgcaagaagtgggatgactggaagagcgactggttctacacccccctcgccgacgaagcgcgcctccaacttccgagccagcctccagcgcaggcctccaactggcgggcgccggtagatctgggagatggctacgacgccgtcctcgaccgcctggcgggcctgcgatcccaggggctcacaggggccatggtgttcggcgactatcttcgtcgccggattgcgccactccagcggcgcgcccggggcgcctggagtacactgggtccgaggactgtatgaggacccaccagggagtcagatgggactgggctcctgaggacttcaagatagtggtccaacgggtgctgaatctcagctccgtggaggcatccctcattcctcaaggagtcctccccctctgcagcgatccagaccgcgcctccatcctggccatcatgcaggcggtcggggcgtcggaggagcgggctcctcgaggccacgatggcgcgggcgggagccgcaggggggaacaatctaccccgggagggggtcgtgcttctgggccccgcgacgggggcccggggagcggccgccctgccgacgcccgggggaagaggaagcaggaaggaacccctcccccatctcctccccaagggggtggggcggcgcgtgccagcagcaggcgcccggagggggccacgccgacgtcgcagcccgagggggagcggaagaagaaacggccccgcaagatgggggggacagaaccatcccggggaaacctcatttcccctccaaggtggtcatttaaccgaccccctcgcaggttcgtcccacgcccatcgtggccgtattcattccctcaatgcgagttttcactcatccatcttgtttgtcttctggtctttcttctgtttcagcgagatcccgtcgcgtccctcccgccattccaagtccggccagtctgaggccgaggacccggcgaccacagaggcacggaggcgggaatctgtccggcgagaagccgcggatcgccttcgggaagccgaggaggccgctcgggaggccgcccgggctcgccagaccgaggaagccgctcgggaggaggccggactccgccaggccgaggtgatgacatcctccgaggcgacccgtgaaactgaccggcaagaggccgcggatcgccttcgagaagccgaggaagctgctcaggtggccgtccgagctcgccaagctgaagaagccgctcgggaggaggacagacttcgccaggccgaggcgacgacgacttccgaagcagctcgcgacgaggccgcgggcgcatcgcttgggcccactctctcgtgcgacgctcaagacaaaccaggtccgggggacatccccgagtccggcacgtccatcggcgggccaagccgcgcggcatcctcttcgaggcggctcttccccacgccttccgttgctccactgagcgcagaacctcttctgcaggccttggccgtcgctaacaccacggtgttggacgggttaagtgcccagatggaggccttgcaagcagagcgggtggagctcgacgccgcatgggcacgtgtcaaagaggggcgtcgctcggtggaggccatggtggaggtgggccgcaaggcacaccgccggcacgtctcagagctcgaagcccgtcggaaggtgctgggggaggtcgccaaggaggtggaggaggagcggggggctgccctcatcgccaccactgtgatgaacgaggcgcaggacaccctccgccttcaatacgggagctgggaggcggagctagggaaaaagctcgacgccgcccggggggtccttgacgctgccgctgcccgagaacggcgggcggcagagaccgaggtggcatcccggcggcgcgaagaagccattgaggcccgtgccatggcgctggaagagcatgcctgcgccgtggagagggacctggcggatcgcgaggccgccgttgctattcgggaggtcacactggcggtgcacgaagccgcctgtgccgaagaagagtccgcactccgcctccgcgaggacgcgctcaccgagcgggagcgagctcttgatgaggccgaggccgcggcgcaacggctggcggacagcctgtccctccgcgaggctgcgcaagaggaacaagcgcgccgtaatctggaaggtgcccgcgccgagagggccgcgctgaaccagcgggccgctgagctcgaggcgcgggagaaggagctggacgcgagggcgcgcagcggcggggcggccgcgggcgaaagcgacttaaccgcccgcctcgcagctgccgaacacaccatcgccgatttgcagggcgcgctagactcgtccgccggggaggtcgaggccctccgcttggcaggcgaggtagggcccggcatgcttcgggacgccgtctcccgtctagaccgcgccggccggcaggcgggcctctggggcgggcggactgcgaagtacgccgccaaccaggggggcctcgcccagcgcctctcggagatagccgggactctccaacggctccccgaggagctcgagaggacgattaagtcatcctcgagggacctcgcccgaggagcggtggagctcgtactggagagttaccaagccagggatcccgacttctccccatggacggcgctggacgagttccctcccgggaccgaggatggcgcgcgcgcgcaggtccgggacgccgccgaccatatcgtccacagcttcgagggttcggcccctcggctcgcattcgccctcaactccgacgaggaggacgatgacagcggagtgggcgatagtggcgacgaggctggcgacccgggtgcatcggagtgagcccccaggcccccgccaatctttaaatagtttcttcttttttttcttccgaggccttcgggcccccttcttgtatagactaatttaatctgcaatcaaataaagaggaaattttttgtgtcaattctatttgttgtgtgtatgagacaaggatgtctgtgccgtggttcttttgtgtcttggcttgaacaagggctcgcgcccaggtccttagtcctcaaatggctcgggtcggggctagtgcctggggagatccacatgtcgagactggccaggccgggagcgtggtgaccgagggttatgggtgacccgatagtgggtttttgccgattcccccccggagttcaccacgccccggggcacggctcggttctgggccccgtttggcgattttagccgacccgagcccccgagggcaggattgaacacgaatgacctatttcaagtcaagattcttcaaaaggaaacaacagcacagatacagcctttaggaaatcgaaaatacttttattgagatacagatataagagaaataagaatatgcatatgtggtagcccccggccaaccctgcacgcccgaggggggtgcggggttggcccgagcctgaaacctgacacccgatcccccttaggggtagaagcgacgaaggtgttcgatgttccacgggttaggcagctctgtgccgtcgctcgtggctagccgaacggagcccggccgggggacaccgatcactcgatacggaccctcccacattggtgagagcttgctcaatccagcacacgtttggacgcggcgtaggacgaggtcgtcgacgcagagtgatcgggcccggacgtggcgctgatggtagcgccgcaggctctgctggtagcgcgcggctcggagggcctcgcgccgccttcgctcctccaggtagtcgaggtcatctctgcgaagctgatcttgatcagcctcgcagtacatgatggcccgaggggacctcagggtgagctcggatgggagaaccgcttccgcgccgtagacgaggaagaaaggcgtttccccggttgctcggcttggcgtgattcggttcgcccagagcaccgctggcaactcctcgatccacgaatcgccgtgcttcttgaggatgttgaaggtcttggttttaaggcatctgaggatttccgcattggcgcgctccacttgcccgttgcttctggggtgggcaggtgaggcgaagcagagcttgatgcccatgtcttcgcagtaatcgccgaaaagttcactagtgaattgggtgccgttatccgtaataatacggttaggcactccaaactgggctgtgatgcccttaatgaatttaagtgcggagtgcttatcgatcttgatgaccggataagcctcgggccacttagtaaacttgtcgatcgcgatatacagatactcaaacccgcccgaggcccgcctaaacggtcccaggatatcgagcccccagacagcaaatggccatgaaagtggtatgatctgcagggcctgggccggctgatggatttgcttggcgtggaattgacacgctctgcatcgccggaccaggtcgaccgcatcattgagagctgtcggccaatagaaaccttgtcgaaaggctttgccaaccaaggtgcgcgaggcggagtgggctccgcattcacctttatggatatcggcaagaagctcgacgccttgttcccgaggaatgcactttaggaggattccgttagccgcgcgccgatagagggtcccttctaccagcacgtagcgtttggagatgcgctggacgcgttcactcccttcgtggtcctcgggtagagtcttatctgtgaggtatgcttggatctcagcgatccaagcaatcaatctaagggagctgggagtgctcccctcgggtcccgaggcctggactccgacgggcatcgggggcctgtcaggcgcgtccgtctcccctatggggtcgggtcgcgccgacggctgggcaagcctttcttcaaaggcgcccggtggggtctgggctcgcgaggaagcgagccgtgagagttcgtcggcaaccgtgttatcccgtctgggcacgtgccgaagctctatcccgtcaaaatggcgctccatacgccgtacttggcgcacgtaagcgtccatctgcgggtcagagcaccggtactccttacagacctagttaacgaccagctgggagtcgcctaacaccaggaggcggcggatccccagtccagctgccaccctgagtcccgcaaggagtccctcgtactccgccatattattggtcgcccgaaagtcaaggcgaaccaaatatctgaggacgtctccgctcggcgaggtcaacgtgacccccgcaccggcgccctgaagagacaaggagccgtcgaactgcatcacccagtgggcggtgtgaggcagctgcgaggggcccgagctggcctcggggactgagacgggctcgggagctggggtccactctgccacaaaatcggcgagggcctggctcttgatagcgtggcgtggttcaaagtgcaaatcaaactcagaaagttcgattgcccatttcaccacccgtccagtaccctctcgattatgcaagatttggccgagggggtaagacgtaaccaccgtgacccgatgcgcctggaaataatggcgcagtttcctcgaagccatcagaatagcgtaaatcatcttctgggcctgagggtatcgggtcttggcgtcccggagggcctcactaacaaagtagacgggccgctgcacctttcggtggggccgatcctcttcgctaggggccacatccctggggcgctctttgtccaagcggcctcgcggggtgcactcgtcttctgtgccgacgacctcggggtcggaggacgacaggagcggccttcccacagtggcctcagggccgtcctgggggtcgggagctcctggcgtcgtcggacaagcgggcaaagggccaactccggtcgtcaggggccttaggccaccgttcggctcgggggcctcttctccctgctctctcccgggtcgagtcggcacagggttagcctcggggtcagagggcgataggtgcggccttcccgcagtggccctcgggccatcctgggggtcgggggcacctggcaccgtctgacaagcgggcagagggcctgctccggtcgtcgggggccttgggccaccgttcggctcgggggcctctcctccctgctctctcccgggccaagccagcacggggtgggggtgcgcggaatgaggattgtcctcatcgcgctccacaaccaacgccgcactaaccacttgcggggtcgccgctaagtagagtaacaagggttcatttggctccggggcgaccagaactgggggagagctgagatacgccttcaactgagtgagggcacgttcagcttcctccgtccaagtaaacggcccggagcgtttgaggagcttaaataagggtagcgccttctctcccagcctcgatatgaaccgacttagggcggccatacaaccggtgacgcattgcacatccctaagcttgctggggggcgcatccgctctatagctcgtatcttctcggggttggcctcgatgcctcgggcggagaccaaaaatccgagaagcttgcccgcaggtacaccgaacacgcacttatcggggttcagttttatgcgggcggagcggagactctcaaaagtttccgctagatccgagagtaaggtctcttggttgcgcgtctttacaaccaagtcatcgacataagcctcaacattacgtcctatttggctacccaaagaaattcgagtagtacgttgaaaagtaggacctgcattctttaacccgaagggcattgtcgtataacaataagttcctatgggggtaatgaatgcagttttttcctcatcctccctagccatgcgaatctgatggtaaccagagtatgcatctagaaaacacaaaaggtcgcaccccgctgtggagtcgacaatctgatctatgcgagacagggggtaagggtccttaggacatgccttgttaaggtcggtgttgtcaatgcacatccgaagcttgccgttcgccttgggaacgaccaccgggttcgccagccactccggatggatgacctcgcggatgaatccggcctccagaagtcgcgccacctcctcgcggatgaaggcttgacgttccggggcctggcgccgcactttctgccggaccggccttgcgcccggccgcacggcgagacggtgctcaatcaccttcctggggaccccgggcatatccgccggtctccatgcgaagacgtcagcgtttgcccgcaggaaagagacgagcgcgtcttcctatttgccgtccagaagaccaccgatccgtgtggtcttggacgggccgtcgcccagggcaacctccttgaccgggacctcgtcgcatgtgactatccgctgcctcggggcggcgggggcggatgtgccaagcctctcgtcgccaccctcgggcttggacgcggcggcgaggtggtccgcgcgctgctccatacaagcaagcgcgactttgaggtcgccatggacagagatggggccaccggggcccggcatcttcatctggaggtaggcgtagtggaccgccgccatgaacttcaccaacgcgggcctccccaagaccgcgttgtagggcagactgaggtccgccacatcaaagttcacccgctccgtgcggaagttggcggatccaccgaaggtgaccgggaggtcgatatgacctagcggccaagtgtgccccggcgtcacaccgataatcggctgggacggccggagcaccatccccggggccttgatggcgtcaaaggctgcgggggaaaggatgttgagggctgctcctccatcaatgaggacacgccccagctttacgttgcaaacagtgggggaaaccaccattgcgatctgtcctccccgggcaacgcacggtgggtggtcggtctggtcgaaggtgagggcaacctccgaccaccgcgcccggcgcgtcgcctcatgagtaggggccgcggccagaagctctcgcttcatggccttgaggctccggcgagaaacgtgagcacacgctcccccatcgacagtggcaatggtggccctaggctcttggaaacctaggtcatcatcgccgtcatcgatgtcctcggcgggggccttctgcttggcctcacttcgccgattgccggaaggaaccgccggggacttgccctctcggcgctcctgcctcctctcctcctcccacttcctcgtccgctcagccaaacttttgactgcgcggcagtccgcgagatcgtgaagggaagtgttgtgaacgatgcaccacttgccggttgggcgctccctgctgggagcgccggcctccttctttttgtcgcccgcaggcctcccctttcgggtggcccgcgaagcgccctcgacggcgaggacatgaccctcgtcgtcggtatgggctgacctcttcttcctcctcctatcacgccgccctgtctgagcagcggatccaggggcggccgaagctgccacaccggaaccggaggggttccaggtccatgcctcctccttacgagccactcggtccgcgagctgaaaaagctccgcggtagtctggggctctttggaggtgatcttttcgagcatgcggttgtgccgcacacccccctgaacgcgtagatcaccgcgtgtgcagggatgcatggtatggtgttgcggacttgacagaaccgctgaatgtatgagcgaagtgactcatcatcccttcgctggactgcatgcagatccgcttcttcacctgggcgcggatatgtgccttgaaagttcatggtgaactgttggcacaaatcctcccaggagtggaccgacgcgggtggcaagttcattagccaaccccgtgcctgtcccttcagggccatgggaaaaaaattcgccatgactctgtcgtcacccccggcggcctcgatcccggtcgtgtagacctggagaaactcggcggggttgacgctcccatcatatttttcggcgatggtgggccggaaccttgggggccaacggacgttccgaaggctcgccacaaaggctctacagccgacaccaccaaccggggggcacggagggctgatccccgcgtccgtgttgaggtgagactccggacgaggaggcgccctccgttgcgtggggagtacgccgaccattacgccggcgctcgatatcgatgcgggcatctggccccccacgctgatcttcctgggtcggaggcgctgacgaaggagtggcggccgaatggcgagcaacagccgccgctcgccgcgccctccgccttgacgacacggagccagtggtagcagcgccagaggtcttggtggcggaggaccgcccaccagcacctaggcgctgccgtgccgtcatgaccaagttggccacgtcgtccagccaacgttgggctggagactccgagtcagggacaatgggcgggtgacgtaggagcgcgcccgcagcttggagcgcgccctggggcgtgctgccgtcgccgtagaggaggagtcgacgctccccatctcgccgcccttccccatcacccgtggatgtcgaagtcgcggatccttcgaccctctcgagcgcctcctcccgcctaggactttggcgtggagggggcggtggagtacgagctcgacggcgtgggtttggctccccatcgtcaccgctaacgctcggagagaggttgtgcgcctttgcttgttcggccattgggctgaacaggaaaagcttggcgcccacgaaagagtgcgagagctcagaagatcactcgcagagccccctacctggcgcgccagatgacagagcgtggggctcctcaccgggagaccgcgcaggcccccctttgccggttcggccgggggccctgggtgaggttctaagctcctggtctgtgtgtggaaggttcgcgagagtggaaaaagcacaggacacgggcgatgtatacaggttcgggccgctgagaagcgtaataccctactcctgtgttttggtggatctgtgtatgaagaagctacaaagtgcgagccagcccccgatcgttccaggatcgttttttccttttctccctttccctaagtgggcaaggtcctccttttatacctcaaggggataccacatgcaccatttctctcttttttgtggggacttatcctattttttcctaaacagacggagacttggcttctcttcattaatggacggagatttgtatggctgccgtccgaatgaccttctgatgggacggcccatacctacctccacttccgccggaagcaggcgcgacgtgggaacatggttgtctgctgacgacatgaccattgttagaccggtcacaaatcggtcattcttgtccaccacgcgtcagtttatcaatctgcatgttcgcccttcttcatacaatatcttgcctgtaatggttaggatgaagcctggcatatatctgaccggaaccaacgtgccatctccaagagctaacacgccggctccggctagggacgagtgcttggaggctctcgtcctgacgggatggggcgaggcgtgcgtcagaccacctatcgcctcctaacccacgatctgaccggtctgtgactgatcacagaccagatgaacgagcgcgctgcactgcgctacatgcggcgtgacgcgctcgtccaaaccgcaataaatgcggttag

SEQ ID NO: 28339 - DNA, 26198 bp, Oryza sativa
gcaggatcattgcatcatattaccattgcctgagctatgatcaacctaatgggagaagaaaaacacatataacatcccgagtagtttgtcacttgatgaataaatgaaccaatgaaatctcttttcagtgaaacctcactaaaaggagtaatcagtacatgtatttttctgcagttggtatatcttacaaagaaatagttgcactgccataaaaattgagaattttattgaccatttcgtaacagtgtgcagtatgcccagatgcataacaaataaattaaaagtgagtttagcaggtaaaagcaataacaaaacaccatgctactgcatcataagaaagaaaagagaaatagtaaactgtggctattagtagtctgaactaggagtacatttagttcaagtaaatcatcacaaggaagaaaagagaatcattagaatgtgtctgtaagtaatctggcctagtactaaatttagttcatataagctacctttgagaagtgcagcaccatgatttggacatactgagcagagcatgttcctgaaataaattagacacaagggttaattgatataatctacacacggcaaataaaaggcaaagaaaccacatgcttattaccctaccatgtttatgcatgttgcctatgtctaaactgatgccaaatatgctcaattaaatcagttttcagttgggtatgcacagaacgagcacgaatagtagattttctacgtagcacatcagtaaaacatggattatcaccagaagttacttcaggaggtaggactattgatgtcctaggaattctattgaggtcaatgtcacatatcgcatcctctctctcatcttcaacaatcatattgtggagaatcacacaagctaacatgattttcccaacactcttccgtttccacttcttcgctggacggcgcacaatgttgaaacgggcttgcaacactccaaaagcccgctccacatctttccttgccccttcttgacgtttagcaaacaatttatgcttctctgtttgtggaagtgatatagattttatgaagctagcccaatatgggtatataccatcagcaaggtaatacccattgttatactcattcccgttaacagaaaaatgaacccgaggagcctcccctctaacttgttcaaggaatagaggggactgattcggcacgttgatgtcgttgttagaaccagcgacaccaaagaaagcatgctaaatccaaaggtcatgtgaagcaactgcttcaaggataattgttgggactttgtagtcaccacgggtgaattggcataaacaagaatggaccatccttgaaatcattctcatacattttcactgccttagccatcagatcatcatgagactccccactagcatataatgaattagcctccttccaagagcaacaaaaattcccaaccttcttcttaattttaccaaaacgatccttaacttgcttaacttgcctaacccggctttttggggtagtgctgttgtaagctgcagcaacatcgccccaatatttatcattcttcttgaaatttgattctatagaatcatttgagttgttcagccaggcgctgatctgcaatttttaggaaaaagatgtttactggtgttagtaatgtgagtgatgtacatcacattgacaaataaataactcacacaggccacttaccaatctcaagtcttcatcgttcgtccataataagcgtttcttagtcctagagatatctccattctcaacattgataggctgtgatggactcccttcggcgacatgatgcatatggtttgatggggcattgataagattaacgaacccaccaggaggacgagattccactcccctgtatagaaagcaagaacattatagtttcaccataactaaattgtttatgttggatccaccactgctgcaattgtaactaaaacaagctaaggtactgatatcctaaaaacaagctactgaaacttataattagcacaaaaacaaggtattgatatcatttttagtgtataattagcacagaaatttcgtgcttcatcttttatatttaaaatcatacacattaatattaatatggttcattgtttgctcttttggagagcacactattggccattgtacatggtgatattttctgatcccttgatcttcttgccataaatatctccttacaaaatatattttctctttaacatcattaggatccgcatgcgttaaaccagatcggttctagtagatcaagatgatatgccgtgacgggactgtttttctcttttactggggagagatgtacttggtctttgtttactgtggggagagattgatttacagcaagggactaaaaataattttagataaagatcccagctcaggatatggtataggcattttttagtaatgcagattaagtaataaaactcacatgctatgttttatgtaaaaaaagtgctactacagccaatgtcatctgattctcattttaatcgatatcacgtatactaaaattcatgaaaaaaaattgtaaaattttaacatggtccttaacatagatcgcaaaaatatcttttcaaattcatttaacgcacgaacacaatagtaacaggcatataaaatctgaaatattagacagaactatgacaaatttgtattttaatcgatatcacgtatactaacattcatgaaaaaaaattgtaaaactttaacatggtccttaacatagatcgcaaaaatatcttttcaaattcatttaacgcacgaacacaatagtaacaggcatataaaatctgaaatattagacagaactatgacaaattcgcaactaacttaccattcttcaaaatcgtgttgcaactcgatgttggtcttggcagccatagggagaggacatacagatgaactcggcatggcttgcgatggtggagaagcaaaccaagctggcggtggggtggcgaaccaaggacctccataaggatatggcactgccgacggggtaggaacaccgggaggattggcgcaacctccctcttcctccggcgagacatggctattggtggagaggaactagggttttcggtaaaaatatgttgcgtgcgggcgggagagattagcgagggggaagagggaaggcggatagtgggaggcggagacagtaaatcttaccggatttttgaggccggcaaaatagtagatggggatttttttttttcagtggatttgtgtcgggaggggaagagctcttcacgcgcgagaggggaagagatggcgcgcgtgggagggaaagagatggcgtgcggcacgggagatcgagcgccatcacccgggatcgcgcgggagatcgagcgcaatcgcccgggatcgtgtgggaagggcggagatcgggcgggcgctgggtggaggggaaaggggatctcgatcagctacggtggggaagggatcggctgcggtgagtgggtccacaaatcgcgttttttatcgcccaggtaggctgcaagcaagcgataacgcgtgggaaagagagctatcgccgggcgatagatttgtcgctcgctcgcttctctctcatcatttctctcccctccacataggaatatgatgatatggcatatttttggagcctgcctagtcagcttattgtacctgctctaacaaaaaattaagagggttggctctcatgcaagagctagcttaacacaatctccaagacaaatacattaaatgtataagtgagagatagagagagaagaagaaaattgtagccaaccttatagctaatctcattatatatgttggctttaagatgagctaatagtaggaggtgagctatactattatcgttgctcttaggaggaaacatcggcaggacagggaggcattatgcaggggagggtgcggcagattcggagcattcgagtctttctattagtaggatctaagaggtactccatataccaaaacacggatgttagggaatgacctaatattaaattaatagaaaaggtatggctttgaactcaggccggctagtccaccacattgtgaagttagctggaaaacccctagacgtttctatcagctatcctacataaaattacacaaaattatgtagggaaaatacctagtaaaattaaagtgcgcttcgattatatagaaggccccatttcgtcctcagatcctggctccccacactgcctatatatgaagacggtgcaactgcagagttggtcatagtctcatagactcatagtggctgcaagcttatgcaaagcaacaatggccacctgcatcaatggcggcgagctgcaagttcgggtcgtgagccggcgactcgtgcaggcctccgacgagtccctccggccgcacgtcctcgccgtctccaacctcgacctcctcccgcagtccatccaggtctccatgatctgcatctaccccaacccacccacctccgccggcggcttccacgacgtcgtcgcggcgttcgccgccggcttgccgtcgttgctcaaccacttcttcccgctcgccgaccgcatcgccgtcaacccttgctccggcctccccgagatccactgctacaaccaaggcgcggagctcgtcgtcggcgaggccgacgtggctctcgctagcctggactacggtagggtcggggagtcgatccagaagatcctgctgccgtacgccggcgacgtggcgctgtcggtgcaggttgatagctttatccaaataatcttgtgtgcgaaagctagttttttcagttgcatttttttaacttagccattgcattttgtaatagcattggattcctggttgcatgcgctggctgaagattagcaaactcggttagtgttagttatcgtttttccgttttttcggtagtagaagagatcgagcagggatcggatcgtgggatggcacggtcagtcgttgatccagcaagatcgcgcatgtaacagactcttttgtggaggtgaataaaaggaagaaaaaccccagaaaagctgcgaggtttttcagcaccaaaactctgtttttgctctgtttttctatgttgtcgtattttcgtcagatactgttcatcgttctgaactactcagacaagctaggatagccacaatctcgcgtgtgttcagagtgttctagctaacaattggtatcagagcagtactggaacgatccggcgatgtcatacacaccgcctggccgtcgtggtggcggtggcggcggggggagcggcaacggccgcggcggcgcaagcggcagcggcggggggaatggagcagacggcgcattacttccgctcgtgtctcaggggagagacgcatcgcacaccgctcgcctcccagtcctctcgaggacaaactacccggattgggcgctcctgatgcgcgtcaacctgcaggcgcaggggctgtggacggcgatcgatcccggctacgcggagtttcgtgaagattgggcggctctctcggcaatccttcaggcggtgccgcgtgagatgttgcgcgggctggcaaagcatgacacggcgaaggcggcgtgggacgccatcaagaccatgcgggtcggcgttgaccgtgtgcgtgaggcgaaggagcagggcttccgtcgtcaatttgagtcgatgcgattcaaggagagggagacgccggaggagtttgcgatgcggctcactgccgtcgtcgcggacattcgcgacatgggtggagtcatggaagatgaacacgtcaacaagaagctgctgcgcgttgttcccaagaagtataagccggtggctatctctctcgagcagctgctcgatgtgaagaccatggcgctggaggagctagttgggcggctgtcaacagtggattcttacagcgatgatgaggagggaagcgatggcggaaaattgtacctcacggaggaacaatggcaggcacgtgtgaagcagcgggagcaggagggctccggcaacagcggcaataagggccgcggcgcgcccggcacgcagaatcaccgaggcaagcccggtgggtcgccaaagggcaaagaggcggccactggtgcgaacagcagccgcgacatctcgagggtaaagtgcttcaattgtgatgaatttggtcactatgcaaggcagtgccgcaagccacgacgccaacgccggggagaggcgaacctggtgcaagccgccgaggaagaaccgacgttgcttatggcacatgtcgtaggggtgtcacttgctggcgaggcgacactcggacgaacacctggtggacaggaggtacacctcacggagaagaaggtgatcctggaccacgaggatggtggtgaggaggaggtgacaagagattggtttctggataccggcgccaccaaccacatgactggagtgcgttcggcgttcgccgagctcgacaccggcgttgttgggacggtgaagtttggcgacggctctgtgattgaaatccaggggcgcgggaccgtggtgttccgatgcaagaatggtgatcatcggtctctcgacacggtgtactacatcccgaagctgcgcaagaacatcatcagtgtcggccgtctcgacgcgcgcggctacgacgcacatatctggggcggggtctgcacactccgtgatcccgatggtcttctcctcgcaaaggtaaaacgagacataaattatctctatatactcaagctgcatattgcaaatccagtctgcatggcggcgagcggtggcgacacggcatggcggtggcatgcgcgtttcggacacttgaacttccagtcgctccggaggctggcccaggggaacatggtccgcgggcttccgatcattgatcacactgatcaactgtgcgacggttgtctcgcgggcaagcaacgacgactcccgttcccggaggaggccaagtttagagcacaggaggcgctcgaactggtgcacggcgacttgtgtgggccgatcacgcctgcgaccccaggcggcaggaagtatttcctgctcctcgtcgacgatatgagccggcatatgtggatacggctcctctccggcaagcatgaagcggcgacggcgatcaagcagttccaagtcggcgttgagctggagtccgggcgaaagctgcgggctctgaggacagatcgtgggggggaatttacctccgtggagttcatggactactgcgccgatcatgggatgaggcgagagctcactgctccttactcccctcagcagaacggagtcgtggagcggcggaatcagaccgtggttgcggcggcgcgctccatgcttaaggcggctgggatgccggcgtgcttctggggggaggcggttgtggcggcggtgtatgtgctgaaccggtcgccgacgaaggcattgaatggcgtgaccccccatgaggcgtggcatgggcgacgtccctcggtcgaacacttgagggtgtttggctgtgtaggctacgtcaagacggtgaagccgaacctgcgcaagctcgacgatcgaggtacgaggatggtgtttattggctatgaacaggggtcgaaggcgtatcgcatgtatgaccctgtggtgcggcgcgtttgcgtgtcgcgtgatgtcgtcttcgacgaggcggcgacatgggcgtggcgtgatcctgagacagaggcgactgaagaggaggaattcacggtggatttctttgtgaatcccgtggactctgttgttgccgacttgggcgaacaggctagcacgcctgtgcagggaggcacgtacccggcgtcgacggccactccgccctcaccaccggaagtgccggcgggggtggagttttgctcaccaccaaactctgtcacgccagggacaaatgaaggccctatcaggtatcgccgagtgcaggatatcctatctgctactgaacctgtccttgattttgattatagcgaccaatgcttgctggcaagtgaggaaccaatgagtcttgcagaagctgaacaacagttgtgttggaggcaggcaatgcaagaggagctaaagtccattgaagacaatcagacttggagctttgctgagctccctgttggacataaagcaattgggttaaagtgggtctataaggtgaaaaaggatccatcaggagttgtggtgaaacacaaagcaaggttggtagcaaagggatatgtgcaacaacaaggaattgattttgaggaagtgtttgccccagtggctagaatggaaactgtgaggctcctgattgcagtagctgcaaacaaaggatgggagattcatcacatggatgtgaagtctgctttcctgaatggtgatttggaagaggaagtttatgttgtgcagccacctggttttattgagaaaggaaaagaaggccaggtgttgaggctcaagaaagctttgtatgggctaaagcaggctccccgagcatggaatgcaaaactgcacaacactttgatttctctgaatttcatcaagtctgaaactgagagtgcagtgtatgtgagaggaacaggaagctcaaggttgatagtgggagtgtatgtggatgatctgattatcagtggggctcaagcaagtgaaattgatttttttcaaggaggagatgaagaagaaatttcgcatgagtgacttaggtctgctgagttactatctgggaatggaggttgtccaaaaggatgatggagtgtttctgtcacaaactgcttatgcagcaaaaatcctagaaaagacaggaatggaaggctgcaattctactcaagttcccatggaagctaggttgaaactgaagagggagagtggaggggaaggagttgattcaaccatgtatagaagcactgtgggaagtctcaggtatttggtgaacacaaggccagatcttgcttactctgtcgggtatgtgagcagatttatggagaaaccaacttctgaacattgggcagcagtgaagcatattctgagatacattgcaggtactcttgatgttggctgctggtttgggagaagggaaaagggtgaactcagattgattgggttcagtgacagtgatatggctggggatttggatgataggaagagcaccacaggtgtactgtatatgctgggagacagtttgatcagctggcaatctcagaaacaaaaggtggtagctttgtcgtcatgtgaagctgagtatattgctgctactactggtgcttgtcaagggatttggctcaataggctattggcagaattacttggagaggaccctggccaaactgtgatgaaagttgataacaaatcagcaatcaatctctgcaagaatccggtactccatgatcgaagtaagcacattgacactcgatttcattttatcagggagtgtgtggagaagaagcaaatcgctgtggagtatgtgcgaacagaagatcagcttgcagatatactgactaagcctgttggacgagttcggtttcttgaactccggaagaagatgggtttggagcaggcacatcaagattaggggggaaattgatagctttatccaaataatcttgtgtgcgaaagctagttttttcagttgcatttttttaacttagccattgcattttgtaatagcattggattcctggttgcatgcgctggctgaagattagcaaactcggttagtgttagttatcgtttttccgttttttcggtagtagaagagatcgagcagggatcggatcgtgggatggcacggtcagtcgttgatccggcaagatcgcgcatgtaacagactcttttgtggaggtgaataaaaggaagaaaaaccccagaaaagctgcgaggtttttcagcaccaaaactctgtttttgctctgtttttctatgttgtcgtattttcgtcagatactgttcatcgttctgaactactcagacaagctaggatagccacaatctcgcgtgtgttcagagtgttctagctaacacaggtggtgtcgttcgcctgcggcggcttcaccgtggcgtggggcaccaaccatgtcgtcgtggacgggagagccctgagcatgctcgtcggctcgtggtccgagctcgcgcggtcgggaacgctcgccgccggagcacggcccaaccacgaccgctccgtgttccggccgcgcgccacgccgtcgtacgacgcgtcgctcgacgaggcgttcacgccgctggacggcgacggcgagcgccagatcaacgtcctgacgagcgacgagagcttcgtcggcgtgcgcctgtactacatcgaggcggcggacatcgcccggctacgcgagcaggcgcgggcgacgcgggtacaggcggtgtccgcgtacctgtggaaggccctcgccgcggtggtgggctcgcgcgacgcgcgctgccgcatggtgtggtgggtggacggccgccggcgtctcactctctcctcctcgccggagctccgcgccgcgatgcgcagctacgtgggcaacgtcacgaccttcgcggaacatgtgtctatttgccgtgtgtagattatatcaattaacccttgtgtctaatttatttcaggaacatgctctgctcagtatgtccaaatcatggtgctgcacttctcaaaggtagcttatatgaactaaatttagtactaggccagattacttacagacacattctaatgattctcttttcttccttgtgatgatttacttgaactaaatgtactcctagttcagactactaatagccacagtttactatttctcttttctttcttatgatgcagtagcatggtgttttgttattgcttttacctgctaaactcacttttaatttatttgttatgcatctgggcatactgcacactgttacgaaatggtcaataaaattctcaatttttatggcagtgcaactatttctttgtaagatataccaactgcagaaaaatacatgtactgattactccttttagtgaggtttcactgaaaagagatttcattgtttcatttattcatcaagtgacaaactactcgggatgttatatgtgtttttcttctcccattaggttgatcatagctcaggcaatggtaatatgatgcaatgatcctgctatcaagggtctatcttcgatgaagaaatcagtctatcttcgatgaataaatcattctcacttgttggacagcatatttatatgtacttttgcttaatgccctattgttgatgtgacttttggatctgtaaaccgttatgtttattttgctttatcctctattaccttgtcagttctttggaactacagatatctttcgttaccatgtccttttgttaagacttgtgttcggactggtatgatattatcgattaatctatggtatttgagttattgttatgtagtaatattgtcttgtaatttttgtactatagagattttggttgatatggtatgtgaatatgctattggcacaactggttacaaagatgcaattcactcttgatcacacacattgatacacacattgatatgtgcatgatataatttactatttgattatgaggtgtagccagccaacagacaatctattgtactagtagctagctttagcaatgggctattagtcagcaactggctatactattagccttgctcttacctctctcctccacataagcttatagtagtcttatagctcactattatacttgctctaatccccaagccaggtggcagcgaggtgtctccccttctccaaatgtctttccacaccattgctcccactacctcctatccactgcagatttaacgctgccgcggctgaccccatctaccaccttcctcccaacaccttggctctagcagtatagccgccatctgccgccgaccacctccccgtgcgcccttccgtctaaagcagtcctcaccgtcccctatcccgctccacctcctgacccccgaaatccttattctagaattattttgatgttgctagacaccgatgttgggaaagatgaagggatcgttgaggaacttgatgtcgtcattgctggtaagccatggtagccacctcaccctctctcccatctattgcctcaccgccctcactggtccatgctggcgctgtcttcaggttgtcgctggagaagacgtgctcatcgtaggaggggaaaatatatagtgtaaacaacatatctagtgaaacctggaattaccacaagatgtaaaaatggagagtaaaagttttactcatagtaacgtgaacaaatttcatagatccatttttgtattctatggtaatttttatgtttctacgatactagaaaaaatacccgtgcgttgcaacgggtgaagactattttaatcttattactgttatattcttcagttaaggtgaaattcattatggtaatttgcttggatatattttctttttaaaaatcatgaggtgcggttaggagtctgatcatctcaagttagcatgcaagttcttttaaggatatttcttatatgactccttttgtatttgcgaaagcgaacaaacttaaaagccgactcacatacagacatgtattttcaaaaacgaacgaatttaaaaaccgattcatacacggatgacgtaccaaaataccggcaaaaacatcttcaatagtagagatatatgtttttttcttgtaggacaagacctgctcactggtgaggaggaatttgattgaaattgtaaaaacttcgggtgactaaactctagcaataacctaaattttcttggcccagctatatatatacagatcgactcaatatgaagtcacgcatataatttgttttactaatctggttgtatagtttttacctgccaaatatgcttatgatttatactaattaataatgggtacaaactttgactttttgattttatagtatgtctccaaaaaaaaaaacagagggactagctagtgaagttgagttttgaaacaagacctagtgtgtacgtgactccaaacaagcactgacgtacgttgcgatgatacgaggatgcatagatggatcaattctaaaatcaaacaaagtccgataaattaattaagttgttggttaatcattattccttaaaccaaatgagcatgatctcagacttcttgaacgaacactcaacacgtacactaatttcataatttgattccaagcatccaaaggaaaacattccacaggtcaatactatgcttggttctcatgaaaaccactactagactaaaactgtggatcatctgcgattggcacctgcgacatttcagctatttgcagatccatgtgcgtacgtagtctgatgtctccttcgaatgaaggaaattttagggcttattcggtttggacgagtttgaattcacaggaaaagaaaaggtagaggaatagtaatggttgcacatattaattgattttttccgagtggtttgaatggatagaaaaattcctatgttttcccgtacaactggtagaaaaatgtgatgtgacaacttgtataaccctcttacattatgttgttgtacgcgcttttagtattactagctagttagtgcatgaaaaacgatgtaaaccattagtatatgattaattaattattatccattgtacacttcgaaaattggattaatttgatatttttagagaaacttctctatataaagttttagcacgaaacacacaaacccaggttgggaaacgtggtcgcgttaaaccagagattagtccagctcaaacccagtttagagcaggtacaataacagaatataagccaactataaacatattttaaagagataaaagatgggagagaagagtagcgagctacagatctgtagccagctgcagtacggactctaagatacaatgcgtgtatgatatgtgtgatcaaatattaatagtgtagtaagtacctattgtacgaattggctattaatttggctatagatgatttggagctagtagttaggtatactattaaactttctcttaatcttaatttagaacacgaccttaaacgtcgtgaaacacacaagattcttttgacttcacaaaggtcacacgccaataaatatactgtacaccatcattcgacaatcagcgagctatacattattcactcgaccagcttacaaagcactgcatgccctatagctagtttcagtagctagcaagccattaggaagacacacatcaacaagaatggccagctgcatcaatggcggcgagctgcacgtccgtgttgttcaccggcgactcgtgaaggcctccgacgagtccatccggcctcacgtcctcgccgtctccaacctcgacctcatcccgcggaccatccaggtctccatgttctgcatctaccccaagccttccaccggcggcgatttccacgacgtcgtcgcggcgttcgccgccggcttgccgtcgttgctcaaccacttcttcccgctcgccggccgcatcgtctccaacccttgctccggcctccccgagatccactgccacaaccaaggcgcggagctcgtcgtcggcgaggccgacgtggccctcgctagcctggactacggtacggtgggcgcgtcggtcgggaagatcctgttgccgtacgccggcgacgtggcgctgtcggtgcaggtggtgtcgttcgcctgcggcggcttcaccgtggcgtggggcaccaaccatgtcgtcgtggacgggagcgccctgagcatgctcgtcagcgcgtggtcggagctcgcgcggtcgggaacgctcgccgccggagcacggccgaaccacgaccgctccgtgttccggccgcgctccccgccgtcgtacggcgcgtcgctcgacgaggcgttcacgccgctcgacggcgcgcgccaggtcaacgtcctgacgagcgacgagagctcgcctgtactacatcgaggcggcggacatcgcccggctacgcgagcaggcgcgggcgacgcgggtacaggcagtgtccgcgtacctgtggaaggccctcgccgcggtggtgggctcgcgcgacgcgcgctgccgcatggtgtggtgggtggacggccgccggcgtctcactctctcctcctcgccggagctccgcgccgcgatgcgcagctacgtgggcaacgtcacgaccttcgcggtcgcggaggccaccatggaggagatccagcggaagcccctggcggaggtggcgtccatggcgcgcgacgcgatcgccgcgccggcgtacggcgagcacttccaggagctcgtggactgggtcgaggagcacaaggccgggaagcagcggtacatcgacacggcgagcgtcgggctgggcagcccggcggtgagcgtgacggcgttcgcgtcgttcgaggtggacaccgacttcggccacggccacgccgcgatggcgctgcccacgtcgtcctccagcgcgaggctgtgcacggggttcgtgcagatcgccgcgcggcctggcggcggcgacgggtcgtggatcgcgagcgcgctgctgtggccgaggctggcggcggcgctcgagtccgacgagcggctggggcgcatcttcaagccggtgacggcggagtatcttggtctccggccagcgagtggtagctcggcgaagcgggcaggcatgatcacctctaaaatctgaactccaatagactttgcctatgcgggattcaatatttcagaaatttgactgaatttgaataaattttgctatgtacaaaataataaggatgatgattcttccgctgtcttttgtttttttgcaatagtggaatgcaattctgatttaactaattaatgagctgtgcgcatacatgtgcctatctcaggatgaaaatggtcgggaaagtactccaacctataagtgccttatagggaactcagaatattttttcacatgtatttgaaatacactcgtaattcctaaattactagtgaaaaaagtcaccggtatgcttggccgaagatggtattatgccaaatcgcaccatcacacttgagcacgttatgtgcaactcacaatggcacacggagacgcgccaccgtaggagaaggtagatgctgccaaacaaacacccaggaaagacagcgtcagaatgtacgcacgttggtttgttctaaacttagtaggccagttaggatgccctctaatgctatagagatgagaacaattgaaggaccggaggaaaatatactttagaataggtagcaagaagtaggaagatgcagaatatagagggtttaggtaataaattgattttgatgatcgattgattgttgtttcaattgatcttggctctcaatacttataagagtgatatacttgatatacttgcttcccagggtcttttccacttcaattaaacgtagagatcaattagctaggactctaaaatcttaagtccaagcaagaaaccccaagagagattaattggatttggagtcggactctgccgttctaaccggccacatgccgttggtcagaccgatcacctgctgtcggtttgaccgaccctatgagtactgtcaaaccggcctcgcatggcaagccgagtcattttcaaatttaatcacatttttatattcttattctaggtgctaacacatggttaacaagcggaaaaaccattattcagaattgctaccacaaaattatgcggaaaatcagttgatttcgttgaaatcctttatgaatatggatctcagtcgattcattcatatatacaaaatcgcttcggcattactaaatgatgaaattgtcggcggtgttggcatgacgcgagagccttgtggctttgcttttttgagatggtctgaagtcaaaaggaatttttcgtgtatttcaccggggaacaagttaattaagacgaatatttcgtgctaatgcctatgatttggacgagttaggagaaaacataaactatgacagatcgagagtttattaaaataaccatcttgggaactatatatgaaaacagtgtagatcctcagtatttgcctttatattttgaatatgactatacgagaccaaaacatagccttgactcagcgatttctttctttagaggccagagatatctaatctgacacgtatcttgtttattgcatttcgaaggatttagccccttgttagtccaaaaggaaggacaaacaagcgctatatcaaattcacgtgttcaccttattgtttcctcgaacacgtgtaaattgttctattttattggcttttttttaaaaaaaaagggctaaaacagctattacacgtgactagatggattaccattcatcagcgtctaataagcaagaccggttcaaaataaaagaacgtcatatgcctcattgcctcctatatatacagttataatttccaaattttattattaaatcaaggaaaataattaattaaagaggcgactatacatggcattagtgaacgataaagatagtgaagatgatgtcaatgcacctgcctgtgcacgacgagccgctcctctggtcatcggggcgccatggggtttcgtccttcaacttgcaagaagactaggggaatgcgaaccccgcgacttccgagcgaggaagatggcggtaggagttgcttattgcaggcggagctaattcgcacgccggcccacggcccacgcgcgcggcccctaccacgtccgtcccctcctttgttttttccttttttttttccgcgtgtctttcccttttttgcgattttttttctccttctctgattttttttcgtgccaactagcaagttttaaatcatgacttaaaaattttcaaatctcgagttgaaagctttcaaatctcaagttgaaagttttcaaaattttcaaatctagacttgaaagttttcgaatctcgagttgaaaattttcaaatctcaagttgaaagttttcaaaattttcaaatctggacttgaaagttttcaaatctcgagttgaaagttattaaatctcaagttgaaagtttttgaatctgagatgaaagttttcaaatctcaagttgaaagttttcaaaaatttcaaatctggacttgaaagttttcgaatctcgagttgaaagttttcaaatctgagttgaatgttttcaaaatttgactttaaaatttaaatcttaaattgaaagtttttaaatctaactaaaaaattttcaatctgttagtaaaaaaatcttaaaaatattttctaattactatcattagtgttaagtgttaactaatatagataattaggtggtcaggaaagtgagggctagcagcgcgtacgcgcctgctaggcgcccccgcttattgcacggtcaacaagcgattgtccacgcgaggccctaatggaataattaactatttaccactcttacgagtggtgctaaattatttgccactggacccatatgtcatagacacatgagggcccacatgttatagacagcgagtggcaaataattaattgccacatcttaaaagtggcatggagttaaatgtcccggccctaataggccgcgcttcaacctaacaagtgggtctagctgacatagagggatcctagcttggcctggtaaggctaatcgttttggtatcgccaaaaaaatcctagctccaaggagcgaactagcccaaaggggtgagaaaaggctggctcaccagggagagccaaatcggctcgcttccataaaaaaaattaatgatacacgcgaagtgattttctcctaaacctaccaacaactggcccatatctcaccttcctcttcctcaatattcttggccgaactctggggttagtagtcattaataaaacactttatttttttattgtttcttgaataatgaaccataactcttgtttttcagataatttctttttgcgcattatctctgttgtttagtaagaatactcgtatatatatagtcttattatgctacttgcggaaaaattacaggccactaatcgtaaccaaagagagcaaacgaaccaaatgctgcagaattacagcgagcctagcaagccggcatggcgatgagttggtttgcctttgccgagctaggctagctagctctgccctcgatcgtgtcgtcttcaagattcttaaaaccagtgattttgtgttaatggtactgaagagatggtattatgtgaaaaataaataaaatctatggttatgcgttacattgatcccaaaactcggttttctgaaattcactctttataaagtagtataaactaggcaaaaatagatatgtttgatttaggataaagctaaaatgatagattaatttgaaatctacacatctaatagcatttgtgttatcaatccagtccatatatcaagaactcatggaagctcaatgtatagcacgctgcccgacgccgtgccgtaccggagtaccgagaggctagccggcggcattgtcatcgactgcacgatcggtggataaatctttgaccatcgcttctataaataaataaatctaagatttatccaggatatttaagtcacagcaagtttgagatgcatataatatagagtatatgcccagaaccagtcactcgaatggaagaggacataatggaatatataattttttgggttcatagttccagcaaagcacaaaatcaaaacaattcacatagttatatacacatgctaaacgtcaacattcctatttgaaaaagaagattcgacactccaagaatccaaaatactctgcaggcctgatttataggttgggtgaagaagctttacaccaagttcctcttttagccgagcattagagacccgcttctcagcagctacgattctgtcctgagtagctggtagtactacagaatccattatcaggccaggatgcttcctctcaaccaagctccgagcaaatgcgaaaacctcagatcttggggcagggtcgtcatccactacgttgtatatcctcctagaaataaagttgccacacatacatggaatcagttatcaaccttcaaaggttgtttcttctaatggaaatgggggagctcatgctctcctagttcaaaaaaaaatcaaccttcaaaggtccagtagaaaggtacagtacgtaaataggttactgggattacaaagggagtaacactatcagtatcaggacctgattttagttcttggtttgatggtatacaacaccacaaccaaatattgtacccaaagtggttatactcagatacagtattttactaataaaaacagtggttgctactacatagaaattttatgatacctgaatattttgtggaaaagtgattatgaaaatggttctgtgctgtggacagatatacagccaaagtgagtctcttttggcagtgcagtctcataatttgttcttgtgagagttgcacaaggtaatactaaggaagattcaaactagtttgaaaatatgattgaaggcagaaaaactggaaaagtagcagccgttttgaagacctgaagtaaaaaataaaaaataaacaaacaaaccttgcacttctgatgctcatgctagccaggatagcctgacaaatgtcagccacatgaattcgtgcagtgtactgtttggattccctcgatttctgtcttcgtgacaaagatttgctcttggctattgtgtccactgcactgcaataatcaacacaaagggtcataatagtggcacttttagaaagcaagtattgggaactgtaacaaaagcctcccatgaaaaagttctcattttcatccattacatacttgacaagtttgtagcacaagttgtacaccgtattggttgaaatcagataaaaagtgctccaaatctttaattttaaaaggttgattttattggtggaattcagaatttcagtagccaagtcatgcagttctggagtaaatataacttttggttcaaagactacaaaataaaatggattgaaattttagcagactgaaaccttcttcctggcccatatattccacctaaacgaaatacaaaggctgatagatctaagtcatctataacattcaaccatcctttttcggcagcatatcttaatttcacagactcggtcttcggattcaccgtatgactgcatgaatagcagattcttcagctttcagttaaacaattattgcagaagcacttacagaaagccacttatcttactcctcatcaacccatgcaccaccacaatcaccatacacacctgaaaaatgataataataattacaagttattgtatggcagaaaaatttttcagggctagtttgcacatttatgatacgttcagttaacctgaaaagttggtatcgacttttgaatgctagctaggattttataagagatgtgagtatgatgcattgtttgccatgaaaatggtgttgttgcctgatgtacctcagatcgaatcgagcattgaaccaaggaaaaaacaatttctgcaagccattgcaggtgacaattactcacaccttggtgcaatgcaggggtcagttcacaagtccagggaggaatcccagtctggataaactcattcttgattccacattggtcattggtatgcttggtacataaaaggttccagcacctgtgtcatcctggtgaccaaggaaggagagaatagccgtatgtttggcagcaaacgtgcaacattttactagctcaatatctcttaggtagtgaactaggcaggatatggttgcttatctagtttactcaagtagtcctttctgtgttagctaggtaacggttgtttgttttcttccctagaaacagcagtccactagccatgtagtttggttgctgtgttgtgcccataccaccaaaaaagcccacaccaccaacttctcttctatgttaatggaacgagaagcagatattatgcgtgtttagaaaactaacataaaaaagatgttgctacagttgaaggacgaattgaaattatgcaggtcatactagagatgatcagatgagcatatgtgcacttacttgttgaagaaaggtaacatagccattgaaggttactattgcttagtgtagtttgcaggttggaatgtgaagaaagcaactgtagatattagatgcaaatttaatcattattatgttaaatttagatggaatttaagtcaatcgaactgacatcaacaagcaattgagaacgtacaggatcaccaattcccgggatgggtggaatggagatgagcaaatgagttgcatcttgcaaagaccggagatttgtcagactgtaattgacatagacatcagcaatcatgtaaactcatttgaaacataacaatgcacagaaacacaaacaaattggcaacacatgctgaacaaatgagagatggtagacatcatatcagcacaagagttgtgcatcgaacctaaaaggaacaagaacaagaaccggagatttgtcagactgtaaattgacatagacatcagcaatcatgtaaacggattcgaaacacaacaaatcatgtgcaggaacacaaaaatgtagcaacgcatgctgaacaacaatgagggatggcagacatcacatcggcgcaaaggatttgcaattactattgtgcatctaacctcgaaggaacaaagaacaagaagagcaagaagaagaagaagaagcagcacctgctgcttgtggcatcgaagatcgaagcatccatgcccagcatctcgagctccgtcttcttggcagggctggtgcacgtcccggacacccttctgcatccaccaatcaatgaatccagccgcaaaatcgggaatggtccgtaggagaaacgtacggcggcaatagcagcagaatccgatccaaaatggaggagcaggggaagtaagtagctggccatccttgcgcgaggaggcgctgggagacgtatcgggcgaccaaaccggtgccgaacacgagcatgtgcccgggcctcggctgcggcggcaaggcggaggcggcggcggccgccatcggcttgggggagcggacgcctcgtggaagagccatggggattgagattctgcagcaaagcggcggccgccgtggtgggtggggggaagcgaggattaaacggtggcgacccgagagctatcggcgagcggcgagcgccaccgcggcggaggaagcggcggatcctgtggggttttttgcggcggcgcctccctgccacttcaggctgagggtatagatggcgaattttttttatttataattttttttattaaaagttttacaaaaataattttccattttgaaaattaacggaaggagtcgcctaccgccctctgggagagggcggcgaaaatgacgtggcagacggccgttcgctctcgggcgacggccgtcaacgaaatttgcaggcggcccccttgccgccctccgctagggcgattttatactgtgcggggggccgcctgcaaatgggcggcgagggggggcatggaattttgcaggcggcccccttgccggcctccgctagggcgattttgtactgtgggggggggccgcctgcaaatgggcggcgagggggcatggaattttgcaggtgacccccttgctgtcctgggggagggcgatttttgcctctccccctataaagcccagtccctcctatgtgaaatttcattatattcactaaaaatccaaaaaaaacaaaagagagagaggggagggcagcagcaaggggagcggcgaagccctgctggttcgctcaattcatcacaggtatgctcccatacatcttttgcatttgtactaatatgttatgtttgagtatatatgttgcgttttagttttagttccatatattttagcacatctgtagcacacagcacatatgtgtagatccagagcatagaatataatagtatgaattgagacatagacagtagtgttaattgtaagatgtagtttagtttgatctggagaatgtaacgtaattttagaaatttagagaacaatattgtagagaatgtaacttagggcgtagtacagaaatgcgaggttaacgcagttattgttttcatcaggcacaatgtcaagtaaggtcacatttcagatagttcacggtgaaggaaatattagatttggtccagatggtgttgatctgtcagattttgtaatgacatctaagggcatcgataggcctgcggagagaacatttcagtcaatttatagttggttgttgagaggatttagaatagaccaagaagtctacacaatgtcagtgtcagttgtagtgagtcgtgcaacagaaggttatttttgggaactaatgccgatggacagcactgatgcttggagacggtatgtcgaaatggcttttgaatggtcatggcccctcgttatatttgtgtcggtacaagagaaagatataaatgtttcaatgcaaaccgaagatgtagagggtcctatcaatgcaggggatgttgttggaccatcgatgcaaaatgaggaaaatcaaccaagggaggagcaggctatgggcatggcggatgagggggagagagtcggtataattgttgatgaaatggagagggaagattcggattatgaggaagtggacgacgacgcatcatccgatgaggaaggtgatgtaatggccactgattgggcaaatgaggacttctctggacttgttatatcagagggtgatcatgtaccctgggagtataaggagaacgaggtaattgagggtgcaagatatgctcataaggatgagatgaaggaggcggtgaagcattgggcagtttccttgcagagagagtttagggtggtcaagtcaacaaattatgtgtatgaagtgaggtgcatgaaggaagattgtccgtggcgtgtccatgcatataagggtaaatggaatgattattggaaagttagcattgtgaccgagcacaagtgctacttacaaggggtggagaagtatcaccgaaacatcacttcagcttttatggcaagtgagatgtacagcagtgttgttggtaacattggctttgaaccaaaatcaattattaggcacatcgagaacaaattcaagtacaccataagctatgcaaaggcctggagagccaaacaaaagatcattgagatgaggtatggcacatttgaagcttcttatgataatttgcctcgtttgttagccatcattgcccagaggaataataatacgtactatgacctacatacatttacatcggttgatgatcgaacaaagagtgtgctgcaaagagcctttttctcattgggtgcttgcatcaatgcttttgtgcattgtcgacctgttctatgcatagatggaacttttatgacaggtaaataccgaggtcagatattgacagcaattgggtgtaatgggaacaaccaggttctacctatggctttagcatttgtagagagtgagaacactgaaagctggtactggttcctagagagagtgcacattgcagtggtgcgtatgaggcccaacgtttgccttatacatgatcgtcatgcgggtatgttgcgggctattgactacttgcagaacggttgggatgagaagggacttccagctaagtggcctgatgttcggagtcggtggtgcatgcgtcacatgggtgcaaatttctacaagcaattcaagaacaagcatcttatggagctctttaagaggctctgtgcacagaaccaagagaagaaatttaatgagttgtgggacaagttggatgagttgacaacgaagcaaacagatgagcaatctcgcagaccactagttgaaggtgacgagcctcccatacctcttggtgcattacatgatgacccaccaacaatgagaaggaggtcagggtcgtccatcagaaatttcactcagtggattgagaatgagcctaaggagaagtggtctctattgttcgacaccgatggatctcggtatggcataatgacaaccaatttggcagaggtgtacaactgggtaatgcgaggagttcgggtacttccattggttgctattgttgaattcatccttcacggcacgcaagcgtactttagggatcgatacaagaaaattggtccgtccatggccgatgacaacatagtgtttggcaacgtagtgacaaagtacatggaagataaaatcaaaaaggcacggagacatcgagttgttgctcaaggcacacaagtgcatcggtatgaaataatgtgtgttgataggagcaggcgtggtatctatcgcaagcaagccgtgcaggaatgtgtcttgaaggcggatggtggatgtacctgcagttgtatgaagcc

SEQ ID NO: 28340 - DNA, 26773 bp, Oryza sativa
cggggttaccgtgccccggcggtaaacacggttaccgcgcggtaaccgtggtaaccgtgaaaaaccgtacgaaacattgtttaatttatcaaaaattcaaattattttttaaatttatttgaatataaggaggttactgcggtatttatattactgtacccccgcgataagcccggtaaccgcggtagtcgcgcgggtaccggcggtaaatcgaacactggcaagattgaccttactaaggttggaggggtcattgcaccccgatagtaagcttggtaaccttgcagttatgcaatgaataatggaaaaactagctaggtaatatttaccagaagtttcaaaatttcatttcattttctttttatagcatctcggtcgtaagcttggttaccgatcaaaggaaaccctaggtgaggaacgtccctctcgtaagtcgtaaggatgaggtaattgtaagattgtttgtcagcctcaactttagtgtactagcagtccgtaagctgttttgtcagctcatgacatgatgttttgtcgtgtcatctggtacgttgacattacaagtttcatcaggaacgtaacaaaattcaatgggctgcgtggtcaagatggaagggttaggtctcacggagctaagtcagctagcatgaatatatcattcatataattaaactatgagttgactatagcatgaattaatatagcccaaacttttctaggggagttctgaaatctgaagtatgatagagttgacgagttcccgtttctctgtatgattgccgggtgtatgcaattaacgtggactataaaatacagcttgcaactatatgtattttgaaaagaactatgtattttattccacagtagtactctctctgtttcaaaatgtttgacaccgttgactttttagcacatgtttgaccgttcgtcttattcaaaaaaattcgtgaaatatgttaaactatatgtatacatgaaagtatatttatcaatgaatcaaatgatatgaaaagaataaataattacataaattttttgaataagacgaatggtcaaacacatactaaaaaggcaatggcgttaaacattatgaaacgaaggaagtataatactattggttacatacatattgacactttaaaatatatttaggctcccaggaatactggcgccgctgggaagcctccattgatacctaataatttgcttatatattagcccctctcctctgcatatgctacttatttatatatccacgtttggtttttcagcaagcaaagtctacaagaggcacaactctatctgcatagtgttacacattatacaattgttcattattgtggcttccctgcttctgaaagaaactggaccagtcttcatcagtgtcttcagatcgatctcattgccattgaaaattgataatatgtgtactatattttttagatgaaaagcccagtaccgtcctcatgcatgcatgcatggactcgatccttggcttgtgcttgctggcgacgatttccacttgttttttttatggctagtaggtgcagttgtggagaatacgcaacctacacgtagtaccgtttttttttattggagcatccatcagagtcaaacttaaatgcttatttgacctgaatttattttcggcttgaattttgtgttttattaatgtgctatatataggtcaactgtacttatgcaaacctgatggcatgagctgatgagcccccttttttctttcaaaacttctgaagaaaatgacacgcggagctatcttctgaacttttcagttgaaaaactgaagctcgtttttctgcaaaactccgaaacaatgatttgttatttcataacaatagtgataagcagtcttcgctcaggactttcaggttaattaacatactacaaccggtcaacttgaacagcattgcaagtagcactgtggtacgagtgccacctttttattagaacagtacaaatgctgactaatttagcttttataattgttcagagttctaggggcaaataattgaccggtgatttgacttgtcattgaaaatactcccttcgtctcattttaagtgtacctatgagttttcgtgtccaactttaattatccgtcttatttcaatttttttatgattagtatttttattgttattagatgataaaacatgaataatactttatgtatgacttattatttttttaaaaaaaatttcaaacaagataaatgattaaagttggacacgtaaactcatagttgtgtttgaaatgggagagggagtaacaagggagtagtttacaatattacatatagaccccgttcttttctccaacaagagttggatgaagattaagattttcgtgtggcacgtttttcaaactgctaaatggtgtgtttcgtacaaaaactttctatatgaaagttgttctaaaatatcatattaatctattttttcaagtttataataattaaaactcaatcaatcatacgttaataacacctcgttttgcataaaaaacttaatttttattttcatctttatcttcgggagaaaagaacaccaccacactgatacggagcatactgttagccaataagctggacacgtggcacccgtcattaagttgctcccaccaggtaacttcctacgtcccttgtttggatcaccctggcgtcaactgttcgttttgtcaaaccatggcgtcaaataggtgcagtccgaaattcttttggctatgtcaccactagggagtaaattcttagcactttggagtcaaccctcctagctataataacaggagggaaaaattttctttttccacgcaaataaaaagatttatgtataatttgtctttaaaatagatgtagatgaaagtctgggcattgctaaggaaaaattatccgatagtaactaaacgtgaggtacaaagtaaatttgctttgtagttaaactttttgccttcacgtactttacacaatcacatcttgccattatggaaaaataccaatgattcaaatgttaaaaacaatacaggtagtttgataaaaaaaacaaaaacaattgagatgttgtacgtggattcatgctagagacgaagggaacgatttgcaccataaatgaatgatcaaagggttgaaaataattaaagtgatgtgtggctttatgagagaaacgataattatcattaactatactcagtgatgaataactttataattaactttataggattcaaaatgtaactttacacttttgaaacttttcaactcatgttttaaaactttacaaaattgtacgatagtaactaaactttataggagaaaagactatttatttattgttttatagtagaaaattattaaacaacaattaatcgagatacactgtttgaacgaatttacatgtacgtacatgatttatccctggtacaacacacgatggaataacattgtttgttacattatgggttatgtaagctgttgacccacaggattatatcggaactaatctcatatataatacaatcatgtcacatgtgttagagagtactctctccgtcccataaaaactaacctattggatgtgacacattctagtactacgaatctggacatatctttatccatatttattatattagaatatgtcacattcagtcctagctagattcatttcgtttgggacggagggagtaaggacgactattatgttgtagacccatcatataattgtaattgtgattgatgacatgattcaggattctgacaatatattggaaacaacgaagtggatggagtctgttcctacccatggaacaaaaagtaaaggaacaaagggtagggtgtggttaatgggtgatcgatcccatccccctatacgctctctcccccatttctcctccttttcttctttttctactacaccataatttttttaaaaaataaaaaaacaaagttggaaaaacgattatgtatagaaatactatataattttttttgaatttaaatttaaattttaaaccggtatgtaaacttttgacttataaactttgagtctataaactaatatttgaattcaaattcaaatttgaatcgggtatgtaaacttttgacttataaacttttggtatataaactttagttgtatagaaatactatataaaaaaatatttgaattcaaattcaaatttgaatcggatataattcaaattcaaatttgaatcgggtatgtaaacttttgacttataaactttggctctataaactttagatgtatagaaatactatatattaaaaaataattgaattcaaattcaaatttgaatcggatatataaacttttgattgtaaactttagatctctaaactttgtgtataaactttagatgtgtaaacttgaggtgtataaacttttaagtgcataaatttactaaaataggaaagtaatacggtgaaaaaaaaaaaacaggtgtcggaagggagggggatccgtcctagcgatcgattcgcgtgcaacgtgagcgtgacctagcgcacggggcacatgcacggtagcaattccttttggcatggcccatcataggcgaggggtagatttcaagcccattgtctcattatccctatccgttgctgcatatccaggaggtttgggccattcaccgtgaataaagtgcaataagttcactttaggtcctttaatatattgctaagtatgaaattcatccctaacctaaaatactattaatttacaaaaccggatcactcaaggtcctacacaatattatgcccagttttagctgatgtgacatgctgagtaagtgatgtgaaatctggcgccgcgacacacgaaggcatgggaggtctacttaatttcagtgcaggttctaaatcttgatgaggttcggatgtgctagttaatttaatcttgcaactaataaggatgacagaaagaattgaaccaatcaaccgatacagatctgcatcgatccaatggttaaaacgtacatcgactggaagtccaatgcaggtagatttgagtgtatatcgattaaataaccgatacatctgataactaaatcttaaaataatgataactcattggctacagcctcgatgaaacattgcaaaaaaaaagtcctattggcttagggcatctccaacagagggccaaataggttcctaaaaattattttttaggattttggttaaaactaggcctctaacagattgtcaatcacggttctaaaatttacccactcctaaaatcggtgccaatctcatcagaatttgggaagctgtacgccctaccaatcccaccaatcgcgcccattttttttaccgtccgcgccattttttttccgcccgcctcctttttcttctcgctccttcctcgcgtcgttttctttctcgcgagaaacagcgcccacgccgccaggctagggttatgggagctcctcgcgctagctccgtcccgatcgccgtcggctgcctatccaggtcaccgcaagccggccgtccaggtcaccgccggccggccgttcaggtcaccgccggccggacgtacaggtcaccgccgggcgtgcgtccagggctccgacgggcgcttatccgggggattgccggactgccagccgtccatccaggggcagcgtcgccggccgtccgtcaaaggcaccaccacctcgccgtcgaccgtccatccaggttgccccgacgcaacgtgtgctgttactcattcacttcaaggtattttcagagaaacaactttattcttttcaagcttgaagttcctgtactgatttccccacaccgtcaatcccccacatagccatctagttcacagggatatctcccaattttttgatggagatgcaaagctcctcccttaaattgtttaccaaatcactgccacatacctcaattgtagtacttatcttctgaataatgcaataaaaaactgttgtcctgtcctcttcaaatgatttccaatggatcaggcatcggtaaatgaggtatgcggcaataggccttgcaatagagaaacccagatcttcagatatgcacttgatcaacaactcatggatattcagaaaaatatagaagaaaatgttgaggcacaacacctgaacgaattgtgatactgcttgaaaagaagttcagaattactaagcatcatacctgttgctgcttctcagcttcaggatcattcaggccagtcagttgagaattgttctcctagattgaaattaacttttgttaaataaggaactcattttacgaatatactgatcaaatataatttgaggattatactaacatggatgtcacaaaagttactggcctataccaattgttaattcaacagtgtttgcttgcgtttgtgttcagtcagatgcattcttcttcaggttgtatagcaccctaaattaactaaacaatgagcttctatatgtgcagggttttgtttgcttgcagcagtatttgatgaccttttcttagataatttaagtgtttgatgacctgaccagtcagctgctcattggctagatattgctattagcttctagtatcttctgaccttaactttttagccttttgtaatggattcagtgaacatgtctgaattaaattgcagagtcccaagatgctagtacttctacaaacgtattagtagtactgttcttatctgactactaaattaaacaaacatgtactattcgtaggtcctattgataatggaagaagaaggattctatactaatttgatgaatgagggcaacgattccttagattgggatagtttgagtagtatgcctgtggaggatgatatgagtaaccagcttgatgagaatggcatgagtagcgagcctgtcacgcagcagttcccaactgctgagaggactaccgtggctagaccaaatcaaaaaagatcgaagaattttagcgaacaagaagataagatacttgtgtcggcgtggttgcatgtaagtttggatccagtgctaggcacaaatcaaactcgtgctgcatattggactagaatatacgagcacttctacaaaacgagtaaatccacaccagatcgcagccaaaattcacttatgcatcgttgggaaactatacaagagaatgtcaacaagttttgtggatatctgagccagattgagggtagaaggcaaggcggggttagtatacacgacaaggtaatacatagttatgtagcttgtgtttttatgttactttataaataaaaaatgtgatgtttgctaactacattcaccatacttgacttgtgcagattgctcaggcaattgctgtatttaaggagttggaaggaaagccctttcaattccttcactgctggtctctcttgcggtcacaatctaagtggcatgataagatgaagcaaataacatcccagaaaccctgtgccaccaacagacagaagccaagcatagatggttcagcaaaagctacacccacaaatgatgaaactaccaatcatgttggtgaagataatgaacctacagagactgaagagccaaagagaccgatgggtaagaagagagctaaagagcatttgaggcgtggtgaaacatgcacagatgcttttgatcatttgtgggagaaaaaaaaagaagctgatgcagagaagaagaaggagagagatgagaggcaccaaaagtcatatgaactagataagcagaggcttgagttagataaaaaaaagggtcgcgaatgagacggatgagatacagttgaagaggatgttagaagaagagagaattatgacaatggacatttcttccaagcctctctcacagcagcagttctacaagagtgtacaagatgagatcatcgctcgtcgcatgaacagttccggttgataggtttgtgtttcataacagtttacattcagttgagtgcctgtgttcatgcatatacttgttcttgtgtccatcttgttgaaatgctgcctttgcacagttgcactacaccatctgattcttaaatatgttgcatgatccactgatacatgggactacatatatttttaaatatgctgcatgatgcactgccaaatcttggtctgaaccttggtctgtacatgtattctgattcattttcactccatctcattgctatcaacagggaagccaccagatcagagaatgggagggaaggagatggcaatatttggtggcaatcgtacttggagttcagattagttagaaatttacctaggtttactaagtctgtgcaatacaaactatttatattcgcaattgtgtctattttttgtctctaaattaggtgggtttactaagtctatgcaatgcaaactatttaaattcagaattgtctattcagtagttgggtaattccctcatcctgctgtcagtaatgcttctgtctttgttgctgttgacagagtcagaagcctcatatattttgaaatttgtactaatgatcggtcatcttgctgacaagctgatgcatatcttgcaaattatatataagctgaactgtacctatgactaggttgacaagttaaaggaagtgcacttttattaattctcctgtactattcttaaaccgaacagtacaccatttattcaatacatgaaaaacaaattaagatgatttggcaaatcctcacatgtatattatttattacatggaattcaaacatataaataaaacctcaatatttatccggataatgttgccacaagtgctccactaggtcttcacgtagctggtagtgagtttcgtcgtcccttatttttttgtgcatctggataaaatcatcaagatcaggtatttcatcgtgggacactgacattttctcccccctctgggaaccgttcttcccaatcaacttctccctcatcttcaataatcatgttatgcatgataacacaagctttcatgatgtatcctaaggtcttttcatcccaatgtcgagttggccctcgaacaatggcaaatcgagcttgcagaaccccaaaagctcgttcgacatccttccttactgcttcctgtgctttggcaaaatattttctcttgttgccatgtggttctggtatggtcttcacaaatgtggcccaagaaggatatatgccatcagcaagataatatcccatcgtataattgtgaccatttatactatagttcacttcaggagccttgccttcagctagctttgcaaatagcggggatcgatgaagtacattgatatcgttatgagacccaggcataccaaaaaaagcgtgccaaatccagagatcctttgaagcaacggcttctaaaattattgtaggctcgtgcacgtgcccttggtacataccgtgcaattctgtagggcagttcttccacttccaatgcatgcaatctatggagcctaacataccggggaaacctctgtcctcccaagttcaagtaatcgagttgtatcgttctcattgggtgatcttaagtattcatgttcaaaaacttctacaactgctttcacaaaccttctcaggctctctatagcggtactttctgcaataccgagatattcatccaaagcatatgctgctaaaccataagccaactgacgcactgctgcagtgtccttttgatgacaactgaacccaattaaaccagctgcatttctcttctgcacaaaattgtcatcgtgatcctctactgcattcattatgtcgagaaacagaggcctgctcattctattcctgcgaatcataactaatgagacatgcatatctatgcatataacaaaaataaattatataaaatttacttatacaaacctgcgcctgaataaaactgggccataggtaggattatcggaaaaatagtcttggtataatctcaagtgccgtgcttctctgttgcgatcaatcacttcatgtcccatgacagacccaccatgtcttggtgcattgacagagtgccaatagctatggacgatttgtgccgtggcaaaaaaaaaatcatcgtcatcgtcagacgatgattcatccacgagctgttcaaacgaggagcgaggtcgactcatcttggatcaaatcaaccgccaaaccattattcatcataataaattaagtttttccccttgcgacgttgtcagatcaaattaaaaaaaatgtgattgaccttccgtttttccaaatatttattcatcatatcaaattaagtttttttttccatcaagacattgtcagatcagaaacataaaaaaaggaaatagaacaaagtaaaaaacatggttgctagcaaaattttgctactcacgcactgcacaagagcttgtgcctgtcaccaatcgttgctgcttgctgcagttgcctgattgagtgaagtgctaacatcgccggccctgacagaggaagagctctgattgagtgaagtgctaacgccgccggcgctgacagaggaagagctctgtgtgcgtctatagcactgtgtccttcgatcaatttcgtatatcgctgcgtctgatatatagcctcgccaacggtatcagttgcgatctcgcgcgcgactaggatgagcagccatctccttccgtccgcgtgcgtcgcgtcgaccatgcccattcccctccgcatccgcacgccgcgatctcctcctcgcctctcacgcgcgacgcgatctccccctccgctctcgcctgtgattttaacgagcaggtagaaaattagttgggaagggcccactaatgatgatgtggaaaaattttaaaattttgggaaccaaattttagtcatctcttggagaagggggtgtattttaggctaaatatgttcttggctgtctccaatacaggatttttgggagtttaattttagtcatctattggagatgctcttagtagaatcaaacttattagtagcaatataatagatcggacctaactgagacagtataatattgaaaataataagaaaaagatctagttagccgatagatctacaaaaccatgatggatatatcgaaccaatctaaaacaacaatgtgattggaaaaacaataacttactcagaatatcggacctaactgcgagggagtcctaactaaaccgatacgactctaaataacgatgtagttaaaaaatagaaccaatgtatcagatagacaacgattgcaacaacttgaatagaatgtcatacctaactgagaaagttctagccataccgatacaagcgaagttgaggaactacttccttgttggagatcgaaataatgtagcccaactcgaaaaagttctagccataccgatataagcgaagttgacgaaactacttccttgttggagatcgaaacgatgtagcctcacttgatactaagaactcgtcggaataaaaagtggtggtattacaagtggagatgaatagatgatttacaaagaccacaagtgtacgtatttatacgcttgggttgatacaagtcttgatcggacaatagataagacacctaacaagaaaatgaaaataactaatcctttctatttaaaacatataatacacatatgaaactgccctaccgtggttttcaccatatgatcagcttggctggtaccgtgctcggcctagcccattactagaatctagtccgtcgacgtgaagtgctgaaagcttgggccgtttgcctttaaattccgtccggatttgctgaatcaacaaatgcattcgctctgacgccctgctgtcttgtgtgtgcacgtgttcacgttgatctgtcatctttgcagaatttttcatctccatatggaatttcagctatttgttgtgttgggaaaaccaaaggaccatttctgatactccccctattttatattataagattttctagcattacccatattcatatagatgtgaataaatctatacacatatatatctagattcattaacatccatattaatatgtgcaatgttaaaaagttttataatatgaaacggagtcagtaccaaatactgagtcccatgaaacaactcagaacacatgggcatatcggcagggagcaaagggaggctattattcaactgtactcactgatctcataatcacttggctaaaataaaatcacggagaaaaaggcgtgctgctgatagtagaacacaccgactgcaaccgaatcgccacaaattagcaatcatcaacatacaaaagtatattcacgaaaacaagctaaatatcccagaacacaataatttggagaaaattatctctcaaaatgcggcacaacggtctatcatcagcaatgttcactcatgccggccgcacgtacggccggagggagggaacagccacgtccccaagctacccactggccgtaatggcgtcttgaggaacagctgcgaccggcgttccctcatgtcgtagatggtgcagaagaactccaccgtccgccattgctggccgccgtagccatcggcgccacgatcctgcaagaagaagatgcggtccccaatgttgtgtgccttgccctgatggacgtcggggacgacgtggacagaccgggatcaccagcgcccgacgaacggcacgcggtcgccgccgacgctcctcaccttcctccaccgcgaccccgccatgtccgccgcgaacacctcgaacttggtctgcaactctatctgttcggcggaatacaaagggacgtaggaatcgtcgtcgtcgggatacaaaatgacgttggattgttcgtcgtcggagtatgatccctctctcgtgctgtgattctctttgcggaccatgagcaatgcgccgtcggactccaccaggtagagcggcggctcggtgcggcggccggggcttatccggacgaggcaatcgacgctggacacggtcggctcgccgccggcgtggctgccgtcgtcgtcctcgctgatggagatggagaggaggtctccgctgttgacgagggcgtggagctttccttggtaggagaccatgtcttggatctcgagtgcttgcaatctgtcatgcctgcacgaccacgaggctgaccccggccggcacagcaacagctggctcggcctcttgccgacgacagcagcgacgagggtaggcgaacacacgacgagcttctgcagcggcggcggcgtgtcgtgggtgaccggtgggtcggtgggcatcctggggagcaccatggtgttggccgtggagaacgggctcaccagcgtgtacgcgccgtcgcggcgctggaagacgagccactcgccgcaggagctctgggcgtgcggcagctgctggtggcggtggagatggagcggcagccgccggaaggcggagtttggcaggctgtagaaggtccggtcgggcaacgcgagcatgggaattgccggggcagtgggttccgccgcgcgctgatacgccactggcggcagacggcgccgaagcggacgcggtcgccgtggcacaggatgcgaccgaagatctcaccggcgaggtccgtcgagagctccgaccaagatcgtcgtggcgcgtcctctgtcggcgacatgttcggcgacgccgaagacggcgagatataggtttcccgtttccgtgtgtgtggactgtggatggatcgagcgctgacgagacgcgatacgtgtgccgcgcggatacatcatacaagtcgcagctcatcacgacacgcgaattccgatccgaggtcaaattgggagtgctacgcgggaaagtagtttatacatttaggtactagtcccctcgtctcataaaaaaccaaccagtattggatatgacacgtgctaacacatactacgaatctggatactagtatgtgtcatatccagttctagattcgtttttttcgggacggagggagtacaacactaggccagccataaaaaattgaatattcatgacacgttttttaaactgttaaatgatttgttttcatgcgaaaacattttatatggaagttgtattaaaatatcatataaatatatttttcaattttatagtaattaaaactcaattaatcatatgttaataccaccttattttgcgtaaaacatttaatcttcatctacatgaggttcaaataccatgtatgcatgtgatttaggcagctatataaagatttcataaaatttaaaaagttagattataatgatataatatatatactatacaaatgtataagtctaaattcatatataaagaaataaaaataataaattttacatatattgtataggtactatttattgctttgattttattattttttctctagttcgagactaactttagccttgcatatttgtttatagactcatattatcctaattgatgttattactagtatttcttaattcttttataattatctgaatcgcatataaataacaggttgccatgatatctgggagtgggtgtagaaaaaccttgtccactgctcagcccagcccagcccagccgagatagaaggctagcccaccaacgaaggcctgccactttgagtggagtggtggaaaaggagtttaccgaagggcgaaggggacgaccggaggggggaggcggggagtggggagatcgggatcggcgggggggatggcgtcgccggcgaaggagcgcgacggggatgggaggcgggcgcacgcgacgatggttggggtgcagttcatcaacgccgggtaccacgtcatcgccaagcaggcgctcaacgtcggcgtcaaccgcgtcgtcttctgcgtcttccgcgacgtcctcgccctcgccgtgctcgcgcccctcgccttcctccgccaccgcgggtcgccttcgcaggcccgcacgcctctcacctggcgcctcctcgtctccttcttcatccttgggctcacagggtaaaccccacccactcccaacatctcaggtcactgaggtcaggaactcggtagtggagttctgaagcaatgcagctgctatgctctgaaaaattcgtacttcgatgaatccactatgtttttccctgcagcatcttcgccaaccagcttctcttcttgttcggcctcagctacaccaatcccacatacgccgctgcaattcagccttccattcctgtcttcaccttcatcttggccgccctcatggggtcagtctctttctcactggtttgcgacaatgcatatatgttcatgcttctgtttgtcaaggttaagcattcttgtttgtttcagcactgaaacggtgaacctgagcacacatgagggcagggccaagattggtggaacgatcgtctgcgtgatgggggctgttttcatggtgttgtacaggggtcctgctttgttcggtagtggcgagctcgaacttgatgatgctcatagtcatggtgtcattgctgacatgtcacagcctgagccagtcggacccttgtccattgtgtttgggctccaaaagtggcacattggagtgctgtgtttgacagggaactgtctttgtatggctacttatcttgctttccaggtattactgatttttcagcttgttaaagctcaattttgcttgcactctttgatgttttttttttggggatattgggacgcctggaaactttaatttatgataaaagatatgagtagagctagttctgtaagctaagattactatttaaaaagggtgactttagaaccatgaagtttgtcaagatcattttagctggataaatttcagtgttgacaatttcctcaatcatcatagttttgtccctcttgaaatttaggctatttttattcacttcctaaaagggcacatcctaattagccactagttttaaaaaattcttgtatccctctctttccacacttgccaccaggctctgatgattatgccatacaataatctcttcattttattgtcctgttgctacccaaacatgttctatcaatcacacagggttactgattgtgcgtggtcgaattgtctattttaatagattgacgaaattctgcaaggtgatttgtcatgggctgatcagatcatcagattatacttcaccataaaaacaaagactagtcatttacaggagaccatctatctcactgtactttgaaacttatgtttgtgtggtattcaacttgactttagtatcttactcctgtttgagtactgaaacttttatgcgatcagcgtgctctaacctttcttgtttttatacttatcatattcatctatttctttttcaggcgccaattttgatgaagtatccgtgtagtttgtcattgacagcgtactcgtacttttttggtgctgttttaatggtcatttcaggagtttttgcaacaaattgtaaagaagattggactttgactcgatctgagtttggtgctgttgtatatgctgtaagagttatctcaaatttatttaatgctctgacgtgtatgttcttagtgtgcattttgcatggcttaatatccctttggtacatatatatgttagtgctgatgcagtgcattgggttgctgcatgttccttgaattgagattctgcttctatatgtggtcctattgaagaaaccttgcattagtttttacaggccataaaataatttagttgctgcataccgtgcataatattgtttgaatgaaagtgtgttttatcccttgttgcagggattcatttcttctgctaagtgtgttttatcccttgttgcagggattcatttcttctgctcttaatactggtttactgacatgggccaacaaaattttgggccctgctatggtgtcactttatatgcctcttcagccagtggtttctgctctactgtcgaagttttttctgggaagctcagtttaccttgcaaggtaagaacactgttatcactcactctactttttaatcacagttacaattttttaaaaaaactttctcttgcaatgtgaacaatactgttttggtgcctcatggcctcaccttcctggtgtaaatttgtaatgtatgtttgcatattgatgctgagatattggctatttgatgatagatcaatagttcaagcttctagttaatctatcaattgatcagggtacaaatagttttctatcaatccatttttctcatttctgttgatctaaactctgaagttaagatctttgcttgcttgcagtattattggagggtttctgatcatctctggtttatatcttgtcacctgggcccggcatagagaaaagttgacaattggagtaccatatgaaacatgtgcatctgagttgcttgaaagtacttctcatgtcgtaaagagcagaaacatggcctcggtaccctatatatcgctttctaggccgtcaaacgttccacatgaatcataactcttaagaagttggtcactgctatccccttccttactcagaatatagatagagaaagcatgcattagaaaacatgaagtgccgcaaagaagattcaagtgaacgtagttaagactatatgttaacaatgctgtcatctgtccttggcttagttccccatatggcttctcttcagaaaacagcattcttattcttcatttcctaggagaagttgatttgtgtatgagtaaagagaggttatgctcatttagttttgtgagactaacaactctgaggatgctgcctgaattgactgtcctttcaccaaatgcaaagccagctcagaagctccgtcggcttagtgaatccccaacaaggcaacaatacgtatcctgttaacctcctgcatatgtaattactctgtaaacattatacatgtgcgcaagtcagagcggttaaatgacttaaaaatctatgtatctcctaaatgctagtagtacatttgaccagagtacaccatgtactgtataaattcagtcctggaaatcatgcaagttgcaactcttgaattgatgtttttgtgagattgtccgtgtttgtttggaaatctggaattgcttatttttcgaaattcttagtccacatcatatggtcccctgtaacacatgtttatcagcaattggaaagcttcagatgttattatgttttgtatttcaaatcatcgtatgtatatacataattttctcaactgtgtgtgtacagtatcacactacgtttttttcccactacagtaattcgtgatttcatatggaaatgtgcatcggagtcacttgaaagtacttctcatgtcgtaaagagtggaaacatggccgtgccctatatatctctttctaggctgtggaacgttccatatgaatcataactcttaagaagttggtggtctctgctatcacttcctttgggtatatcctgtcctcccttgctcagaacgtagatacagaaagaagtgctgcaaagaagattcaagcgaaggtaggtaagactatgttaacaatgctgtcattatcctcggcttagagtccctatatggccttctcttcagaaacaacatttagttttgtgagactaacaacacttagaggttattctcatttagttttgtgatagtgagactaacaacactgaggttattctcatttagttttgtgatagtgagactaacaacactgtggatgctgcctgaattgactgccctgttaccaaatgcaaagccctctcggcagctccttcggcttgttgaatccccaacaaggcaacaatacgtatccagttacgcttttgcatatgtaatgtaagtactctgtaaattatatttgtgcacaagtcagggcagttaaatgacttaaaaaaaactgtgcatgtcctaaatgcttgttcatttcaccaagtcatgccagttgcaactcttgaaatcgatgtttttgtgagattgttcttgtttgttgcaactctggagttgcttatttttcgaaattcctagtccacatgatggtcctctgtaacacaagtttatcagcacttggaaaacttcagacgttactatgttttgcatctgtgctcgtgtagttaaaatcattctttcatttcatatgtactctacataattttctcgaagtatgtgtgcacttatactacgtgttccacagtaactcgtaatttcgtatggaaaatgtatacgtgaattctatacattgctacgttggtttgtatcattggtgctgtgactggagctcggcctgcgtgacgaacaggccatggaagccgtaggggacgcgtccgggcagctgcacctccgcgacgatctccaggtccggcgaccgcgcgtccatcaccacgaaccggttctcgccggtggcctcgtcgtggacgtagcacaccaagtacccgtcatcctcgttgccgttgccctcgacgtcgtcggccacgaagaacggttcgccggcgaagcacccgggcccgaagtcgcgctgcgccacggtgcagtcgccctcgccggcgcggtcgaagtcgagcttggccacgccgccgatcttgggcgcggggtcgccgacgccgaagtagccgtacctgttgcggcggccgaggaaagccgggttgatcacggggaagtcgaagttcccggcggcgagcggggtgcgcgtgacgacgccggtgcggaggttgatgcgcaccttctcgacgcaggagtgcactagctccatgtgctccagggcgtgctcgatggagaggacgttgggcgccaccagcaccagctcctcgccgccggcctcctcccacgcgttcaccgagtgcatgatgttgaagcccggcacctcgaaccaccgcatctccgactcgtcggtggcgtagcgcgggatcacgccgaggcggggcaccttgccggggtccgaccccacgggcgagccgccgcccaccaccatgtccatgggcttcatcacgatctggatctccgggaagatggcgtaccgctcggtgatggcgaagtcgtgcaggaacgacggctgctgcacggagaagatgggcacgtcggcgcccttgttgccggccgggtcgaaccggaagtacgtcacgaacggcggcacggggccgtagcggaacgcgaagagctcgccggtgacggggtccttcttggggtgcgcggtcatgcccatgacgaggcggccgccgaagtcgcacctgccgtgcgtggtcacctcgccggtgtccgggtggacgcgcacggcgtaggggaggtcggactcgccgagcgcgtagaggcggccggcgaagtaggcgaggctggtgttggcgagcccgacgccctccaacggattcatctgcccggtcaggaccctggccgccacgacggcgccgcgcgccatcccggccacgccgtggaagccggagaagacgttgggcaggacgggcgcgccggcgtcgcgctccacgaggtacttgtacgtctgcacgtagcgcgagcacaggacggggtcgtcgccggacgacgcgggcgacgggaggaggagggagtgcagcatgccgtcgccgtcgaacaggtggtgcggcccgcgcgggaggtgctgcgggttgggcccgttgcggatgtaggcgccgccggcgaggcagcgcgggatggcgccgcgcacgacggggcagggcgtcggcggcagctcgtccacgggcacgaagttgctggtcagcacgttccgcgggtccaccgccggccgaagcgccggcgggtcgatgaacgtgttgatcacctcctccagcgcgttgcagaacgtcatcggcagcgaagcggccgacgccgcggcggcgggggcaggccggcggcgaggccgagactggctcggcgccgccctgccattcgtcgtagcaataacagttctcgtagtcttggtcttggctaccaactgctcgtcctcttgctcggtctgcttcggagtgcgggtggtggtcaccagcggggaggtgagaacggtggtggaggcggcagccgatggcggagcggcggaggcgttcttcttcctgccatagctggggctctgtggagcagcagaagcagcaggagggatgtaggaaagcctcatggacttcatggtgagtgagtgagtgaccgagcagtgagcagggcaaatcctttgcatgctactactactgcactgagttgtgagattaaccgtgcggctatttataaaggcctctcttgctaagagaggctgtccctttcagattcgtgctagaccgggaagaaagatagtacaagtacctcgtgataaagatactaatcactccgtacccatagaagtcgtttaggataatttttaagtcaaactttaaaaatataaatcataaataactatcaagttgttgagcttgaaaatgtaaaaattatatgaatagatttgtcttgaaaaatactttcataaaagtatacatatatcacttttcaataaatatttttaatgaaacaagaagtcaaagttgtgttttggagaccgtgtcgctgtccaaaataacttcctttacgagtacgaagggagtacactactactgtaccacttcagacaagggaaagatacggcgtaattttgtacagttgtacctgtacagttgtacctatgaactatgaagactatttgactagtaaaacctggacgattggcaagacactctagtaagattctcaaaaaaaaaaaaaatcaagaaatggcattagcaagcgcccaatttcaaaaaaaccatcaacaaatacaagttccataaaatgatatcgtgcgagctactttattccaaaaatatcattgccgttaaggtttcgccagcaaccctccgttaagtgctataggatgaacagtgtatttaactgtgtgggatggacgaaaccctaacgacgatgatatttctgggacaaaattatttgtatgatggtatttatagaacccgcactcatcgatggtattttttggatttggttgtttgtcaacgacatttcttgaattttctcgtgctcaaatggaaatatttttcaaaatattgatccctcttttgatagctagttgttttatttcaggaatgagattttcatgaatatgcgtagagtgaatatttctctcaagcaaatagttgctgattggttacaactattgtaattttaatctggacatccttttcctttaagtcttttaaataacctttttcatacttataaaattatactaccgagcaaatgcctagtagttgttcctaaaaaaattactctagtaagaaacttcctctgttttatattataatataagtagtttttacctttttttctaatcaaaactttttaagtttgattaagtttataaaaaaatgcagcaaaattttcaacacaaaacaaacatcggcctgggagatctgctgtgcaggtccaaagattgttgagatgcgggtgtgccagtcagtttggtcctgcaactgacaagatatgtaaacagtagatcaaacagccgatcggctgacaagccgatgtagtgattccagccgatgccgataccaaccgatagcgatagggtttaagcaatcggctatgtgtctaatgtagataatgatataaaggcaatcggctgatgatgatagaatacaacaacaatataatccaatagaaaccaattggctatcaatatgatagaataagcactggtctgaaggctaaagcatacatcggctggaggtccgatgtcataaaatccacaagattagattaaacgataatatctttgttgcgatcggctaaatccaatatgtatgtatatgcaatccttacaagccgatgcaacgtccagataactcatcggctgaaaccccgataaaacccttattggcagtcaaaaagcaagctagagattatggttctaagcacgacttagtagatcaaactcaactgatgcagcactaagtatgaaaagaaacacaatatctagacaatcaagccgttgactgagttttcagggtggtagatgtctaagctaatctaatctagcaacgcgatttagccgataccgacagaaaccctaaaacgagaagcagccgatagagctaaattgatatgctaagactagattaacatagacatatgataaataggtaggcaagtatatcatccaaaccagaacaatccaagagatcgaatgtcctgatgcagccttaaacgacgccgacgtagacgatataattgtctgggccgacggaacattggacttaccccttagccggagatcgaacaccgatgcagccccgcgtcgggtgccaagttccggcggaacgtagaaacaaaagtaaaagtaaaaatggtggcgatgcgccgaattgtattgatcgtgaggatagattacaatgaccctgggtgtacatatttatacccatgggtagatacaagtccttgtcggacaaaaaagaaactttcctaaagataaaaggaaaagataaagtccttataggacactaaacacactttcttaaagataaaagtaaactaacaaactattcctaattaatagataacttgccatgccgcattctctttgaactcggtctcttctggataagcttcctttagtagatcaatttccttaaccgaatatagcaagaatccgacaactgacgacttgacaactctcatcggctaatctcaagacttcgaagccgatgctgactctaaaccgatgactactccgggcttactaaatttcactgttaacaattatcgaaatatattcaatgttatatttaataaaactaaattggtgttaaaaatgttgctaaatttgaccaaacctaaataaggttgacaaaaaaaaacaaagtgtctataatatgaaactgaaggagtatactataaatctataatcaatctaaaatctggtgtatggatacatgttggatatacccgtgttggtattgcctacctagaataggatatatttgcagtactctacattttcatctccaaaggcaatcagtttttttgagaacaatcatctggttttgcatattttgcgttacaaacagatttcgtatttaatttatggtagcttttaggcagcatgttggatggaggttaactttgcgacaactccatttgccataaggcccataactgggcaagccacacaaagggtgtgttcggcactccatcttctcaacccctctccctcgttttccgcacgcacattttttaaactactaaacggtgcgttttttacaaaaattttctatacgaaagttgcttaataaaatcaaattaatcctttttttaaaaaaagctaatacttaattaatcgtgtgctaatggattgctccgttttccgtgctggatgtttgggttggaaacctgggttgccgaactgagccttaagtgtggccaataatttattggctctaactatgacaaactttgactagaaaaatgagaatatgatgcatgggccaatatgctaatgaagtgtggtttgacttaactgtgacactcaaccaaatattaatctaaaaaattatggcacgcctaaggtttgatgtggcaaaccatggccaccaaccagacagctccgtacctcttctagtatcaaaaaggttattgctaatatttcttttgattctaaataaccattttaaccttctcaactctttcctaaacacaggttattttataacttataagtacctatcataatttctaacacgtttagctcatcaaataaatattgtcaatcttatatataaaaggctcatccttttcagcactgtatgacagtatgaatgaagtataacaaagttcctttagttcctttcttatttcttatgcacaaatctaacacaagttatatctggaattaaggcgagcaaatatgccgacaccaaattaatatgggaaaaactaagaaacgagatgtcagtgagtgcaaataggaaatttttcattgaaatttacgagtttgaagaatgaattaggttaccaagtaaacacaaatagagggagtcgatagtttttaccagaatttttatttctatctaaaagtttcacaaaccatcattttacgaattgggtgtggattggtagggcccacactgtctatatcgactcttctttttactcgtcccctgctaccatacaattttccttggtcgccatcgtccatttccatcttcccttcatataatatctacacagttatgtatgaacatcactagagaaagcacaagtggtatgatggtgaagttgtgggtacataactctactcagcagggtttaaattctggtactcacaaatattacacacatatagatgggctttcaacaagtatttagggagatcagggatgtaacgctggtttatatcacttagagcatgtgttaggggacgcatttgcagatgaaggcgaaataactcatgtaataattagattgataatcaagagattatatatacaggagagagtccaaagccttccatattttaactaccgatttataaaaacaaaaaccagggagagaaggaaagcgactcaaataacccaaaacaacctaagtagtctatcccccctccacacacacacacacacacatacaaatcgtattgggaggacggatgttgagactagaccgatactccgtgaatacggaagtgggtagaccctttgtaaaaacatatacacactgtatagtgtcaggcacatgcagaacgcaaatttcaccaagagctactctcttacgaatgaagtgtaagtcaatctccacatgcttagtccactgatgctaaactggattggaggagagatagacgacagaaatgttatcacagtacaccatggtggcacgctagagtagggatccaagctcagcaagaagctgtcgcaaccaagtagcttcgacaacaccattagcaacggcacggtactcggcttctgcactggagcgagagacaatatgttgacgcttggaagacacgagacaatattatcaccaataaacacaccatagccggaagtggacttgtgtgtatctggacaaccagcccagttagcatcagtgtaaaccaccatctcagctggagaagtttgatggagtaccaagctgtgatcaagaataccatgaagatatcaaataacccgcttaatcaaagcaagatgtggctcccgaggatcatgcatgaaaaggcaaacttcctggacatcgtaagctatatcagggcaagtgaatgtcaaatactatagagcatcaacaacaccataataattagtaggatcagtaacagaggatccatctccagagagtttggagtgcaaaaaaagttcttgatgatatgaggggcaacaatgacgttcttaagaaggaaattacggaagggggtgtctaaagatatagagcaagtgacagtaatagggataacagaaccattgcctacgacaatatgggaaggagtgaccgtacggtgtggagaattagagtgagcaagattaccgacatccaatgtcatgtgatcactagcacaagtgtccatataccagtttgtcgatgatgggggagtcagcgtcatatagttgaatgcactggcgagggtgccctgatcctagtcggcctaaggaggcatggtctggcagtgccagtgtccactgctgagaaggaggcaatccataagtaggtaggccggctgaaaagcccatggcgctagggtgatcgacaacaagagcgtgcagacgaggctgtgatgtgccggggaagaacgagtgcataggtcacaccttggacttagctggcccaaggatgctagaaagtcgacggccagccaggagcagccaacgcgccagtgctaggagagttggtgctgcttgtgttgttgttgtcgccgccattgcttttcttgtgtcgatgattgttcggataattgccgtcagaagt

SEQ ID NO: 28341 - DNA, 7609 bp, Oryza sativa
  unsure (1)..(7609): unsure at all n locations
tagatctatttagattcgtagtaataagatgtgtcatattccgtatttatgagatggagggagtatagaggaacacgtatttcttttttttaagttgatcacaagggaaatttaaatcctgatccctgaatactataggttacagggaacctgtagtcgagaagagctgaatgctgcgtgagctgtagaactgcagataacagatatggctggagcaaaggagatgcgaagcagagagtgaaagagaaatacggtgattcacaaccgacgcaacctggaatcccagcatcatcctgtaggtgaggtttttgttcgtagttgaacgcgtgcacgcaatgtggtgcacgtccaatcataccacacataccatttcagctggcagaccaatcgtcaagtctgtcttgcattcagacgatggcatgatttttttttttaaaaaaagggtcttgtgagaattttttttctgaattcttacatatagaaaaactgaaatgtttccataaaattcatccgctaaatcctacattacacctaaaactgacatctagtaggaagcaaagaatctgcccgatataaccaacagtatcgcctactaatatctgactccaatatcacccccgcaccagaattaatgcaaataatcaggcactggaattgtagcaccacaagaagactccctgtaaaagacatactccctggagtatatagtacagtagttttgctgtagttggttctttgattgcatgggaagtgagtggcgaggatggctgagcccggcaacatccatgtcatgtcacgtgtgccatcgccgccatctccatcgtaaatttatgatcaaatggaatccagtgaaccctgaaacggttgagccgagccacccgtgcattgccttctcttccactccaaccccaaaccgctgccactaatttcgctcacgaaaagcatagggtaaaaaaaaaaatccatgggtttatcccggtaagcttcggctgcttgtgggctgtggctgtgataaattggcgggatcagagcaaccagtaaactgcagcaagaagccaagaagctaaatcgtttcagtggcggatggccagcaagatattcccatgagtgatgagaaagcaacggcggtgacggcgatgcggcaatatctgggggacattttgtgtaggtgtgcattgtgctatctgaatcattggtggtccctgtgctccaacagtaatgcttcgtgttttgttcacaaaaaaagtgcagctcagatgaacagggagctcagggtccccctagattttttttttgggtgaaatttgatcgtgtaaactgccttctcgagaataaagacgttttacactggctttgttcagttttttatgtgtgcatagagttcgagctattgagtacccattttgtcttaattaatctaacaaattatttatgtaaggagtaaatatgaatcatggaatgccttgtacgtaaccaaccaagattaatttttattggttaaacctatgcatcatttaaagtgtgaactaatttcttttggacacgaagtgtatttgatgagaagatttcagaatgatgtatattttggtattcttggtgttgatgtcctttgtgtaaaggatggtcatattgggatagaaggagtattttctaagataaatgtgatatatttcatcaagaaatgatattatggttgctcttggttagaatttcttttattttttgaaccatctattttttttgttttaaaaccaaacccttttaaaacttactttcaaagctggttgggatggcgtgaccaaaaaattcagataataagtttagggatgatttaattttaaaattaaaatttaaaacgttcaaaaataattaaaaagtcgcttggttaatagtcttaacacagacaaatgatcaacaagaaacaacgctgctcaaccaatataaactattctacacccgggatatagaatagctattctataccccctccctcccaagggccaaacccacctcccctcttttctaagagttcaaaacccacctcccaccttagtcaaaggtcagtcaaagcactctccacatcggtcaaagcctggtcaaaccgcctaccaactcccccaccacccacctcttctcagctctcatcttgcggaacagtgcagtaacgcgacagccatcgtacagtaacgttgtgtcttacgtgcagtaacagcattcgaatttagttgaaatatagtcatgacggatctacttttgataatcactttttttctagcatcatggtgcaaacggttttaaaaaaatcatacatcacatgagaaatattgttattcaaagcttcggttttttggatcttgactctccacaagtagtaatactatagcattattactactcgttactactatgtgttgtgcgttactacaatcccatcgcgacgttattgtaagtgtgcagtaagaccataagttttgtagcaacaatgcgtcttactgcaattcttgaatagtgttactgcataaacatgtggtaacgtgtacctgctatgtagtaacactcccactttgtgcggtaacaagtatatttagcatgtgagacttttaaccctttttttttatttctggtttactacaatttcatcatgatgttactgccaaatatgcagtaacgttctgtatgttctacagtaacaaagtgttttactacagttcttagatagtgttactgcataaacatgcagtaatgtataactgtcaggtggtaacgtgtatatgccgtgcaataacacttttacttttgtgcagtaacaagtatatagttagcatacgagactttgaacccatatatatatattttttgtttcaattcctgatttactgtcaaaagtgcagtaacgtcaataacactatattagagggaggataccgattttcttaagaagagggaggaagaatggtttcttgaggagggtgtatgtagatgcattttgaagttctatcctccacatgcagtaacactatagcatcattgtgaaaacggttttaaaaaataatacatatcttgtgagatattgattttcaaatattggcattttgaactttaacactccatatgcagtaacataatatgtaatttgcagtaatatgggtatatacatgcagtaacatgattttaccaaatgtataaaattgttcaaaacactcctacatcaatcagacctcgctcaaagccacctacagactttacctataggctacctattcgatcttcatctcgtaaaaatgacatagtaaaactacgattatcgtgcagtaacatagctacttggaagtggtaacatgcacctattatgtagtaacacttctacttttgtgcagtaacaagtatatggttagcatgtgaggctttaacccatatatttttgtttcgattcctggtctactacaattttacacgacgttactgccagaagtgcagtaacgtcctatgtgttctatggtaacgtcacatgttaatgtacttttacaacaatgttactactgtagcatagtaacatgttatgagtttgggtagtgaaagatattagaattgataatcatattactttctcacacatctttgaacaaatagcattattagatgaattggntagaggaatgtgcttttgactatgacatcatgggttcaagtctttaatttggcaatttattttttattttccgagaaaatgtgtttcggggagaaaagaatagtcttaacacccctccccccctgtctctctctctctctctctatatatatatatatatatatatatatatatatatatatatatatatatatatatatatatatatatatatatatatatatactagtagtgtgtccgtgctaacgctacggtgacaattaatattgcaaatgaaacaaccaaatgacagtgatacaatatgcttggacaatggtatatatatatagagggacgactcttccgtactcccaggtgaaccggtttgaaaaattcaaaaatcaagtatgcatgtccaacggatggaggaaaatcaaccggtggaaaaataattgttctataataattgatccatgcatgtctgtttataatgctaaatgtgcactgctgcagtatactattattttgggagtaagtatatactatacactcgttagattagtttgtactatcagtagtcagtatatactacaaatctgatttcatactcttttttttccttgacagtatatactgcatttctcgatggagcagtatatactactttttatggtttgtgttttttttcttcaaagaagcagtatatgtatttttttttcttagcatacagttagtactactggtagtactatgtactacttattaaatagcagtagcatatacttgttttgacgttgtagtatcattatatgctacattaattcgtcgataaagcagtatatacaattttttttgggtcagtatgtgtatactacattcctaatcacttaatcaagcagtatgtactacttttttttgttcggtcagtatatactgccaagctagcagtggtatatactgtttttttagatagtagcggtatatactgtttttgttttattagtagtaggtatggggttgcttatacattatgaatcacagagcacaccacatctcaagaaaaatcagaatacattaggacttacgagtagcaacatgaaaagaagtacatatctgcaatgacagattcacaaacaaaatcactagaaaaatacataaagcacaaaagccgccatgaaaaccctctttttatctattgtcttgggataaccatactgcttctttaggattctctctaagagtgatattttgaggtgtgaaaagtttggtatctcaaatatttcacacaatatttgtttcttcccatccaattcatcttgagagcaagggataataggttgacctgagcatggcaagctaaaaactgcattgacatcattagaaccgaatggcagctcctggttgacatctttaacaatagcgcatgatttcggatcaactttgctcagttgccatgccccaaactgcatgtgtaccttagtaaggctgtgtttagttcacccccaacttccaactttccatcatatcacatcacatccaaaactttcctacacacgtaaactcccaacttttttttccaaactaccaactttccctaaactttcaacttttttcaggaactaaacacagcctaagcttgatatccaaaagtccatcaaatccaatttcaccaatcaagtccctcttcctatcatcaaagtctttaatgatattcactacgcatttgggctgacacctgcagttgataccaaaggtagtgttgtctttcttttgtctatttaatactctgctttgccgatacctggataccacccgtgcagccgtcttatttaggctgccccttgtgccagaaaccttcaaagcctgcagataatcatttttcattacataaatagacaatactacatggaccagtttatttaaaaattcaacatatacttctgtttaaaaaaaacagcatacactcatatattcatatatgtatggaaaaatgaagtacataatactgagtagcaaattctgcctatgtgtaccccctaaataaaaaaataatcatgtctattgaaaaaaaaagtaagtatatacaaagtttagagcttactgctgtctaaaaaaatcagcttatacctctctatgtaaaagtgcagtatatagttcttcgtaacaaggtccagtatgtaaaccactatggaagagactcagtatatatgtggaaaaatgcagtatatgctatcttctagaaaagttcagtatgtaccacatagaaaattcaatacatactatatgctgtcgtacaacaaagttcagtacaaagcctcccatagaaaaattcagtatatctgtgaaaaattcagtaaatacttgtgcgtatcaaagttcagtctatgaaccactatggaaagattcagtatacatgtggaaaatgcagtatatgctatcgtctaaaaaagttcagtatataccccatagaaaaattcagtacatactatcattcaacagaattcagaaagaacccctccataaaaaaaagagtatatactatcgtctaacaaagttcagtacaaagctccccatataaaaattcagtatatactatcgtctaccagagagttcaggaagaaccctgccatagaaaaattcagtacataataccgtctaacagagttcagtaagtatccctccaaagaaaaaaaatgagtacatactgtggaaaatttagtacgtactaccatctacattttttttgggagggggggtgggggctaaaacagcatttactttatccacccaaaaaaccatcatatgcactaaaaggggaaaaaatagcatctgaaactgagagcgtacatgaaccgaactacacataattgtcacgccctgaagtttccccccttttgcttgctttaaaaattggctaaataaatcgtccgaagaaattatcttaattaacctagagctaattccctaattaataaatgcaaataataatcggaatcggcatgtggaatttttcttggattctacatgtcacaatatattaacaggatttttagtggaattttcagagccttggaaataattttaaccaattaaaaatcaccaaagtgcaatttttaaatcccaggaaaatcctttcttttctttttctttttcctgtttcctcctttttcctcttcttgggccgtcggcccagtccacccgtcgcccgcgctcggcctccccttgtgggccggcccgttcccctttcccctccccgaagtcctccctccctccctctctccttcgggcgccgacaggtggggcccacctgtcggtcgtcttcctcctctagccggttggagccgagccccaaccgccggcgccccacctccccacgccgcccgccttctccgtccctctccgcgcccgcacctcgcgcccacgtcgccgcctcttcccccgcatctcccggaccgcgcgcgcgctcgagagggcgggattcgatttcgaatccacctctctcactctccctccactccccacgtcgccggccaaatcggccacctccccggccacgtccgccccctcccgcacctataaatcgctccccgcgtcttcctctctcgtttttcgcactcgccgcgctctcccgtgcctcctatcgcgctcgcgccgcttgttgctagtgccgccgcttgccgccgccttcggccgcgagccgccgccgctagagtcgccgccgcgccaaaccgccgccgccgttagcttcgccgccgcaagagctttcccggccgccgcctcgcgtcgccggaatcccaccggagcacctctcccctcgcgagccggtgagtttttccctcccctccatctccggccgacaattcaagccgccgtggtcgtcgtctcctctcctaacgcctctccatcttctcctagggtgtcgccggcgcccgtccgtgcctccgcgtcgccggtcatcgccgctcgtctcttcccacgccg

SEQ ID NO: 28342 - DNA, 1465 bp, Oryza sativa
ccctcccctcgctgacgtcagccttgggctttattgcgcaataaattgattaaggacttttctttattagtaaaaacacagtttatcttctaaaattcataagtaattcatccgagctccgtttaagtccattcaagtctcagtaaatcaagaaaaatgcaaagaatccattaaaaatggttttgttccctgtttcagtagtcttatagcctgttttgcttgtgtgctttgtttgtcgcgtaggtttcggccgttttgtcgatccacggtttctcgaagacgttgctgaggtctcgtcagtgcgagagcaaggcaagtcatgaaatacgtttgatcatattgtacccaatttacaaatatcccgcatttctattaaatgttgcattcttttacaatgtaatgtgggatgggtcctaatcctcagccacatattgtttaccatatgccgttgataacttgggtatcaaaatgactagatgttggtttaggaaatgcttagccatgcttagttcaactagcacacaaatggggatcaccttattacatagactttgtctattggcatagctttagattggtgccaccgcaatggtgttagttaattaaaatacactgaatggtgggctgtgggtgcatggttttgctggtcgcacccatggcagttaaggaccggttcacgggaaaccctgggagacttaccgtgctttccacaagcgggagtgggtaactgcttgatctgaagtatagctcgaccctttcctaggcaccggtggcgagggtgggcgtgatggagttgggtcggccggggtgtccggttgtccagctgccggattcaccgcggcgcaagaggggaccgcccactgccttttgaggggtgggggtgaaaccttagcgtggtgtggatgattaggggagggttatgtggagggtcttgtcacgatttccccctttgcagtatcatggtgatacttcggggcatggcgacatgtgtggaatcgtgtcttgtgggtacagttgtacacctctggccagagtaaaactattcgaatagccgtgcccgcggttatgggcgatcaaccagattcaccgtgattagtctcattcctagtttagcttaatgaactggtgtagttcaggtggttggttgggcctgttgcaacgtggggtagcgttggacagtgtttggttaatattgattaattactacaactgttttactgccttcaactactgtttttaaatgctagctttatgcaaaagaacctctagcctcctttggttatatcctgcatcatacctcctcttccggtatgacttgctgagtacagtgggtagtactcagtcttgctctcttttcccccacaccagagctgaagatcttcctagttggagctgttttgtcaaagttggtttagtcgctgccgtcaaggattgcctgtggagtggagtcgcccgctgctgaagt

SEQ ID NO: 28343 - DNA, 624 bp, Oryza sativa
gtgaattgaatttaggtgacactatagaagagctatgacgtcgcatgcacgcgtacgtaagcttggatcctctagagcggccgcctactactactatacggctgcgagaagacgacagaagggctaaatccatgaagtttgtggatggcctgatgatccacagcggagaccctgttaactactacgttgacactgctgtgcgccacgtgttgctcagacagggtgtgctgggcatcaaggtgaagatcatgctgccctgggacccaactggtaagattggccctaagaagcccctgcctgaccacgtgagcattgtggaacccaaagatgagatactgcccaccacccccatctcagaacagaagggtgggaagccagagccgcctgccatgccccagccagtccccacagcataacagggtctccttggcagctgtattctggagtctggatgttgctctctaaagacctttaataaaattttgtacaaagacgaaaaaaaaaaaaaaaaaaaaaaaaaaaaaagtcgtatcgatgtcgagcgatcatgatgatgatgtcgacccgggaattccggaccggtacctgcaggcgtaccagctttccctatagtgagtcgtatta

SEQ ID NO: 28344 - DNA, 16513 bp, Oryza sativa
gtggtgggaatagcgagggtgttgagagaattgtgaactccctgcacacacagtcgttaacaagtaaagtgaagaggaaggggagattcttttggataggttttcagggtagcaatgctgaatctttttggagaattatagagcctcatgttttgaacaattttgcgagtttagtaacacaggaaggtagcagcataggctctgatggtacccaagataccgacactgattctgacgatgatatgcaaatgtccgatacagaaagagacgagtgaatacaatgttcaggcagtagttattaaaacctgaaggtatatctaaaggggcacaagtctacacatcttatcagagattcagaattttgtaatgcatatttcttgctttgataggcaattacttagtaacatgtagccctggttgatctacctatcttgcaatgccacgatagattagtgcactagacagtcctaggtaagaaagatgggaaagtcatttttgttatccttgctttgtacatgtaaaatgatgtattatacatttgatcagctagctattttcattttcctttgtttttctctgttaaatttaaccttcatgaaattttgcccataccagtatagtccttgaactgtactacttattccatcgtcagcagtattttcagttcattcatttatccgttccatggtttctagcgggtaaaagaatatttagcagaaagaattcaacagggaacaacataagattcacatacacaaatctagaaaaaaagaattcccatctagctatgatcctaagacatggtaaattctctgtttgagttagacatctcacatcatccctacaaatcatcatcctgcaagagcctgttcagcaaggtggtcaggagctcgtccctccgctcagcccttgcctcttccctgaccctcctctgctcctctcgctccatccacgcctgctcgagcatcagcctctcccgctccagcgcctgcatcgactgtctccattgctgctcgatggccgcccgctcctgcgcgtgcctctccagcgcctcctgccgtcgcacgtccagccggtgctgctgctccaggaagtcctgcagtaggccacggatgttgctcgacctcgacgtgccgctgccgccgctcgtcggcttccccgcagccctcatctttcagctccttgccggcagatgcagtaggccgcggtgaacggacgactcggccggccacttgagcttgtgtgcagcagcaggcgtagcagctcgtcccggttcacggccggggagctgtcgctcgatggcgcggtattccctctcgcgtgtggcgcgagggcggtaataaagggggcgcgtcgtacgtgcttacgtgttggcgagtgtggaaggggagaccggcaagggtccgcgtccgtgcaacgcgcacgggacaggagtcagcggccagcaaggcggaacggctacatgcagcagccattggctggattttcatgcgttttccatcgctttctgacgcaatctcaaaactccccgtccagtccgtcgatccgcggccgcggactccgctatcccttcattcacacaccgtcgttacggctggccggtctgaatggcgctggagctcggtcatgtccacacatcggctggcggcgccacgtcatcaatcgaatgggattcctgcgctggacccatccccacattgtcgactcgacgagatctgagaaactctcgacgtatcgaaatctcctggtccttcggctgcacgcgatccgcgacactgaccgctgctcctcggtccgcgtcacgccagcatgaggcgaattgatcacgttcgcgcgcgcgtgcgtgcacgcgaggacgcttgacgtttcacgacgtacatacctccgtgaaaaaacatcgggtgtccggttctcctcgcttgttagaatttgttttggtttagccggcgcgccgtggtgcagctgccggtcagggatggcgaagctcaggggctcagggcctcgggttgcatttgattcgagctgtacttcccctgcacccgcgtcttcccgtggtgacgcgtgctacgggccttgctgtgtgctagtctttgtgtgctaatctccgagttgaacctgtgcaccgcccttgcgtgcagcggtagtcgtcctcggcgtacagatttcagtttctttcgggaaggctggaatgcgtgccgtgcatgcctcccgatctcccgtggtggttgataagcaacattcgtgcagatctcggttttcttttgggaaggctgggatgcgtaccgtgggtgcgtcccatggtggttgatacgcatcattcgtctgccagtctgttcttcatccgatcaacaaaaataccagaaccagtataggcctatatgctagtctcgtcgagtattccacgatttgggagaacagtgggagcacggagaaagccgttcgctcagactcgatggatctcgggattgtgtgtcctaggttgaatctcgatatctaactttctcttggagctagatatttactccatccgttctaacatataagagattttaaacggataggatattttctaatactacgaatctagatatgcttcatgtttagactcatagtattagaaagtgtctcaatcgtccgaaattcattatatttttggatggaggagtatatccctagtcatctcatattccaagggaactcgtaaagctatttttgacattctcagtctaagtcttttagactcagacttagactcatagtattagaaagtgtctcaatcgtccgaaattcattatatttttggacggaggagtatatccctagtcatctcatattccaagggaactcgtaaagctatttttggcattctcagtctgagtctgattaaatctgagtaggtcttcttcaaccatgtcaaatccaatctttctttcctcgccgtgtaggctagggcatgacccctgttgtcgaaacgacaactgcatatgtcgaaagacgtggttactcaatagtggttgaaagtaaagtgtattgattagagaatttttcttggatccccctattacatggccctatgagactatttatagctccttttacaggttcttactactagggttttggttatacaggagaatttacatggttacccttatgaaagggacatttacatgggtacatagtgtaatagaggttcatggactcctaatgggccgttaggcaatcgtcggtccaatggcccctaggcttgttgggccggaaaaggcttcttcggccctcgcggggccaagcttgctttgcgcgcaagttgtcgaaggtctcctgtaggtcggacgtgtggtcgaaagccttgcggctttttacgacgatgtcgtcgacataagcttccacatttcgccccaattgcttgtaaaggaccttgtacatcagcctggcaaaggttgctccggcattcctcagaccgaaaggcatcctgaggtgacaaaaggtgccgaacggtgtgatgaaggctgtcttggggatgtcggccgggttcatgcgaatccgatgatagccggaatatgcatctaggaagctcatgagttcgcagccggctgtcgaatccacgagctggttaatccgtggcaaggggaaatcatccttcggacatgctttgtttaagtatgtgaaatcgacaaaaatgcgccatttgccatttgacttccgcaccagcactagattcgccagccattcaagatgatcgatctcttgaatgacccttgccttgagcaatttttggacttcggcttttgctgcctcctggcgatcaacggacatcttgcgtagcttctgtttccttggcttggcatccggcttgactgccaggtgatgcatgatgagatctgccgaaacacctcccacttcatcagggccccaggcgaagatatcaatgttctttttgagtacctctaggatgttcttagcttcttcttcgcccatgtcgccccccagtgatacgagctttgtggggtcggcatcatcaatctgcatcttgactatcttgtcgtgaggggcgggctttggcgcgtgcttcgcccggtcatgcggttcggcctctacattgtgcactgctctgttgattatggccaaatcaccttttgaagcagccgaaggctgaagccccttaaccacgatcactcctgccgggccgggcatcttgagcttgagataattgtgatgggaaatggctttgaatttgttcaaggttgcacggccgaagatggcgttgtagttgtatgggatgtcgacaacgtcaaacaatacttgctcttcgcgtctgttttcccccgtgccgaaggctactatcaactgtgcttggccaagaacatgaactgcttctccgccgaatcctcggagcgatgtcggtgctggggtaagggcttgggtagtcaaccccatcttggcatatgcttcggcaaagatgacatcagccgaacttcctccgtcgaccaggattcgccggacctcaaaaccagctatctcggctgagatcaccagaggttcttgatgcgggaacattactcctgcggcatcttctgggccaaaaaagatttgctggttcagatactgcggagccccttcgcctgccgaagtgatattgtggaccgttcgcagctgcatcttcttctatcgcttcgacagttggatcggcgggtcggcccttgtaatcacttggatcactctgtgttgcgcatattggcgctgttcggccgggggtgcttgttcttaagctacttcacgagttgcttcagctgctgctccctgctgcgtccttggatcttgcgcgttgccacgttgccgaatgtttcggcattgctctgtggtgtgcgaagagcgtccgtggaaggcgcagtagaggtcttttcggaccttcttgcggacaggctgctgatggttgcttgcttgctgatcgttgaactccttgcggagggcttgcacttcttcgacagccatcacagccttgcccgcacggtcggttctgaacttcctctaggtcatgggggcttgaccttgccttggcggttgtgcttggatctccggctggggctggcgaacaacgagaggagatggtttggcaacttgaacttgttgttgggcttgagcagtggcgacagaagccttatcgtactcagcttgtattgcttgccgtcgcttggaatcctcttcgccccttgcgaacccgtcaatgatgcgaagtaggtgttcaagcgtctgcggctccttgttggcgatttttcttgtgagttcgccctagagtaaaccggccgaagcagcgtttatgacttatgcctcagttatgtcttgaacttggcaccgggcttgcgagaagcgacgcatgtactcccttatcgactcccccggcctctggcgaatgtcgagttgatgctgctgcgtcttcggctcctcataggtgcctcgaaagttaaggacaaagacatcgcgcaattgctcccatgtgtaaatgctattggctggcaaattgaaataccaagagcgggcgatgccgtctagggcgagatgtattacctttgccttggtattttcgtcgccatgagccgcttcgatcgcggattcataaatggagaggaattcctttgggtcagtttcgcctaagtagcgtgggacgggtgggaacttgaactggggtgggattggacgggtcttgattcccccactcagcggtagccccttttcgccccctgcgctgttcacgacaccttgctgcgggtacggcgtggcgaagggcgaaatcacggcttgcgcgtgaggttgggccatggcattcggctgctcggccccgattggtgatgcttgctgagccgccatgaatgggtcgaaagttggctgtgaccatgtcatggtgacctggtttggtgcttggtttgctccgaagcctggcaacattgatagagtcgaactgcggtccttgactccacggcgaagcccctagacctggctgattcgaaggcaagcaactaggcgcaccttgacttgtattcccctccgggcgggccgaaggcgctgtacttgaaatgttgtggggttggctgagctgctgaaggaaagcttggagctgcgcctacagagccgaagccccttctgccattgtttgtggcacttggccaggctgttgaggatgtacttgggcagcgatcggttgagcttgcagttgcacgtgaggggccggatgcgctgctgcggtcgatggctgcccagcgaagtacattggcgcttgcgcgacttgtggcggaaggggctgggtcggcacttgtagatagacttggggtgggacatagcctgccgaatactggaggattggtgccgaagcgaccttggaccgccttgccgcctcgtacgcttgctgctattcttgcatttggcgaagcatgtcttggagtcgtgtcatgttctgtcgcacggcttccatgtcggcttcggtttgtgtctcggggtcagggtagacttgggcttgcacagcggcgagcgcagtttgggccgctgccggctgcgacggagcggcttggggcaccagcagttggcttgtcgaaaggatctccgccctggtctggagtgcccttgccgccgcagccgccttcgccatggcacataggtagcaggggccgaaggcggtagtgatggcgcaggtgcggaagcagatggcgctcccccatcttcggcgataagcgccgaaggctctgctccctcttcggcagccatatccaccccggcgtcgctttcctttcgccttgtaaccttctcctttacgacattcttcggtggcgtttgctctcagtggttttgctcggaggtccccacggtcgacgccaactgttgtcgaaacgacaactgcatacgtcgaaagatgtggttactcaacagtggttgaaagtaaagtgtattgattagagaatttttcttagatccccctattacatggccctatgagactatttatagcccctattacaggttcttactactagggttttggttatacaggggaatttacatggttacccttatgaaagggacatttacatagatacatagtgtaatagaggttcatggactcctgatgggccgttaggcgatcgtcggcccaatggcccctaggcttgatgggccggaaaaggcttcttcggccctcgcgggggcaagcttgctttggcgaagtcgtctcccttcggcatatactcttcgccctacatccttcccccaagaggcctccggcttggcagagtacccgcacgatccttcgcctctcgccgtccttgttccatagtcttcgccattggggggggcttcgccccgactaactttgacgtctcgggcttggatccccactcctcgcatagccttcggcaggttttggtcgaagggcctcatgccataccgccaacaacccctaatctaggtatgtctctagttgtattacccctagcgaaagagggcaatagggatagtggtggcgatgcctggtcagaggtggcggggttttttttcgtcgttgggcccaaggcagtggtcgctttgtttgcaacatccttctcatagagtcgcacatcatcgtgagcagaggccaatgaaagtttgacggcctatgctgaggacgagattaggggtagccagaattcacccaatgattgacctgtgaagccctaaaagtatgaacctccccctccccccccccaaaaaaaaaacttatcataattcacaaatcattagaaaaacatgtgtatgcatttaggcccaattcaacccccattctactcaccgtcggtatgaaacaaaatgcaaccataacctcatgtttccctaattgtcgctgatgggtaccctcaattctccgaccgcatcacacgcacaagacgacctcgtgcatccgcctcccgacacaacttcactatccgctcatgctcacttgcaactctagggcttttgctcccatgcggtggcctccacctccacctcccgagctcccgcaggccgcaacggtgcttcttccattgctacacgcctgctctcatgcatttactttatctttatctcaccatctctcacatggttgcctgtgctacatgtttaggatagaaaaatacgaatataatcctctatgtttagaaagaaaataagcgcgggcgtgccagtgtacctagatacacaatgtaaaataaacacaaaagagacacagaaacacgtgatctttattaattgaattaacaagatacagtttccatgtataatataaaatacgcgcgccattgcctgtcgttggacagatcttgacatcagcggtgtggtcttctggttcctggggtctcgaaagactcccatttaattacctccgcagatctacacctgtaggagaacctccgattaagttgcttgtggtcgtctcgtcgtcttcgcttcacgttctccatgcatgatgaatgttggtgaagatggtggatatatatatgtgggcgccggcaacgcatccacggcctcgtcggtccgtgcgccgatgttggtagcgtagccttccatcggcttcgcccaccctcgtcgctccgcctcatcagtcttgagcgacgtggtggtgtagataggttgatcttcaacatgcatgaaactcgcatagcttggacggtagagacgtcacagtagtagcgtcggaatgatgttaaagggaagaggaattggtgaagtcagttggtgtacacaacagccgaatatacggtggctaggcacctcctggctaggtgagatcaaagtgacgaagagttgacaaagacggttggtgtagacggtagctggattacacatggctgggcacctcttggttcgtcatgtcccttatacaacagggacttgcaatgaagatgttgatgaagaagtcaatgtagacaatagccggatgaacgtggctttagcaccttcggatgatggatctactattgatccagttgatatgatgacgagcccataaaaggggctatataagggcgccggtaacgacggcgaccttggaagaagtaaatgtctcttcggcggaacggccgaggacattgttggtgtagattcagcacgaacggttccctagcatcacagacggcaccattcttgctttatgttgatgaagatgagcaacactccaatacacggacgaacagcgacatcaatctccacgaagaaggagagaatcacgaacgaatgacatcgattcttgacaagagggggaaagcgccacggacggacgacacagatcttgacaaagaggggaaaagcaccatggacggacaacatctcatctcggcataatgaagagaacgcatcacgaacggacgtcacgatatcatgttggtgtggagaggagacgtcacgacgacgccggcttgacgaggtgaagacattgcggacgaacggcgcgatgactgcaaaccatgatgctccggcatgacgaagtgaagggatcatgggccggcggacttgacgacagcgtgcgggcacccagcagtggcactccggcattgcataggttgagtagatgttgatggtgtcgccattctcataggttgcgaccagcaaagtaaggacgctcgacgtcttggcgacgtcgtagcatcaggtagatgcgatcttcggcacgctccggctgggtggcgtcacaacggccttctccggcaggtggcagatgattgttagttgacggagatgagcgctgcttggcagcgcctcagcgactcggcgaagaatagtcatcgcggacggatggcatcacaagtccggcgcgatgaagcagaggtgtagtagccgaacggcacgacgacagtgtgcgggctccgggtagcggcgctccgacaggcgatctcctcgagcggctcaacgacgagtgtaaggaaaatggcaggaccgtcgaagatgattgagtagacatcaatggtgacctaagagaccgcggcgagcgtgaaggcgtcgccggccagtggagtctcggtgagatgtcctcacacagtagagatcacaacgccgacatcctgagagcctggcgtcggtgcgatggtgccggcacaacggcaaactttgacggggtggcactcggcggacagtgtcaccagcagcttgacggggacggcgagcgtctgggcgttgccgataaggtggacgagatgcctcccggttgacgatggggctgctccatcaggatggcgtgggtggctaccggtgtgatgaggatatgttgttcacggacgcgggcagctcagcggagtctgtgtcgttctcgacaagaacttctggatcaacatgacttggcggcgtccgcggctgctccgacgatctccggcgcgccccgacggagtggcgtcacgatggtcttctctggcggacgggtgttggtggtgtcacagcgttgggtacggtagtgacactaccagtggcttgaacgggtgacgtcaatctcgacggaggcttgcgggtgacgtgaatagatcggctggcccagtgaccccgggcgacggcaatacacccgacttctccctggccatgacaacagattggaacgacatcgcctcgctccttcctggcacatgtctcctccttggcgtgcgcgtcctcacgccggacgctggggtgtgctgcagccgtggtaacctggccaccgagcgcacacttcctgtcttagacgccgaggtgcagcagtgaggtcgccggctgccgaggtcaaacgccgttgcttgccgtcggaaggtcgcttcgtgggggccggtagatggatgctggccgtcggcgcgtgcgcgtacgacgtagatggctttctcctcctttggcctcggcctccctgccgggccgagcgccggtgaggctgtgcacgcccgcccgccgcgctggaggcttctctgctatttgatatatgctgtggatgagatgggatcggagtagatgaatatggatgccgatcgcctggcgccgtctcctgggtggctgcatgtaccctcgccgagcgtcagatgctgccggccggcagccaccggtggcgcacacgttggtgtggcgtcgtcggccagcgcgtcctccggccaccggccaactccacatcatggcttcttctcctttgtctgtgctccatgatcaatctgtaaaaagacaataacaaacaaaaggatggagctgtactcgccgacgaatggatgtgtattgatgccgatgttgacgagtagtctacaggctgccggagcaacgcgccgatggttttcccctccgtgatcaatctatggtagtagatcggactgacaccagctcgccggacgccgatgatgtgcgctgatgccgcctctcggcgatctgcccctcccgagggacaccggcgtacgtgatactgcttcgccgccggccggtgtgttgtcgatggatatgagttgaagatggctgggcagagacagatggatgccgatggatagaactgtgtgttgatagattgatctcgatgggagttgattgattgtccatggcctctggctggctggctctcggtggcttttataggcgctaggaaaacctaacggatgggcgcgtatactccagcgccgccggggccacacgcgttggttcgctccgaagcctccggcgacgttgctgcagatcactttcatccgaatcacctggataaggcggagtttgttgcttgggtttatccggcgccagccgcgcacatcagtagcttgcggttgagatatcccgcgtacgcgtgtattctgatatacaatcgcatatatacgatgagaacgaaatgtggccatgggctgccggcccacgggcagcttcacatttccaccgtacgtgtagctagctgttgcttcttaactcagaaatcacgcggtatttctatacgtatacatgcatgtacggtgaatacatatatagcgctcgtgtatgagctgctcacatgtcactcaagtctccttgtgcatgcatgcatacgtacagattagccaagcatgtatatatatggctgaacacacacatggatatagccatatatagatggacatatatatgtagtacgtgcatggctcatgcatcccatgcaattgagcaagctatatacagtctcacatattaacgaatgcgacgatcatagcagctcctttgtttgcttgtcttgataatacaaatactccttggatttataagatcacaaaataccgtcaaacactacaacttattggctcttgtgtaaggtcaaattaagcggtagagaacccgctgggaccaagagtgagggaggcttctctcccaaagaagctagtgctagagttaggggatgaaatcggggaacagatgcagattgccctacccatttcttattgcctaccttataaaggatcccaacatacaatgcggatgcttgagataggatctcgtctcctagcattccgaaacacgtggcgttaagttccaggccaaccaaaacaggccgcgagtggtcgaggtacctcttgagagcgttgtcgaggtgcctcccttccctcttcaaagggatcctctaggtgaaaatcttatccttttgggatgagcgatgacagcatttttaatgttgtgatcttattgaaggcgtcgttttagaggtggctgtgtattcctcagggtgtggtggtgtgtgggcacgtggcgtggtgtgttttctcttttatcgtgagtatagcctcctagtgctataatcttgtattaatttgcttctctcaaagtcttaatacaatgatgcacaactcttttgcgtattcttgggaaaaaaaaacagggcgcgagttgggacctatctcgtctagccagctactccctccgtcccataaaaaatgaatatatgaccagatatgaatattctagtacgatgaatctggaataatgtatgttcagattcgtagtattaggatgtatcacatccgatattaggttggttttttatgagacggaggaagtatacaatacaggacgcccttgcatcataatcctgttccggcctgcccaagtagaaagggcctcacgtagacggtaatcccgttccgtcccaagtatagcaggccgtacatgcgtggcaatcccgttccgttccggcccaacgagaaaatgtggacttaaaccgcagtgccgtaacccgttaaagacacagccagatctctagtcgacacacgccggccgacctccatctctgcagtgccaactgccatgagatgagagtagcaaccgtcttcaagctggacaacacacgaacactaggggggaaatggaaaatggaactcaccttttgaccgaagactagtagacagacatccttcggacattccatttgaaggcaaagacattcggcgagcgatgaattattttacctcgactcgaggtacatgctttcatcaacagttcaaaaagatactactctactccgtagcatcggtttccttctcgagaaacgactcgtcacatgctgacattgccattgggtaccgtggcttttgctggccgcacaacaatgatagttagtactctctccgtcctaaaataagtacagttttacgctatttatgtctaacatttaactatttgtcttatttgaaatttttttatgattactattttatatttttattgttattagataataaaacataaatagtactttatgtgtgactatttttttaaatttttttataaatttttcaaataagacggatggttaaacttttgaggtagtacatgctctcacacagatgcagctgtacctcaagagtcaaggagtcaagacaggattaccattctccatttttacattttcagaaagttacaccaaatgattcgttcgaaaaataaaaaagaaagttacaccaaatgatgaggatggcaatggtttggttcgactccacttgtccattaaactgatatataaatttactctaatgaaattttaggttcactctaaaatttatgtctaaaatgttcaatctaaaacagcttcacatgtataaatggtctaaatttgtgcaaatttgcttctctatataataaatcatttctataaaaatgaactgaatttaataggtttttatattatgaacactgatttaaaatttttggtccaagttttatgcacgtgtagtaaattttctctcggtctattactctgtataataatcatttctatgaaaattaactgaacttgaaaaatttttatagcctgaaaatgagtttaagaatttttgtcccagttttatattgaaaattacttgatctattagtaatatatagttgattcatttggatgtctatgataacctatcaatataatgcatgatctcgtggtggattgatcattatagatcatgaatctagaaaaaatagtttaggctcgatcctactcctccatcctataaaagacgaatctagagctggatataacacctaccctcgtctcaagaaaaaaagtccaattctagctacgaatctggacacatgcgtatccagatttgtagctagaatttatttttttaagatagagtagtatgttcaaatttattatattatgttgtgttacatctcatgttagattgggtttcatgggatgacggagtattaaccattccaatcctgacggaatgaactctgctccattatcctcgcagaaacctttcccgtatttgctctggaggctggacttccactttctgcagagtgcagatgtgcctaacactggcactgtattcaatccccgtgttcactgttcaattcaccaccactgcacgtcttaacgtgcggcatcaatggcaggcgttgcgttgatgacgagatcctggcgtacgcacgcactagatgatacccaaggggaaaaagagaggacacacgagctcacacaagagacgcggcccggcgtggaaaccgaacgggggccgcccactctgcgttttgcatcggcagaggcgcggtggagaaaaaaaaaggccgagcttggatggaaagctccaagcttttgcgctgttcgcttgcctgagccccccgtcccgtcccgtcccctcgcctcggcaagaacaaagagcatgcgagattagatcgagacggcgtatccggtaagcgctgttccatctccggcacaaaagggtgagttcttgggtggttggtttggttatgtgtgttcttctgcagctcgtgtggttttatctgtatctcgttttcgcgctctcgttaggatggcgaatgggggtgtctgcctctcgtgctctgcacttgtctgcgcgctggtgtttctcacggtggatggtgatttcgtggacattacttacgtagcgagcgctgtggccaaaggcgcaggtgtggatgcagctgcttctctgtcattacttgttcattcatactgtattagtatctctttttctctctctctctttcctgaattagtatctcgttgtgctaatgtgcattcgatggtgtgtggtgtgatgtgctagtctgtttggatgggagccccccggcctaccatctcgcccggggttttggctccggcgtgaatagttggctggttcatttcgaggttagttcttgtgaggatagcagtgcaattgtgctactggagcctagaactctactacaaatgtttgcccggctcaattttctgtgtctttcttgcaaatgttagggaggaggatggtgcagcaatgtgacgacctgcctgcaacgcaaacgcactcggttaggatcatcgaagcagatggcaaagcagattgccttctctggaatactgagcaacacccctgattacaacccgggtactgtatttcactagttgtttgaaggaaataatattttgtactatgttgtcctagttctctaccacctcaggaattggactgcctaggctccatgttactacttactttttttttaagataatgttactacttactacttcctccgtttcacaatgtaagactttctagaattgtccacattcatatagatgttaatgaatcacaatgtaagactttctagattcattaacatctatatatgaatgtggacaatgctagaaagtcttataatatgaaacggagggagtagtatagttcacatgcttgatcgattcctgtgcaatcatcaaaaccagatttctacaattggaacaaggtcaaggttcggtactgtgatgggtcatctttcaccggcgatgtggaaaaagtagatcctgtgagtccatagtccattctttcttgattttacagttacaaattgtatgaggattagtgctgctccagtgttaagtttctctttgattttgttccatatggataggcaacaaagcttcactacagaggtgctagggtgtggcaagcagttatggatgatctgcttgcgaaaggaatgaacagtgccaataatgtatgttattcttatgagcataattcttgacaacaagaaggttttcaagactaacgaatttatggcaggctct

SEQ ID NO: 28345 - DNA, 27825 bp, Oryza sativa
ccccccaaaaaaaaacttacctggtatgtaaattacaaattaggatcagaatttaacagagtgaaaagcaaaccatcattttccaaagttctatttcacatatatttgcattgttttctcctatacctaaatacattttgtacaaatgtgctagggatcagcgaagaatttaccttctgcttgcacctccagattgtccccaggcatggtaaggtgtaagcttcaggcagttttacaatacgaatttagacaacagattacacttgaatacttgttaaaaacatgttgctttgaatgcagtgcttttttcctcagaatgaggtgaaacagattcagacacctttgttcattctcaacgcagcgtatgattcctggcaggttatcatctgatccacgttctgcaatacttctatgattatgatccttttagtgttgcccttagataaatatgctttgtagtggcatatgttttggcattgtggctgtgtacatccgatttggatgtagaggccagactttaatccattttctaaaaatatgttttggcattaatttaggtctcgtgtgttacaggtaaggaacatcttggtgccaggatttgcagaccctcatggtaaatggcatagctgtaagcatgatatagatcaatgtcctgcatcgcaacttcaaatcttgcaaggtaggtactagatagtgtattggtatgtaatactgcattttctagttggccagctatcgacccagtttaaaaattgcatggattctaaatgccatcacaggattcagagacgattttctgaaagcactgaaggaacaagggactccctccaccagaggattgtttataaactcatgcttcgtgcattgccaatctgagacgcaggagacatggtttgcatctggttcccccatgcttgaaaccaaagtaatactacatccttcaacttcaacaccacttaactcaaaattaaaccaaagttactactagagccggctactgctagagccagctatctaatgatgatctgacaagagctcttcacacttgtgtagacaatagcggatgcagttggagattggttctacgaccgcaatccgtttcagaagattgattgcccttacccttgcgattcaacctgccacaaccgaatctacgacgacccctcagaagcatagcaattacagaaacctcacctcgtactaccattcatcacattgttatatttgatgcacccttattgctcgcaatagggcaatccgtgggcaaccattgattttcaggaataactgcagatgatggcttaaagctcatctgatgcctggaggctggatgcagcttccaacagtagttacaggtgtctccaacatttgattcgctttgtcggcaatattttgccatatcttcgataatcatcgacaaagtccacattaatgttactgaagtgacattggacgaacacgaaacacgaaaagtttatctggtgaggggatggataatgctattttctcgaaattagctcaaaattcaagtacgttcagtgagattttcgaaatcaaagtggagcctaaccaaactgcgctctgttaacctgtcaacggcgcctcgccgccgccgttgcgcgtccccgccggccatcgatgaagagctccggcgtgagatcccccgtatctccaccgcatatcaccacgtctgcacgtcaacgagtgccagatccatttctgccctcgtcggcgtgacgaacgacggcggacgtacgggcggcgctgatgagcagagcgagggatgcagcacgagctcgaggaggggatgatatttcgtcgattcatgcaccgatcggagtgtgtgaaggagcttcttctagttgatctcgatagactacgttcagattcttcgctctatctagggtgcaggcgtgcggcactgaaggagacaggaggtagaatactgaacacaaagatgtcgacttgcccgatgcctcctaacacagtgccacacttgcacaatcagaggaggggagatgcatgataaatggagcacacacatgtttttcctccgagggaaaatatcactcgctctctcgctttgcaaggctgccagtttatatatctagcggtgtacctactgggagtaaataggtgtcagcgaagcatcttgtctttaatttggatcaatcacacagtagtggtctgatctgatccttttaatgacacggtattattactgggcggattgtagcgtttgtttttttcccctagcgacaagggcttttaacaaatcttcaacgttttgaagcatttgtactggtctggtttgatttgatctgtctaaatcgtcagaagtcacatgaaaagcatggcattctgaaagtaggggctgctcaacttctttttcccgctgggtttttgcagcaggcagaagcctccgctcgatgtataacaaataaaccaaaaacgaaaagaagaaaccaacagagaatgctacaattacagacccataccatacagttctatgagccggagcattgcgaagggatcaattagaggaatgcaacaaactgcaaaatcaacagcccgtaagcaatgcaaccaagagttgcaaatacaaactactaatgcaaccaattgaatggcattcctccagatccatactagaaaatccttccaaaatcctttcctgcaaaggaagacggcagtccgcctgctgtaaaagagtgaccaggccttcctcctgcacaacattcagaattatgtttcagacataaatatgcataccttctatggtttccaaatgcatgcaccgattgaaatgacttttaagctataataggttaataaagataaggcactcgtgaaaaaaaaatggaagatccaattggaaagcaaactatatcaacaggacatacatatctcatgcatgaaggttacaccttttcttttggccattgcagtcccatgtgcaattacaagcctagaccaaacatgtttcaatatactattaaacaaaatttgccaataaactatgtgtactgcaaggccattgttctgaaaattaataccaagattgcaagttttcagtagcacatttagttaagttggatacctcaaaaaaaaattagttaagttggactagaaggccatgccacataaaaaaagaggaccacagatggtagtaaatctagtgctacgatagcttttgcagagtcaatggctataccaacaacacccaattaaataaaacatacaaatgacaacatggaaatattaccccaaggcattccgtcagccatagtagcaggtggaggttctgccatgccataattaggccatacaggctgaccattgtgatgattccccattggacgtaggtagctcgcagtcatatggttataccgctgaaatggttgtccatggcgactttgaaaattcagctgagaatagtttgcattatggtaaccatcataggtcacatggcctgtagaggcactactctctgtaagagttgatgcatggaacaggcggtcacctctataggaaaagcatgaacaatgatcagttaataatactaaatataacaatatggaacccctgacaatatagcaccacccaagaaaattcaaaatattttcagtggtattactctcaataaagcaacacatagaaaacaagattcgtgtaaaagaagcacctcccttatccagttatcccttaagatgtttattgtcatgaaacaaactgttgcactgagaggcattacattttacaccccacagcgtctaataaacgtgtatgaaagctctttcgattctttgtacacatgccatccaaaatgacaatcatacccttacatatgtatataatcaaatccatttgttagcacattacaattttagcatttgtaaaaatggtgaataattaagcagaaaccagcagcacagcacaaggtgggaaaagtgaagtatgctttttttttcctaaagatatgagcgaactatacagagagcaaatcattgtagttggattgtaagcaatctatcagatgaggggtgcctctattatattagctttttatgcgtcggccaaatgtcattacatgaacaaattagaaaacacttaagtacctttgattcatggataaagagtttgagtttgcaatagcatggctttggatatgggccaatctgctggattggtttgtttgaccacttgcatccttcaggtggagatcgctcaacgcatctgatagtgaagtgtcctcttgcagaagtgactcttcgctgcacatcaaaacaaagtgaaaaagatcaacacatgttacattacaaagacaaaactgtatgatgcactgttacctatagtttggatcccaatcagctggatccggtattgatgaggtggaagccagtgtatctgctgacacattggatgagtgcgtaggaggaaaaccaccgtatcgagatggtggaaaggacccatggttcgaagtgtctgttgataaaccactgccagcgcatgtatgtggtctccaactgaaatgaccaggattagggagtgcactttgtgggtaaccagaatgtccacgagcatagccatcaaagtgattactaatggtgccatccccatggtgtccctgagtcagctgagatgtgtattcatgaggcggcattgatataggtgggtgaccaagatttcttcttctattgtattggcctacagcagcagcttttcccaatgagccatgactgctccttgcaggagaagtggaaccatactttcctgtagcagtacttgggatttgcatctgagaatttggtggagtaaattgtgatggacttgccccaagagacataggccctggacacccagggcttaatcgaatgccaccaccatgatagagataagatcgtcgtctaatatctggactagatcccaaaaatgttcctccggcttgtgaatgtaaattgaatccagaagggcctagtggtgaatgatacatgttcacactgttgacatcatagcttccatagctgcttgcaagacctacattgtcattaaagctaccatggctaccgaagctgccacagctgcttccatatgaaaagggaatctttggtgcaaaagcgttattaaatggtaggcctctgttaatgcttccaacctacaaacataatcaacaatatattatgataataattatcttacaactcaccaacttaacaaaagcataagagaacatacttacaacctgaggggaaagaccagcagctaaccagtgacctcctccaggattatgatcaactgctgcaacacgaccaacaggctacaatggcacaacacaacaagacataagtatatgacttacggactacttgtatgaaaaaaagggagcgcttaaggtacaagtattttaaggtttctccacattgtctactccctctgatttcagatatgtcaccattgactagtgcaattataattttgaccacaacaaattttgaatggtggagcatgacgcacaaaagttttgtgatatttagggtgcaacacacttcgttaatatgacatacttttaagtatttgtttttttcaaaaaagacgagctgtcaaagtttgaagatgaatagtacctagtgacaagtatttgaagacagagggagtagtatatagcaatatatagtctgttggtgggaagaaacactgtttcatgtatccatgtttgttataatgtgaaaggaagatatctaaatacctcgttcaattaaatgcagagcaaaaccaaagtcaattgttacaaatgatggtcgttccgtatcaacagtctctaaggagagaaaaattatacagcaggttgtctggaaacaagatcatacttacaattcttggagtctcctggataggctcatatggaccagtaaacgcttcaccagttatgaagggatgatatgaagcctgaaataggttcataattgtgaagtacttccattgattattcaagaagaaaaaaaaatagcgcaataggaaatcaagttaataatttcctaagtaccaaactgacctgcctaaagctcatttatttaacggctacgaaacaaggattccccagcatattcagatattgggattaataagacttcccattcacaatcaaagagtacaaccaaataggaatcaaatgttatcatcagtgaatacctgcaatggtgaccaccgcttattaggatcaaactcaacaagccctctcaagaaatcaaccagtgctaagcgatctgtcttttctgtctctgaatcaaaattgaaataggtgagaagataatgtcaaacctgcaacttcatcataaggactaggatattatcattcaagagactaatactaagaaataattctaagttcaccagtattattagtatcttgcatgattctggtatgtgccagcattgctaacctattgttcatacacctgtttaataaagaactgcaaccggaaataaggtatagttaactaggttgatcatttcccaaaaggtaccgctatagtatgcaacactatcagttctataacaactactgcaacttcctgggcacccattataatttatgccacagtatagtcgtacaccaaaggcaataaaccttaaggcaatgcacaccaaatgaaccacgtattccgcaagaaacgctaattactgggtctgccatattgatcactgctagctgagattgttctagaataaacacagtttcaaaatcagctgtaaacctacttagctccatccttaaaaataagtatcacaaaacatacctggcaagttttccccattcaaattcttccaagggtatgtatatatgagtttgtcaagccttccacgagggaaataccatcttcctacttttggttttttggactccctctgtgttgcaggatgtaaacagggtatagataagtaataatgaagtaaatgtataggacaggacaaatatgtaaccttaaaaaaaataaaaatattacagtttcaatctcctcttcagttaatattctgtacgcactgatagggccattctgcatttcaataccaggataaatacttccaacttgcttaaaaaatctcccagtatttttagcctcccgtagcagatcatctggtggttgtccactgtataagaaaaaggcaaacatgtttaaaaacacttttgaatttccataaaagcaatgttgtaacatttctgaaaagttaagaacagaagtgaaagaactcagacagttacaaagtaattgaatataagttattttcactgtaaattgttggttgtaatgaagaaaagggagggaaaagttcaatcagatgtactaacccgagaatctcaatcatacggcataggacatcgtattctgacgctccaggaaataaaggcaatcctatatatagttcagcgactatacagccaaatgaccacatatcaatggccgtggtatatctagtacttgttaagtttacaaatccagatgttagaattcacaaaagctgcaccacataatgacaaatttaaaatggacataacagagaaaaacaaattaaaagcataagacatttgtgcagctttaaggtatttcctagtgaaaaatagatgtcacacaggatacgggtaaccaagaagtacttccggagatctgtaataccgactctggaaaagaaaaaaaaaaggagaagcttctttaaatcaacaattttactataacatgaattcagagttcacactgatgggtgagtttgaatgaaacctgaatatacgagtaaatggttttaccctccaagcatgctgatccaaaatcaattactttaaccccagctgctgtttttacactgcaaagatatagcgtggatggattaatagcatgcaaacagtgaacaaatcaagtgctgatttgagatgagacaactaactttggagttatgagaatattttccggttttagatcacaatgaataatgccagcgtccttcatgacaaccaatgcatccaatatctgaccaataaagaattagacatagataatatggtaatcaatgcatttaaaattcaaaaattcaagcaccatatgaaaataaaaccttacctgtctagagaaagttcggacatatttcagttgcaaacctcttagactattcctttttagcagctcataactagatgtgggagtttaagtgatacatgaattagttacatggtatataatagattagcgaagagaagtacgacaatcttacaggttatggccaagcatttcaaatgctatacacaaatgattttggtagagaaaaaaatccagcatccggacaatgtggtgttgatcatcaggatcatatttctcattcagctgcaagattgagcatacacagttgtgatgccagtcgttacatacatcaatcacaagtgagtaaatgctaggtaaactactgtaccatgctcaacagtgagacctccatgatagcttgctgataaaaggcaggctgattttttataacctttactgcaacatagctgttagtttctccatcccagcatttagcaacctgtccaaacgtaccttggccaagcatttctttaataacgtacctacttagaacaataaaaagatgagtgcagtccaatctgatgctgttcatagtttaactttagaggtgttttacaatgctctctactggtagtagaaccaatctagatcattttttttctccaatagatcatatctatttatactaccacatcaactactggtagtataataatattttctactggtagtagaactcataaattaatagttgagatcacttctattggcaataatacttgtagtagaatactagagagcaccgtaaaggtactcttaactttaaccatcaggaactctgataaaaaaaatatgaacacaaagttgaattgatcaattggatagctttatcgcctaagttcaataagttgaaaatttgaaagaaactacaatgtgtggcaatatggcagtcctttggacatatttcatcttcccatatttccacatctgagttcttagtataatggagagtcagaatgtgcatacatatttctaacttataacataaaaaacaaaatagtgaaaagagatatatctggtaaaaatgttttgagtgctctaactcactaagaaatggacaacagacacaaatattgaatcacataaaagggttaacaagtcaagaagaaaactaacctccggtccgactttttattaaccaattccaagttgacatacaagatgaggtcagaatttgcattatcaaggccatcattgtgagctggaactgaagggttggtgagaaagcgcttggggttcagtgaatctgagtacttaaactcaggattgcattttccgaaagtttggacaatgtctgtggttaatcttgcaacaaactgcaggaataagaaaatataatttagagtgaagcatcacaagtatatgaagaaggtgtcatacacagttgaacaattgtaacaaaaaaaatgtcacatagactgttccctcatcattttacaatataatacattcagaatatcaacaaagttgaaaattgtccctaaagtattgtgcttacccctggatgagatagcaaagttatgctgccaaaaaataaataccaatttaaaggaacatcttaacttagcaaaaagctaggatcctcaagtcaatttgagttgtgcaatgcctcccattcgctcatgaattatgatcaaagtaattaggaccgcctgtagcagtaaagtacctgttctagtgactatacgattagaagaacaagctaagcaaacaaatctagtgtacattaaacttaacagtgcattcgaatttagcagaaaacaggggtcggatttctggttagcaatgctgagagctttcagaaatgaagtttgtagctgaagaatcaatagaaaatctgagcaatcgaataatctagaccatgcgtgcaagcaataagaaaaaatggcagcaacaatgggtgatcatatgatacagctagttcaagcgaccagagtttaagctattggttccttgcaagcacctgatgctaatcgcattccagctaagtaaccatgtgcgaatagctcaatgcaattgacaattcagcaaagcgaggcctgaccgcagccgcatcaagcaagcatcttaggtagccctgtgagaaggggaaggtgcaggaaacgtacaggcctcttcctgacggagctgaggttgcttgagcgggcggcaagcccattgcgtcgaccggacaacgacgcccccgcccggtccccggccgccgcagcagcagcgaacggaaggaacgccgtggactcactcggcctccacggcggccccgccgcgtccacctcccaggaaacctccatacaccacacgcgcaaccgcctcccagcacccaatcgccgccgcccccgcggagatcaaatgcccaccaccaccacctcagcccaatccacctggctcccggctcccggctcccactaggatcacaccaacacgctcctccaaataagcggcaccagcagcagcagctaagcggccgccggcggagtccagctgcatcctaggcggcggtcatcgcccaatgctcccccctcccccgatccgatctcctccgcccctgcccgctcccgctcccgagcctccgccgggagctcgggaccccggtgaattgggcgcgcggggttttggggagagcacgagaagagacccactcctctacctcgccggattggcgaggggataggctgcggcggcggcggaggcggaggcggaggcggaggaggaggaggaggagtggggaatttggagaggggggcggcgagtcccaatcccctcctccctgtttcgtctcttctctcttccctttccttgctcgtctccgtcacacctccctctcgcctatttttcgctcccttttccgtccagcgattagcttagtacttctatatatttttacgcgtcgagttttttttaattaatcaaagggggtgaaatgacaatgtgcacacagtggtaagcacagcagcaacggcctctaattatcgacgacgccgtcacgtgctccggcccacgctgctttgtcgtccagatggcacggtgaccgtctgatacgttctgatcttcgcgtcatgcggttgtacgtggaaaatgatgaaagaccaactcgtgtttcgttgtgtttttctttttgttaggaggttacacggtaatttcaaatttgttgaccacgttctgaaagtagtacatatttcgccctccggttgtatatggttcgttgctattttgaatggcatgtgaataccattagtgggaaaatatgtgaaatgcattattggtaaaaaaaaatggaaacaacgaaatagtataattgatgtgtgatttattgctattttacaaataaatgtgaacaattgacccaaaagatagaaacgtaggactttttgttgagatagatgtgttacaagacataaagtggttgagtgttcataggtagtcgctagagtacatcaaccctaaagtataaaaaaaccaacaaaaagtggacgcaagtgctagaaaatttgacgtgttaggctgtgttacatatccgacgtaatttcactctatagactagatagatagatacaatcttgtcagtgatattaatacgaaaacaacttaagtagaaatcaatatatttattttcttacaatagatgtgttatgaaacataaagtggattgagtgttcaagatagatagttgctaaaattcatcgacactatagctttaggatgtgtttatatcatcatatgatgctcaaattttaaattattcatgtcatctacaacatagagaaaccaacaagaagttaacgcaagtgctagaaaaattgatatattgggttgtgtgtgtatatattcgatgtgattgacccatcacatggaaagatagataaatgcaatttcgtcattggtaccaatatcaaaacaatgtaaaaatcagcacgttcaaggaacaaaagaaaaaaagagatatgtgttaggtcagcctttgtcagaattggttcgatattcagagttggtagatgtgaaaaggttgttggctttcaattttattccatactttgtatgaataaatcccaagaattgttgaaattaatgcatgacacaggatttgaatatataaccgcagaacatatactatggaaacttgaaaacatttttgttagaagtaaaaaaaatacacatctactcctttcgtttcatattgcaagttgtttgacttttttttctagtgaaactttcttaaatttgatcaagtttacagaaaaaattagcaatatctaaaatatcaaattagtttcattaaatctaatattgaatatattttgataatatgcttgttttgtgttgaaaatactattatatatttttctacaaacttgatcaaacttaaaaatgtttgactaggaaaagatcaaacgacttataatgtaaaatggagggagtagtttagatttaaataaacaatcatccaataagaagtttagatttaaataaacagccatccaataagaacaaactcaactttgattataggatgcaaaaactaaccaaatcgcaaagaaaaacactattctttttttccttatccactattcctcatttgggagcatcaggaaattcaaatttaaagaaaaaaaatcaatcacttttctcatttttttcttttagcgatcagcacaacacgggcgtgatgatccattgaatagagtaggaaaaaaattacaagtaccctataaggcagtagttaggaaagaaataaaaaaaacaccaccacacgcaccgacaacacatatacatactcaagtagaaggctagcattggatcggccaccgctaggctaacaaggaagctacagtcgggaccacccaaaaccaatcccaaacaaccaagcacctaactcaactctgatcacgcctttgggattgaggggggagggtgagaaagaataatggatccgctctccccctacagcccgcctactcatataaactagagcaccgccgcaagaaaacaacgcatatagaggaagcttgcactaactaccagaaggaagttttggcaagggacctccaaaatgacatctccaggaaaatgaacgacgatgagcaccaccgccgctgtccatccagatctcagggaaaccaagacagggttttcccccgacagcctgaccagaggtaaggggattgctcgacaaaaggtcaagcaataaactattcctatatgaaaagaatcaccgagctacataaaaaagaaacatacaatacataaaggtttacaaaaatacatacaaaaagttttcaaactcaaataaaaataaagtaaacccatatatatcaataaaactgcataaaaaagtaaatggcgtattgcacatcgcaacaatttagtgtacaatttttatgtgactggaatttcacaaaaaatcacacaattaaaatatagcaatattcttctcaattttatacttcctttgttttttaacgatggttagtttgaaaatgaactaaccaatgacaagtatcttacaaacgaagatgagtttatttttacaactctggggctgtctaatatcatcttagctatatgtatgatatttttctaagaactgttataccgttgtttgcaggtaccacctagatatggttttcactatacatttatgtgaaactactagcgtagttcttttataaacagttcgtggaactacttccgtggaaaagaaaagaaaaagctcgtgaaactacatggaatttagatctttgataaagcaaggacgccagtggatttgtgggatcagtgtttctccgagcacgggtttctgggcttgtcgcgacgcgacagcagctgacacgttgttttgaccgtcgacgatctcgccgaggagtcgaggagaatgtcgagaccaaaccgagtcacgggcacacgggtgcagttgcaccgtaaaaagctcctgtggagtccacgccgcgaagtcgcagcgcgccacccttctctcccactcccaatctcccatctccaatgccacgccaaaacgccgaccaacgtacggcaagtcagccacacggcgcatgtcaaccctccaaccaaccgggactagcacgctgccagttgccgcgtccgccggccgcgccggcggtgcccgtggacgctcgaggacccgggcgaccgtggaagccgtgacccgtgaacgcctctgcgcttcccctttttttctcaaacgctgaagcattcggcgacggggtcgaccggacgaggtcatcagctcaccggtctctagcccccgtccaggacgccaaatattgacctgacagctgacagcgatacgtccgtgtcgcgttcctctcgccgtgtccctgcaggaaaccgaacgggtcttgctccggaacgagggaagcgagagtgaggtttataaaaccatgcgattatcgtggttatcatatatggtaacattttcaatttttgaaacaatgatatacttcatgataaccatatggttttcgcgataaccgtagtagccacctaaccgcgggactaccacgatagagtggtggcgggcgggacgcacgacgggcgagcgcggcagtggagcggcaacgggggatgagcgcggcggtggcggaccacatatccaagagcagcggggggaggggagaggccaccggctccgcgtggtgcacggcgaccccgaccgtaaccccgtccttgtcatgctcctccccttcgtcgacaagcctcccgaagtcgaggtccatctcggagagctcccctgtgctcgaccgccaccaccgccgtacccctccgggtggctgacgatgctaggagtggcaccaccggcaggagaaggggaagaggcaaaggaggagatggttccttggtcgccgtctgcctccctcgcgcgcaggacgggcgagctcggacgggttcaccggccgcctccccctccctcccaaaccacttcgcttgccacccgccgactactgccgcactcgcttgccgcccgcatccacgctcgcccatcgctgtgcccatcgtcgctccgccaccgcccacattcgcgctcgcccatcgtcgctccgcccgccgcccgcatgccgcctcgcccatcgtcgctccgcccgccgcccgtatccgcggtcgcccatcgtcgctccgcccgccgcccgtatccgcggtcgcccaagagaatgtacagctgacatgtgggctccacatacttttttaaattttttttattaactaggatgccacgtcagcgaaaccatccatatatattatcataggaccttaaatgaatggtttgtgtgagtttagagatacacatttctagtttgtggttaagggatctcaaaatctgttaagttaaggacctccggtgaacttattcccaaacagtttgataaaccctgctcgtcgcacacacacccaagccgtgccatccagcagtcaaccacaggctacggtccaatgcaccgcaacagcacgctttgatcgctgcaaacgttgatgtacgatgcggccaatgctagtagcttttaccatgcatacactatttagcccgttccatacaggacgtattagcaaggtgaacttaaccaactttatgtagccagccagcgcgcagcacagcatgcatcatcatcacaaaccctgtacaactgccaaaaagaaaaacttcacagcttcatgtcctttttcaccacctaagctgcttcacccccttcttcctgacgaccgcgtcgaggctgccgtcgaccaggctgatctggtccatcagcgaccgccggatgtggcccggcggcgtctcggtgatgccggcgaggtacacgtcggaggagaggtcgaacttgagtgtggccagaggggtgttgggcttcttgatcaggtcatcttccagcagaatctctgctaccctggacagtatgctgaatgccaccccaacaagaacccttgagtaggcctccacaatggcatgccccacgtcctgcgtagatatgtagtaagttcgttcaaaaggcaaaaaattcagcaagcagaaccaaaacatgttcagggatttcataaggtttcataatgcattttggacaaaggttacatgctctgcgcgagcacaaatggttgttatgtaatggcgaacttaccacattgtattggatctttacaacttctataaaagttggaggaaggctcgggaatctggatttcagaagctgcataagtgtttcaaccctttctatgcacatggacatcttatcgagttctgatgaactatccttcatgaaattccaggaatgccttcctggggatttcttgctcttttcctctgagatcctttgattccatgcaaaaactgcaccctccaaccggttcatagtctcgagcacggtatgctccgtttttaaactaagagagaggaaaatttcctctatgggaatgtactctgtggttatagcatggtacaagtcttcacccaagccagctctgccagactgcaaaagaatttaagaccatatattcagtacaatcatcaattaaagggagaaaagaagcatgaaattcacagagattgtcatgaagcacaaacaagttaacttgaaatggtacttgccttaggaagagcatccgtgacagctggaggaataggtatctgaagcaggacttcttcattgattgacatcgcagctttgaggatttgatgaaccagcttagcctgaaaaacaagcctatttctctgaaattgagacaaccctatatctggcacacgaggtgatgggagccaccacttcttcgtctgcctcagaccattctttttgccccggccattagctcggctaccactctccacataccaatactctgtgtctaccatcgagtccagcacttcctgcacatttgtggcatgcaggattaggagatacaaactatgacattgcataattaagtgaacgatggtttatgaacattttttgatttgtaaaataaaatgaaaagagatggcaactttgtcagatatgcatgttcatttactagagtgtaacataataataacaaaaacatacaattagcatggaatcaagcttctgaagggcaggaaggttcacattaacatctgaacgtgctttcggggtcataatctgcagtaaaagaaacattagacacagcacttagtgaaattacaggctttattcaatggatctttacctcaaacgtgcacccgtctgctccattttgttttgtaggaaccagctcaaccatgtaggttgtaggagaaagcaaccagtccatttccttccgccacctgacttttttctcttcacagagtggttccagcttccagagttctccaaatatagtggctggcataagaaatgatcattttggtcatgatgataggagtatggaacaaatacttcaaaaaaagaaaggaaagaaagatgatagttcacccaaaaaaattctacaatggacaatatcatagtttccaaacaaatggttaagcatacctgagagattaataatggcattggacaaagccagagcagcacaaacacctctagctcctcctgaagcatcatcaccaagcagtagcttcccaaacttctccttcatggtttcaatgtctgaagcactcaaggtatacgtgattggcttcttccctttgagaggaagtagatggacagcactgagtgtatccaactcgtaaagtgaatgctcctcttgctttctcagtggatggcattgtgaagagaacgaagagctagaaacatctttacttgaggagcaacttgagacttcatcatcaacggaatcagtggttacacacccatctgctcccgttgttgcactaaggccactatcatcgtcataagaggaactgttgataatacagctctcaaggccattgtacgtcatcacccctacatcatttggtattttcaacttattttggcaagattttaaatcattcagatgaccatgcgacataaatttaagaatttccagggagcctgatcttgcgataatgaaaacggtgaataaaattagttataccgccatattacatttaaaatgcacagacatggagatcagggtttggttcagtatactctaatgtgctgattcagaaatacattttaacacaaatatttcccaacgacccaatgattcttttgaagagcacttcacaaataactcaagaaaagtctagcaattatgcactgtacaccgtaatacactcaagatattgagaaaaaaaatgcctttagcatgacagtacgagtatgccattgcaaatgttctgatgttttgccaactccatgtgcttctgtctacagatagtacagtgtgccatctgtaacgcttaatgcctcactccaccgcaatgtacaagctgataattcattccgcttccatacaaactacgctagttcaagcttgctaccactaaaaacctagctcggataagcacaggtaggcacacattaaaccaggctaggttcttgtgacaccacagaacccacaaacagacactcccattgaaagccgatagcttcaaaacattctaagtggtcccttttactgctaaccaccactgagattcccagattcccctgtaagacaaagaaaaaaggttctttatctaccctacagaaaaaaactatgttacactttcacgagatgctcacatggcgcacacgatttatagttctaaattgtagttagtcgttaagtcatactccctactcctccccaacttcctgcctgctcacattgctcagtgctcaccgtctaaaaagcagggtaccactacgttacttctttatcctccaaagtcaatgaagccgcagatgtcgcacttgacccagctgaaagtagctagctggtccccgacacacgccgctccaaaaataaaaggtactagtactagtttctactgcttgtagtcttgtactcctgcactaccactccatgaacaaacacaccagaagctaacggatacaagagagagatcaaaaacgcaaacaaaagagtataaaaatatcactaggctggtaaaagtcaagactagtgtagaccggaagcagttggatagtggcgaggcgtgaatgcggccggcgccgcccggattcgcgtcagatcaagatagcagaggccatgactcgcttgctctctcttgtttgcttttttttactcgtagagtgccgcatctttcgtgactcccatttactcccacgttcctaacgtcagtggctgatggcactgtgctgcagcctccgtcggagaccaagcacatagcagggaggagaggagaggagaggagaggagaggagaggagggcccgtgaggcatgaacagtcgcgttggtcgtgactgctcagtgccaaatctactgctgctgacaccagcgctatcccacactccatgaccctatcacgttcacatctagtactagaagaaaatatatctctgaaaatttttgtttcatcacactactagtgctcctacttctttgctgtatggattttggttgtgcgggtaaaaaaattgtgaagaaaagttaggcagctccaaatcttggccagatttggagcagcaggttgcccggggcttgtagacatgctgcagctaccatcgatccaacaactaacaactactacagctagtagtacttacaaccaactcatgcacttgagaaatgaggaccgaaatgagcaaatacaccgtgaaatgagacaatgcggcagctgtacgcacatgaaccgggcaagaacaccacgaacagaaaaagaaatgtaaaaaaaaaatgaggcaggaaaacaaaaacgggggagattcgagatttcaggcttactgtcaggctcctggtccatgtcgatgctgaagtcctgcggccgccgccggcagcacgccagcgtcttcatcctcattcccctcctcggcagccggtaccggcagtagcagcagtaactgaaaaagagaaccccacagcgtcacgatctgaaacgagcaagttacgacgctggccaccgcatcccttgcaatgaatcccgtgcagccaaagctcaaggatagcgctcgtacaactacggcggcgactggacacgagcgcgcgcggcgagaagaaagatgagacgccgaaacggccaaaaaccccccaaatctttcttccccagttggtcccggtgaagaaaaaaaaagagaaaaggtgcgcgacacgaacgacgccaccagtccaccgctacacacggcaagcgagcaaaacgcaaagcacaaaacacgcgacttttcaggttccaccaccgctaataattagcccatcaaaaaccaaaccccaaacgtagcgagaggagaagctaataaaatccacgagcagatgcggggtaatgatgcgtaatccacggggacgggtttagattagatttgggtcggatcacgctaaccgctcccgtgttgtcctgacgggatttttatggtgcgggatgagcgtcccacctatacgggtttacggctgctgccactgcccactggcccggacgcccggtgacgctgaccggtcagggcagcgaggccgaggagggccgcgcggccgtgcagcgcagcgtccggagggaggatgaggtgtttgaactttgaattttgaactggacggcggtgtgggaggttgaggaaaggaacaggacggggacgtaggctttttgttggccgctttccccaaaggtactagctagctaggcaggcagctgaagtcatggtcatgaaacaaacggaaagccatgacctgatgaagggaaagattggcgtaataaagtgggcggagctgaaaagtttggggattgttcatgctatctttttttttctccctttcttttctttcccggcatcgctgatgcttcacctgcacctgcaccaccctcgcgaggacgccgtttaccagcctagcgacaaaactggcaacaaaactggcttctcgtctactagaccattcggtagctcgctcaccgacattgcaggaagaggaaaatcgcctggactgaacagtgactcgttgaggcagtagagccagaggaagatgagaagtgttgtaccttttgcgggcgtccaaagcgaagaaatcagcagccggagcttagtcctccgccatggatcttcggcgaaggtaagtgaggaggggctcgatcactgaggtagcaaaacgaggccaagagaaggcgaaggtaagtaaaacgagggatcgatcaacgaagtagcaaaacgaagccaagatagacggatgcatggatggagaaatggctgtgcttaccactgtactagtagtaggaggagcgtcggtgaccagaggacgtgtgtgtgtgtgagagagagagagagacctcagaggcactgcactgcactggaggtcgtatggagcaggtaagcgttggtgaaatgcaagggggcagaagaagggggagccggtggagtgtgtgtgaaatggaagctcgaactgtctgactctgtcgagtaataaatgcggcaccgaggaggaggagatgaagaacagaacgcaagcgaagtggcagaggacagtgaggaggaaagtcaggaaaagtagaggaagaggaggaatgcatgtggattcggataaaatattgggccgctgcagcaacggctcgtggtggtggcatcggtccgtaccccttacgtgcatcccgatcccattcctcgcgtttgactttggtgcgttcgtctctcgcggacgggcggccacacccacacccatcgcggttcgcttgcacctgcacgcacaggagcacacggcatccaaagctcctccgctgcaaccgcgcgcggtccgcgacgctggatcgatcggcaacaaccagcgtggggggcatatcgtcattatcccccgtcgcgactgcaacgtgacaacgtgtaaccggtgaaccgtgaaccacccggcttaattcttcgctcttttcacctggccgatcacttcacgacgcactttcgtggccttttcaggccagctttttgcgagggtcagaaatctcccaaatgcgacgtatacagatcgagatgagtatccgaggaaccaggggtgcataccgacgtgtacgcatgcatgtgacccgtgtccaggttttgctacggggcgagcacacggaggagtaatgctcacttttaggatcggaatcctgaatttctgcctggctggagattggagggatatagtcgtatacataaactaatgcatcgattaacaccgaggtattgcaaatagtactggaagtgaggctacagacaaacaatattgcaaatatcgctcgaacaagcaaacatgcacgcaaaactttgttccccctatcagagttttccattgtttaccaccaaactaccccaaatcccaccattcccggatcagctgaaagtactaataatgatctactaccactgatcggttaattgtgtttcgagtactcgattagactgggggaagatccggctatcatggcacatctctctaggattatttagattccaagtcgtcttgtactctatataaactgcccataaggttttgataataaatgtacaaattatactacgatcgaagcctcatgtgtatgtacaggttcgtaataataccatcctagctataaactacccatggagggttaataccaaaaaaaacatagagtaaatttcatagagctacatgtacattgatcaatcatatcacaaaattataacttttgtaatctcaatatgttatggatataaaatataaaatgtgtagttcttaattgataacttcatcactaaatatatagttttacgatatgatattttttaaatctgtagttctgggataaatttaacattaaacctgtagttttacgatacacatagtttgatcaaagtatatgtatttatgtgaatttttttctcaaacttatactgctagtagtaaattggattcaatatagtaaaagtattgaagttgtggcgttggattcaatatttaggcagcattgtggtatatcatttgagatcaatgccaccttgtgagtagtttataactttatataaagcacaaaaaagacttggattttaaacaatcatatagagatgtgatagaaattagagaaaatcccctgtgtacccttgaaagttcacctaatcccttctgtacccctgaattttgctcaatcccttacatacccctgaattttagtttggatctcttccatgccctttccgctagttgaccgttagttgaccgttaaattcttatgaaaaagtccattttgccctttggtataaagaagcatataaattaatagagtatattgttggagcatagaaatttgttatatgagactattatgtttatgagatagttatgcaccatattatttgcgataaatatacttttagatatgacataaaaaattaatacttatttattagttattaaaagattttttttagcatatgtgttctgaagtaataaacaaatctgttgtattactatgaaaacacatatgttacataaaagaacttttaataactaataataaataagtatcaactttttatatcatatgtaaaagtaaatttgtcacaaataatatggggcatcacatactcataaatataatagtcccatccaataaatttttacattccaacaatatacttcattaatttattatgtttcttcatagcaaagggcaaaatggactttttcaaaagaatttaacggtcaactaacggtcaactagcggaaagggcatagaagggatccaaactaaaattcaggggtatgtaagggattgagcaaaattcaggggtatagaagggattaggtgaactttcatgggtacataggggattttctctagaaattaacactgtccacaatgaaaactgaatcatttctggcctgtcaactgacttttccaggtaggaggcttgcaatcatgtggagtagaagcggtgtaacgcaggccttgcttagttccaaatttttttcttcaaacttcaaactttttcatcacatcaaaactattttacacacgtaaacttccaacttttacatcacatcgttccaatttcaactaaactttaaattttagcgtgaactaaacacacccgtagttcatcagcaaaacgagaacatctagatagggaacgaagcccttgtttagttcccaattttttcttcaaacttccaacttttccatcacattaagactttcctacacatataaacttttaactttttttttaaacttttaattttagtcaaacttcctattttaacgtgaaactaaacacacccaaaccgagaaaaaatgctacagatctcatagcattgtgaatcactgtagagggtccagctagccaatgccacatctggaataaccagcgtcgtttagttctaaaatatttctttaaacttttaacttttccatcacattaaaatttttctacacacataaactttcaacttttccatcacattgttctaatttcaaccgaactttcaattttaacgtgaacttaacacaacccggatctaatcgacgacagggtgacaaagcagccgtacgactcagatttggccgcatcttctcctctgttacatgccgcgcctacgcatataattaacaacgtcataattaaacgatcacctcaggcatgaacgcttgaacgcgcttgcattctctgcaaccaacctctcgtaatgcgtccccaggtagataatgatacagccaaggtagccaatcaacacatacgcgtagcatctttgcactgcacggtcacatgcgaacgagtaccttcagacgcgagggcacgcgacgagatcgagcataaatgcatgtgtaatgcggcaacgtacgaacgattcgagtggcagctagtgcgcggtccaagccaccgctctggccgctcgcgcctagcttgtccggtactccggtatagctaagcgatcgaccacgcggagcggacacgccacacatgcaatacatgcaaacacatcgccgttttcccccatgcacggcgcagtcgccatcgggacgggagcagcaaggctctcgctccgtgcaacttagtactactgaattctcacttcctggctcgtacaactgcacgagacgccttccagctgaagcaacccgggcggctgggccgtggacaagcggaggtggggaagtggacctcgtcgtcgtcgtcgcaacgggaggatttggtgcatcgatcggcaggagcggggcgtgtctgtccgcgcgcggcgtcgtgcgtgccgggaccggagcctcaccgcgcgcgctgcgtacgatatagcgtggagttgggccggttttttatggtaactttcatggcgacatatgagaggaaacagagatcggatcggtgttgcgcggaaatccattaacgggacaggggacgggccaacggcgcacgtacgggcgttcacgatagtggctctagttggaagtgagtgacgagggcgtcaattattgtcggagatggagacttagagcttatgatctatctgtcccggatcgtctggttgcatatatggagaaggcaacaaatgttaatccaccggtcactgttactatgtcctccgaaatgaagcccggtgtcttccatggagtaggacaaggtcacgtacagacatcgagaggaatgcgtagcggctaagctgccaagtataactgcgtggccgcgtacaactgtaactcgagtgtcctgatctactcctctgccaggagaagccaaaaccagttattctgttaatttgacagcgttgcacacgctcgccatttgtagctctgcaccattcgtaggtacattcgctgtcgcgggtggttgttgcacgagttgctgtttaccttcggcctttggctttttggcagcgttgcacgctcgcctagccggccggctggccgaaccgactgatgcgcaggcaggacaacgtgctgaggaccacgggcgccaatgcaccgtgagtcgtcgcgcgggaggactcgtggattgatgaagcccggccaggtttttcatgtacctcgtcctcccggtacagtatatgggcataggggagaatgaagcctgcgcccctccaaccaggccagtgcaactgttcaaggaggaaaagtaggtgatttctctgcaggtaaatttgctcgttcgccttctccttttttaaaaaactttttttgaaaacttcgccttctcctccgttgcctcaaagtaattttggcgtttgacgttgaagcatactgaactgaatggtctgcgtttctccattagctttagcctttttagccgggtcggacgaaagaaaacggccaagcaaatttcattaagaccaggaagggagcttattagaaattacatgatatcaatagaacgctgtagagaggcgtggtccaacctcaaccaatcactagtaacctcaacatttcgcactacaggaactacttctttcaagaattaaacctcgttttgatttccctgaatagttaccatggcgtgcgaggtcgtcctttcgagcaccctagcatttcttttcttccgaatcagccaacataccaacatgaagaaggtggcaaaggattttcctatagctcgtctgaaaagcccaccttgctaccagccagaaggcaccaatcactcaaataatcctgccccagctctccaagaagttagaaagaaacaccgccttttgatagcctccaaaccctgttagtgtaggtcagtaggtgtaaaaagaaaaactgttactgtaagcacatgaaactaatagatatgcttgcgatattcttcatcaactgagatacacgagtgacaacttcgttgatgatatcaatttttttaggaggttataaactgtgaggcattttccctggattgctagccagacgaagaattcgacgtttgatggcactctcgtcttagccttgatctcaccttagcccgcccactgttgcagaaaacataataccgttcaacgattaattagaatgcaggtaatcgaagttatacgaaaatcttgtgtttgcagatatatgtatatattttataatactatgttcttctttgacttgaagattcagtccctgctctattttattaggcaaaatttgctacaggacaccgaaagattgtggcctttactgtgagacactaaaagatcgtgtatttgctcatggacactgtaaaaatatggtaattagctactggacactcctcccattattttattttttcagttgaaatggagagagaaagagttgtgtaagtaccaaaataccctttgacactgttcttcctctctctctcttcttttcttttccccttcttcctcgcggcggcccagatgtcgtcgtccaacacagactcctccgacgagtgcctcacgctgccaccgcaccgcacgaacagcatcctgacctttgtcagcctcaccatcgccatcgcgtcgtgcctcgtgccgctcatcagcaccggcgtctcaccgccagcgcggcgcacgcttggcagtgccgccgccgccgactgcgtcgttgccacgcgacgcctctggcgggacttccccttctccggcctcttctccctcgtcggtgcgctccttgcccttctcgttgacctctccgccttgtcccacctcaaacccatggccaccagcacgcggaggcgccgccgcccccaccaaccctatgttccaatc

SEQ ID NO: 28346 - DNA, 6615 bp, Oryza sativa
tgcagcaaattttgccattttatttctccgtccgtcccaaaatataaacatttctagaatagtgccaagtcaaactgttttaattttgactattaatagcgataaattaaaaaagataaatcatgtaaatttaatgttactatcatagtatgcaagtctttttatttaaaatattttacttttgtagtcatttttggttaaagtagcatttcgaagaccgtgttaaggcctgtgtgtataggatacgctgcccattgaacctggtcggtcctccttgtgtgcagctcgatctcctggacgtcgtcccacggaactaggtactcactccgtactcaccaatcgctctatattggagggtgccacttgtatatcagtatatcacgttcctaacaattatcacgctgcctttgtgccactgtaaaccttggcctaactacatgactgaacaaggacggcattgagagctggatgccccgcgccgtttccaacgacaaacagtcgaccaatcagccttccaaaagttagttccgtgccgtttccaacgacaaaccttgttgattctcaaaacatgtttccaaatccctcgctgagttgtaacattttccacggtcgatcatgatgctcaagtgatttcattagccatttttttaaaaaaatatagtacaaacacaaccactcacaacgtgcgtacacttatcatctgaacgtacacacgcacatcattcacctataaacacatcttaaaaaaaactggtcagcatgtattgaggttgatagtcactatggacgcatcgctgtgtcttgagattgatgaagtcaccatgaacgcctcgctattgatggatatatttagaacttgaacccaggtaagctaaggctgcgttcgttacctcccgttcccaacttccctcactcgttttccgcgcgtacgcttttcaaactgctaaagggtgtttttttgcaaaaaaaaaataattaaaaaaatcatattaatccatttttgaaaaaatagcaaatacttaattaatcacttgttaatcgctgctccgttttccgagccaggacaaccctcactcccaaaagcagcctaaatccaccataagaaaattaacccgttgagttacactcacttcgcctttcactagccactttaaccacaaaaccttttagaacagtttcagatccttgatgcacggataatatcagttgcatacacatggagctctatgctattaccgtccatcataaaataactttattttttatccatttcatatgccaacataaaactaaaaaaactaaaataccttattttatcaaatcgtaatgtaactatttctcactttatccactctcaatgtaactaaaataccttattttttatccactttcaatgtattttatcttctacttttatacaaactcggatgcaatggttgcttgaaaatgaactaattttatgatagatgggaggaaaaacatataatattactgtaggatagggagaggtaccaactaccaaacaatgccctcattaacctcctcctgcctcttccacaagaagactttgattggtcaccgggaaagttgcagcaccaaaagaaaatgcactgccaaagttaacaacatttcacaagggttgtcacctggatagcatctttggcttcgttccaacaactttctttggcgaggtttagtactctgggaactttaataatagatggcacaattaaaatttaaaaaaaccacaacccacaaaaaacacaatccatatttattccacgtatgaaacccaagccactgaagtgtgagggcgttgatgatacaacgacaagtttattttacgggggtttacaagacagaacttagttgctcttttgtttttattcactgaaaatacttacaaagtgaaagttcgtcggcaaaataaaagagcatcactgttcactcaaggcaagccatgaaaaaaagactcacgcatgacatcaggaaatgaactcacaattcagaaaacctataacaaacaacaaacttgtacagtttcgtgagcgacagtctttgcacttcgagaagatcaaggaccgatgcagatggcttttaaatatgctaccgagtgcaccagtaatctctacgtcgcgcctcaagttgccaaaactattatcacaattagcaagacaaccccgaagatcaccagaagaatgcagagctgcaaacaagatgatttatcaaggtagagaaatggttacaatagcaaaagcttaagaaatttgcactagcctgaacataccagtgatgaattcgatttctgagtcttggacgctttcgcgagttctgtctttgcctctttggttgctgctgcagaattctcaatgtttgtatcgatttcctctgtaataaaagatgtacgtgttaactaggaagcacaggaacaacacatgatatgtacagtgcaatgtaaaacttgccgattgtaactccttgaatatgcacaagtgtagcaagatccttaaatgcttcatgtacttcaccaatctgttgttgaatatcttgaatagcttgctccctttcctcaatgatagcttcattgaaaacaatttcattatccaattgcagcacctcttgcctgaagaaaaacatgataacttagcagagatgtaaggaaaagtgattctaccaaatcttgcatgtcgtattttatcaccatgaatatcaatcaaaataagatgcaactctttttcttcagggtcacatcaaagacagccttgtctagtcaaaattctctccatccttctctaatgtagaaaaggctctcagttcatgcgacaagcaatctgtgtgaagtaccaacatgtggaaggcaatctgtgtaaagtaccaacactgcaatttactgtaactgccacacaatctaggctcggtcaaaataatgcatggccacttggcctatgtattccagcagaagcatttgatctaacagattttaggtgcatgtactctcccaaaaagacatagaaagtgtgccaggtatataattcatgaggtgatatactgcccatgagataaatgacgtgccacgcgacttatgtaagttccatgcaccacagatgaaaactcagccacaggaagtcactaaaattgaatattttctgatgggatagaatgaaaaaacatgcgctatacgattaaagctgaccttccaccagtaagtactaaatcactagttgaaaaaataagcagaaaaagaagagctatgagaacactgacctctttgattctgcgagtagcgcatgctgttcatgaattttaccagaatccctggcttctataccacctgtagtatagctacatcatagtgaccaaaattctcaaagatattagaagataacccagtcaactctgcacatgaatacctttagttttaagataaaccatgtcactaaatgaggtcatcaggtaaactgcaagtaaaacggatggtcatgacactgacaaagagaaggcaatgtgtctttaaattagttaaattgtatgtttttacaatgcaaaataataagacccatctccatacttcaaaggaagagaagctaatggagcaataacataggcaaagttatatgacctattcaaagaaaaaaatgccaatataagctaggcagaatcctagaaggttgcagcataagcaaatgaaatggatcatgatgaacacagtaacaaactatgccaaaaagttgtgagaagtattacttggccaatggttcacatagggctagtttggtttgaaaccctatcaaaatactggtaccaaaccttgggtaaattttggcactaccaaatttttgatagcatagatttggctccactctattgatttggcaaaaattggctccaatccaaaatgctaacatgcactattcaaaactaccaaagaattggtagggcaaaaattggcaccaaaccaaaatggcccatacacaacagtatcagattattcaactttttttaagataatagaaatggtttacatctccagcctctgccgacaatcagattattcaaccaaactcttttatcaagcaatgagggcaaaggaattggttattactatactagtaactagcatggtggcccgtgcagattgcggctagcatctatattttatctcatataatagcatatatgttttctcaatttattattaaaatatattaaaatgacaacataattttaaattttgtactaactttacgaaactactaatgtgtaatattcatattgtattttatatacgtgttagttattaattatttttaatatcaaattttagttatttctaaattatattcctatatggactctagactcgtctttcaatatttcttatttttaattccaaattttcgttatctgtaaattgtatttctatatagactctacgctcttcttccaatattatttatttttaattctgattttttttttgtttctaattgtatttctatgtggtctctaaactcatctttcaatattctttaattttttatttcgaatttcagttacttctaaattgtatttttatacggattctaaactctacttttagttttattatgtttattccgaattttagttagttttaaattcctatatggactctaaactcatctttcaatattccttattttttttaattccgaatttctattatttcttaattgtatttctatatggactctatactcttcttctaaaattcttttttttttattccgaatttcagttatttctaaattgtatttctatatggactctagtctcctcttccaatattccttattttttaattccgaatttcaagtatttctaaattgtatttccatatggactctgtttttctttttctccgattaatatgagaatttctaggccgtgagagcgaacgtggaggctcctttttatattcctttttatagatagataaatagatagatttgttagaatccatgtggaagccactgataagtaacatgtgcatgtaaattaacttctacacatggccattcgtcggtatactattaaaaaccaatggcatatcatggcaggaaaatgaaacaatcaaacaatacagagaaaagtttgagatgaatcgaatgaaaagtgtacaagcattactttggctgagatgtctggggaacaactggcttatatgccatctccctttgaatcgcaagattttgaagttttccatactcctccatcgtcgtggcaaaatccttggcaagcttcatgtcagcaaccctcttgtctgcctgcacatgatacccagattcctaatcactatggtagctaagtaaactaagagcagaaagatgcatacatgatcacacatatagttggaaacagtcttgtccaagacaaattcactgggctaaaacaaagggtataaataaacagtaaattactactaacactagtatcggcgttcttgtctgcctcagcagctctcctgagcttctccttcgcatcctttgccaattgaagaatgttatgactagtcttctgcctgtggagaaatcaaccaatcagaacaccagagtgatggtaaacgacatgcctcgagggcatgagctaccaaccatcacaatttcgatcaattaacttgagctgagccaaaaaaataataataatcgcgagcatctagcattctaggacatgaaacgtgtagaggcaaacaacaattaaaggagtgaggagtgggggggagcgaggagagacagctggtcacgaagggcgggggtgtccttgggcgtcccgagcgagttgaggaggcggcggtaggaggccacggcggtggtgatctggaagacgagcgcgcgcgtggcgtcggggccccgcgccctcctgggcgcccgcaccgcgccggcctccagatccgcgaagctcatcgctgatcccccccggcctttctcctcgcgcgcgcgcgcgcgtccgatccccctcgcctcgttacgccgccgaggtgccccgcggctgcgcagggtacggcgccgggtagcgaaggtggtggtggtcctggtggaggcggcagagcggagaatacactagggtagagtcgccatcgccaccggccacgcacagttgcaggcaagagttctttattgttccatggatcaaagcgatgctacaggtggaggtggtggagtcgtggagatggccgcacagccacgaacggaacagtgtccgcccgcgggctcgatccgcggtcgcagtttgggcgtggtgcttggcatgaagccatcaactgcggaataagtccattttgcctccctcatctcttgcgcttgtgtaaataacatccccaaccggaaaaccgggtataatgcctccttcatctatgaaaaccagagcaaatcacctctctcggtggttttgctggcggtttcgtccgacgtgacgttgttgacccggttgacaagctgactcagcgtggtgggactcacatgtcagtgtgcagcgatgtcatcttggaccgacagcagttgaccaccggggagatcgacggccggcgacgcacgacggcgagccgacgaacggcggcgaggtaggagtagcgggaaa

SEQ ID NO: 28347 - DNA, 2118 bp, Oryza sativa
cgctgcacgtgctcgaccccttcgcggctgcggccgtgcccgccgctaccgaggctccgttcggggaggccgccatcgccgtggtcggagcggcgacggaggaggcaacctcgacgctgatcgacgactccccgcagcaagcagctgccccaccatctcctcctgctacttcttctgtctttgccaactggatctggactccacgacgccaccgcagctgtccaccttgccaacgccactacacccggtgcaccacctcgtgccctcgtgagccacgcccatgccgctgcgtcgcctctgccatcaccactgtgcacccatccttccttctcttcgaagccactgcaataaaatcccccacaaaaaatccccaaacacatcatcctccccatttcacttaccattcaccgccgccaccatcgcctcccagtccccaccatcggcccgagcgccgccccgcgcgcggctattaggcccgcacaggcgctgcctccgcctccgccgaaaccgccgtcgccgccggtttcttcttcctccggggcgccgcctcctcgcgcgctcctttgactagccgtcttcatcaggccgtcgttatcgcgtcgtggccgccttcgggcgccaaccgcctatgcctcgccgccaccatcgcctccccagtccccaccatcggcccgagcgccaccccgcgcgcggccagtcggcccgcacgggcgccgcctccgcctccgccgaaaccgcctctgccttgccgcccttctcggtcgccgcgccggccgccatcgccgtcgccgcgccgactgccgccgtcgccacgcccatcgccgcccagcgccggctctgtctcagcatcgacaggaagagcagagagaagaatcgagaggagaagaaaacgagaagaagggaaaacgtgggtcccaccatttttttattattttctgtgtgagaatgacatgtgggtcccactacgctgagtcagcttgtcaaccgggtcaacaacgccacgtcggacgaaaccgccagcaaaaccactgagggaggtgatttgctctggtttgagagatgaaggagacgttatacccggttttccggttgggggatgttatttacacaagcacaagagatgagggacgcacaatggacttattccatcaacagccggtggaacacacggaaaagttttaggccggcctaatcgactgtatgtaagcagttgggcccatcatgatatctctcgggaataagttcaccggaggtccctcgaggtcccttaacctcgccctaaactcattcacaggagctcccttggcagtataggtggtttcgcgtacgtggcaccctagtcagaaaaataaataaataaagtacgtggggcccacatgtaagtgagagaaaacggtgcgggccccacatcccttctattttcccctttcttctcttctatcgtcttcttcgacgaccgagacgggtggggcaacggccggcgagagcggcggcggcggcggagggcgagtgtggccgcggcaggcgaagctggcaagagcgactgcgggcgaccccggcgggaggtgggggcgggatccaggacgggctcctgctccgggaggggattcccgcggtgacggatatgtcgccgccggtggcggaggaatcaaaagggggtggcggtcgaatgccgagcgcccaaggtcgggcatgagcttgccggggatgctcatgaggtcgaagaacggcaggtcgccgggctatgggcagaacggagacgggcggcgcggcggcacgcgaagcggcgttggacggcggcgggcgagcggaaggcaagcgcgacgggctgtgggcagagcggacggcaagcgagcggacgagcatggcaggcggaggagggggccgcaacggcggaggtggccgaaggaggagcgtggcggcctactccgccggtcgcgtcgtcgttggcggcgagagcggcacacaaagtggacagagcgaacgagcacgtcgttcttgccgctggtacccgtcgccgccgtcgcactccttggaggagcccagcgtggtggcgtgccgcagcggcgggaacggacggagcggggggagatgaggccggcgggaggggggaaagag

SEQ ID NO: 28348 - DNA, 9907 bp, Oryza sativa
tttgctccgcccgcgcccggagacgccgctgctccgcttgctccggccatgcaccgcccacgctcggagccgccgctggcccgcagtcgcgcttggccgctgcttgtcgccgccgcagccgcgctcgcccagacactgccgctccgcctgctctagcgtgctgacgccgcccctccacctactccagccgcgcgctcgcccatcgccgctcgccgccggcaaagagagaggagaggaaagagaagaggagagaaaagagaagaaaaataaactgcagctgacatgtgggcctcataattttaatattttttttgctgactaggatgccacgtaagcgaaaccacccacctatactgcgaagggacctcctgtgaacggtttgaatgagtttaggtgcgaacatttctggttttgtggttgagggacctaaaaaaattctcgctgttaagttgagggacctcatgtgaacttattccgcgtctggagtacctcgcttgggcctaggccctcggtctatggatggactgaaagaaagttcagtacatgccacagacggctatttggatttgaaaaaaaaaagagtccatatttcccccctttcgccggagcacttaaccttctatactatttattcgctcattttgcaccacgaactattgaaaatggctcaccttactccctaatgatatttgtcttcttcttttctctatatgtatgtcatattttgcaattaaatttgatgacattgatatacgcattataatttatatctcaacattttttgattttttttaattgttgtagaggttggaaacactcatactaatttaaatttcaagcaaatagttttgaaaaaaaatgaaactattttagaactctgataatggtgtcatttgtggctctgcaaaatataagcttaaaatatgactcgtataaagagaaacaaataagagaaatgaaagaaccatttttaatactctctccattccaaattataaggcctatttttttacatgatctccaatgatatactttggccattaatttatttcatgtcatgttcccaatgaatataaaattagcatcacgtgaaaatataataatataacatgcataatacttggtatcgatatagttagcatgattattagtcaaaaattaccaagtttaatttttttttagaaataagggtgcccaataatttggtatggagggagtagcttatagggtaaaatgagttcaaaatagttttggagtttaagtaatacaatgaaattgtttgggtgagtaaactggacttttctctttggatttttgtgcggtagagaaacaaattaacaaatgatgactacttgccgacccgttcactgtaattttaataattgcaagggtttttttttgttaaataacatggatattgaaattttaattatatgtcaaatatgtttgttaactttcaaattaaaatagatcatgttaaaataataatccatgtcaattactattcattaattattaatttcgatttttagaattaaatacaacactaaatcaaaatttattctatatgttttctgttgtttgtatgttttatttaatatttttaaaattttaattaataagtactccctaagaaagtcgtttaggacagtgacacgatcaccaaaacacaattttgacttcttatttctataaaaatatttattgaaaagtgatatatgtatacttttatgaaagtatttttcaagacaaatttattcatataatttttatattttcaaactcaacaacttgagaattactcatgatttatattcctaatgtttacttaaacattgtcctaaacgacttactttacgagtacggagggagtatttatttgtatttgtgttggagattcaatgtactatatttcataaattaataattctgaaatttaaaatttgtaaatatcgagttgtactcagtttagacttttggagatatattaatttttatttttggtttagtgtttccaagtttgtaattggtacatactcttattttatttgaacatgtttggtagaagttgaaaagagatgatttttttaattgcatgtattgtttaaaaaactctaaatacgatatacaatcatgattccagatacaacgactaaaattttcagttaacataggagtttcctcgggaatatctataggtatagttgtgggtgttttttttttctctgagcacccaattaatatggatataaatttttcaacaaccaaataaaacaatgtgatccaatgatccattgccgtcgtctaaagaatatcggatagagtactttatatgggacctgtatgtcaaccttttgggatcagcagagtcgtgtgtcaaagatggggtgatcattgatgatttcgttttcaaaagttgtcaattttattcgggatcaaccgagacgttcgatgtgtcacggtctaatcccatcgtcttaataccacgattagattaccactacgaccaaaccaatcacaattggcgatcctctttcaactaaccccaaacagcagcagacacactgaaatccccgggttaatattgtttttttgatagcgtaatccaatatccccattgttagtaaggctctcaaccgtttctccgttcaaccccgaacctaaaatacgaggcggcggaccacggttttgctgatgtgataccgttgcttgttggcgcgagcagtccacgtcgggctgcctcttctgcttgcaaggctgacgggtgacggctgcatcgttatgcagtcaacgattgcaggctagaactcgagaggaacattttccattcttcctccatcgaaggctcgaactcgaagagtagtttaggaaaaaaaaaaaaacgccgccttgtttctccaatgtcattgtccgtccatttgacacatgcgacgcgtgacgatttgtttagcttttctgcctgttcgtaagccggtgacccatgcgaaatcgtttgcgcagcgcgcaaacgatcgtccccacgactcaagtggatcaactggcgattgggaaggcaacctagatcaacgaaccaaagagaagaaagcgagatgatggatgcgcgcatccagttggtggtggatgggcggcggagaccggagaccgaacgaaacggccagattcggatggatccgtctgccccgacgaggagaatgccgcttccaccacgccccaacgctgggccacacgcgcgcgcccaccaggccaccacccaagccgagtccacgcatcgcacgcgacaacagaaggtgaccgaccagagggcggcccaaacatccgggaagagatccattcctcacggcccccgccacaacatcgccgtcgcctcgccgtctgccgctgccacccagcgaacgcaaagacgaaaacgtcaaggaaaagggggggggggggggggggggaactctgcgaaagaaagaaagcgattcgtcgcaatcctcactcccctcccggtctttctcattcgtagttctcctttttgcccgcacaagcagcagtgcagcagcagcatacgcagtcacaaacaccggttattattggtcgatgcgtgtttcctgttcgtttgggtggcctgatgccctgatctgacgatgggtgacacgacttgggcttaaacaatggccgcaccattaggtagtgtctggtgcaggggcgaacgcgattagccatgatgtagcgtgattctttccttgcaggcttcctttcctagccaatcagccaccttctcccaaaccagtacaggcgctatccggttgaccaaaccagcctaccaacccgtcaagtcatcgacacagggatcagatcgatcaggagggcctctcatctttgccaattccatctttcttctgttctcctttcctcttcctcgttcttcttcttcttctagtatccgtgcataaaactgctaaacaattaccactattgtattgaccaatgagtcgacggggccatgtggtttggttttgtttagcatcccgtctctctcctcctctgtttccatcatcatcatcatccagaggccaccaaccctcctcgattattcagagcagccaattagtcttggcgtcttgacgtgttcggagaatttcctctcatttatatgcagtagttagacatgctctggagaagcaaagcgaggtaggaagagggatttggtcgaattttacgtacttagccgtgggcgaggcgtttacagggttgcttcggctcggggtgggttgggttgggttgggttcgatggagaagtggagcagggggctctcctgccgggccgccatctgcggcatcgtcgtcctgctctgcgccaccgcgttctcctgctccctcgccgccgaattccgcaaagtcaaggtcaggctcgcttgctcttgcgctctccgacgccggcaatggtggcgggcgggtcggtctcactcacgcccttggatctggatcatgtctgtgtgtgtgcgcaggagaaggacatgaagctggacggtagcctctgctccctgcccaagagctccgccttcgaattgggcgtcgcggccatcgcgttcctctccgtggcgcagctggtgggcaccacggcggcggcgaccaccatgtgcgccgcgtccaagcgcagcaagtcgtccaccaccaggcgccgcgcggcgtccgtcgccatcctcgtcctctcatggtacgccctatagtacggccatggctgccaaacaaagaattaatgcgtgatttctgcgagcgtggatcgctgaatcgccgcccgcggcgcgcgcgccggatgtacgcagggtgagcttcgcgctggccgtcgtcctgctggcgaccgcggcgagcatgaaccacgggcagcggtacggccggggctggatggacggcgactgctacgtcgccaggaacggcgtgttcggcggggccgccgcgctggtcgtcgtcacggcgctcctcatcctcggcctcacctccaccaccaaatcatcctcatgcgccacctcggcagcatccgccacaacgacaatccgtctcgacgcggcggccacggacgccgagcaggcgagcgggcgatcgaagcagtgacccgccggcctggccggggcggaacacgcggggcgggacgggccaaccggaggagaggcgggtggacggtgctccgcgctgttcgtcccgcaaaggccaagcggcgtgggggcaatctccgcttgctggcaaaggccaacggctggtgatgggtgggggcgggtataccggtgggttagaagatattttagctggacaaaggtagtacatagcattactgacaaaattactgaccaagaggtccaagaccgtgcaaaatgtaaatgaaaccagatcaaacagatccacgcaaagaaagtaaaggttgtacatgaattaattacagcatcttaagacatagccgagttcgaacatggtgattggtggatgtggcagagtcgaatgtgagtcgtacgatttagtcgtatgtatagcaggattctatttttttttagctcgcctatgccagattttcgtgatggttttattgtatttatatatttgttttttagataacaggagatgtattactgtagtaatatttatatatacctagcatgtgtttcttgattaggtcctcatgttttagcatgttcacttgtgctggcaaaggctggctctgtcctctatacattatctagtctgtaacagtctaacagacagcatgatgggaatgcatatgaacaattctttttggctctgtagactgtaaattccttttttttttcttcttcttctggtgagaagacaaaaatgacacggggataatatgtgatggcccccgagtttatcagtcgcattgttgcaatgagaatgacaagcacgttggctcataagcagtcgcattatcctatgtttctatcttttcatagggcaatctccagtttttgaactagaagtatcatggaaattgcagagttataatgatacgcgccgctggtccaacaatacggactattgggagagcaatgcaacgcagaaaaatgcaaacgtcatattagaactatccgtacacagtacactttatcaggtcataaagctaaaaagggtatgcaacggtgaaggggatttttaagccgttgcgggcaagttcgatgttttctttcaggttggcaacagcaaacatgttggcctggtgtgccgaaggtggaagaaacaaggcaataggattctgcatgtgctgtcattcatacgggcttgcatctggtcgtgtgttctttgttttcttgcacacaaaaattcgtggaaaatgtatactattcggtagctctattatagcatgtacaatagcatactataagccagttataaacacatatcaagaagataaaagaagagagagaaaagcagcgggctacagatttatgtgtatgataggggggaggtagtatatttattagctattaaattaactataaatgatttggagttagtagtattaaacttgctcttaccgcaccaactgttgactggtttcacagagagatacattcagttatgttgatattgattaatatcattatgagctgggataagttcatatcatccccctcaactaccacatttatctaaaagaatccattttactctaaaaccgacataattccttcccgaactcataaaactgtttaatttacacccctcatacaaactagactggttttttctatgcggcgtttacgtgaacagcatgtggtgtcgatgtcagcataaaaataaactagtagcttcacatgtgacttcttccccctccccactctccactatgtctcacgcccttactccaacgtatagatcaatgaccaaatgggccgtctggcctaggcacaaccgggcccgggccgagattagtcgagccggcagactcgacctacacatcgggctgccccgggtctatccacttgctgcaccatctgcctatgcacgacccaataagacttggatggtgtcgagctagcccaaagccacgaaagtccattgcactcttccttggataaaagactattttgcttccctcatatctttgggccgtctcttatatggttggaataaatctatttttcatccctcatctgtttgggtcatttcttgtatggctgaataaatctattttgtctctctcatctatttaactccctgatcgttggactgggccaatgccgtatcggcccatcgtgtcgagacagaggcccaggcatggcgcaaaggttgggtcatgccgacacgggatgggcctaataagtcaagcaatcatcgtgccacgtaggcgtcacattaactagaaatcgctttcaatattgtcgaggaatttaatttgtacccgttttaaaagttgagggacactccggttttatggttgagtggtgtgaataaaactcgacctatagttgagggacctaaagtgaattttatttcaaagcgtacaagaacctgaaccttgcacgttagctcaaaacctggatgtgcataaatcctggccccatcctaagggggtggctacctggcgactggtcgcgcctgccccatcgcgcgcgaccaccccccactcctcttagtatctatactatacaactagtagttactagtattactattactattacactactactattagtactagtattatttctataaaaaatatatttttatatgtatatattgttgatgtataaaaaatatacacatatacaaactttgtatacaatatgtacaaactttgtatacgtacgtattaaaaaataaaaaaaaacaaaaaaacataacgtatacaaactttgtatacgtgcgtatataaactttatatacgtacgtatataaactagtttgtatacatgaatacaaaaagtttgtatacgtatatgttaaaaaaaaccgaaaagagaaaaaaggaaaaaaaaagggggggggaaacaaaaaaaaccaaaacagaaagagaaccccaaaataacggaaaaaccaaaatagacagagaaacaaaaaaccggaaaaaaccaaacagaaagagaaaccaaaaaaaaccggagaaaaccaaacagaaagagaaacggaaaaaaagaagggcgcgcgcaactagccgccaattagcgttttcgccatcctaatgcataagcgggacattatactaaaatgtttggccaatacagttgaatgggcctcaataccgactcattcaatcgagtccttaataaagtgggtgcaatctcagatcggacccattcctcgttggaaaaagttcaatctgactccttcgatataggtcggatatgataaattcatatccttcaaccacaaaaccatatataatgtaaagcaaggtcgacaacgaatgcctgcatgagttcttggataaggcgaacgaaggcggtggcaccaccatggaggcatggagtacccagagcatatcgtgttttgctacagtcccaccgccgtcctatggaagaagtcgtcgtaccactgccgagaaggggataaacatagataggaaagtaaggagatagaggggatgacatgtgagccccattgtattttttttaaaaaaaaaattacgtgatgactaggctgccacatggatgccacgtcagtgaaaccaccaactatattgttaagggagtcattttgcatggtttaaatagttgaagaaatcactatacctagtttgcggttgaggggtaggaataagtcttgactatctttgagggactcaattaaacattttccttcctccctccagatacgctcaggacccatctcttaacttcgataggctggtgctctggcctcttcatggaccacaaaatggaataagttcaatttgactcccttaaaagtgacacgaatctaatccgtgaccctgaccctgaaccacaaaaccagatatcttgactccctaaactgttaaaaccggttcaatttgactccctcagcggttttggagggcggtttcgctgacgtggcgcatacatggcagtattgacctggttttacttccatgtggcgctgatgtggcactataatttgtaaaaaattgtgggacccaattgtcattcacattaaaaaaaaattgtgggaccctttacatgtggggcccacgtgtcatcctctctccccttccctcttttttcctccctctctcccttctctctccttctctccccacgccggcatcatggagcccagcctagccggtccttgcacgcgtagctccagaagagagcgcagcagaagtactgcgccgagcaggtgacgtgaagcagcactgccacgacgagcatgtgcgcgcggtcgtgcggccgcggcgcgcagtctttgcagtacaccttgtggatctcctcgcggtcgtcgctggtgccggggcgccaccggaggagcagcacgaggtggtggaagatcttggcgtgctggactgctagtacaggcacatgatggtgaagagcgcgttgaggaactggttgatcacctccgtccacttctttccgctgctcatcgttgggatggcggagtcaagcatgccggtcatgagcatgaacacactggtggagaaaccatctttggtcggtcgaccagattttacaatagtcccgattgtattaaaaaccgggactaaaaatatctttagtcccggtttaaaagctacagagtactttttcaatctttagtaccggttggtgttaccaaccgggactaaagatctatttgtagtcccggttaataacaccaaccaggaaaaaagatcgccatacgctttactctcagttgctgttaccaaccgggactaaagatatatttatagtcctggtggtaaaaccaaccgggagtaaagatcgacgcg

SEQ ID NO: 28349 - DNA, 15947 bp, Oryza sativa
tcgatttgtggatttggaggcaatttgagaatgattgatttgagattttggggacgggatagagtgaaatcaatatatttaaaaataatgaagaaaagaaaataataaaaaggaaccggaaagagcaaccggattagcatctttagtctaaagatgggtttttacccccggttttttcacccgggactaaagatagcgatctttagtcccggattcgtacttccggttcgaaaaccggtactataggggggttacgaaccgggagtaataaccctttctccaccagtgacagcaacagtaggccagcagcccagcggcgacgaacgccaaccaaatgaccatggcaaagttcccttcacctttccatgctcctccatggttgacatgcttttgcgtacatggtgcgatgcagatggcggtgacggcggcgttgaacggactcgggctggcactgcaaatcccgacaatatacaccttcgtcgccgactccttcgacggcacgagcaggggtgtggtgtttgggttgctcatggtggcgggaatggtcggcacgatcgaggcagagtggcgcaacgcggcgtccctcgccagggcgttgtacatcggcatcgctgtcccatggtgctgtgttgcctcgtctactcgttcctgtactgagagagaagggagaaagaggggaggaagaagagagagaggatggcatgtggagcccatatgtcagtgggccccacaatttttatgggtgtgaatgacaaacgggtcccacatatatttttttaattcaaatgccacctaagcgtcatgtcaaccccacaaattaggttagcaccgccacgtcagcgccacgtcagcgaaaccgtcctccaaaaccgccaagagagtcaaattgcaccgatttcaatagttcatggtcgagatatccagttttgcggtttagggtcatggattagatttggtcacttttaagggagtcaaagtggacttattccccacaaaattcctgtgcccgacgtgttcggccggctgatgcagaggagagcccaggtttctgaaacttgcgatttcggcccataatcctgacgaaaactctcgtgataaaaaaacgtagcatatcgtatcatcgtagtttttctggtgagtgactcacgatgtctgaaattctgaatggaaaaggatacgggaaaaaggagagatgttggctgcttttttcgcataaaatattgaaacggatacgtacccggttcctggatctaagccacaatctcacaagaatcaaattcagtgaccacccccacacaacacatcggcaacgagatttttatatcagagaaatactcccatggctatctgtgtaaagattttgtgaggttgcatgcacacgtaagtcctcggcaaaagctgaagccaaaaaaaaaaaagatcctggttatctccgttttctgatgatctgtagccgtctttttggtgcgttttgatatccccaatccgcgactgtcagacggacacacaaaaatgcgctgtaaagcagatcgagccacgtatcaaccggtggtcgctagtggagcctgaggccgtagttcgtgatgactctgatctcaaatcatgagaagcctttatatgtcattaatttgtgtccccccccccccctctctaaagcgacgcgcatccagctgcgattttgtttctggctacaaatcgcgtttctttttaagtgaaagcacaagtgcagctcgatcgaccaaagcgatcgatttagcaatgtactccttaagtgaacgaattaaaaaaaaaggactgacacattagcttggatctttgcttcatgacagtatctccctcgagcaattgcatggatgcacatatcttaaactaagcgatctgaggactgtgctgtggtggcctgtgatcggaaaaaggataacaatgacagctgaatgggaaaatttttaatatggtacgcatcgagatttctgaattaaaaacaagtgaaagaaaagttgatggcgaatgcatgggtccggccttacaatcaagtccaccctgacaactggcttagtgtagcagctagcatatatatatcctcacctttgcctccgctaaaataatgaaagactcgattgcttaaccaggcagagagtgctcgtggggcaaaaagatcagaacaaaggatgatctgtcaccaaaggccctagtgtatactactgttcgcgtttgatcgggctttgagactgaccagcagctgtatcccaatctagccagattgccactaaataatagagagtgatgcaaagctactagcacggtccgcgatcgctgctccttttcgccttttggatatcattatggagtaaaatacaacgtaaggaagcacccaaggaagcagggaagcatagtagcatcagtgatgagcacgtagcttagctagctgttttagcttattagcttagcttgggggaaggcgatgtggagagagcaaccggtaggacaaaggagtacaactgtaggatcagtgcacggcgaagcgtccacccgagtgacaggggagcaaggcccgaaaaggcgaccagaaaggcagaggaaaaggagagggaggaggatcccgggcggggacggaaagcgaaagcgacggcacggcacacgcatacacatattagcatgtagcgggggtgtaagattaacggtatcgggacggccgaccaggtgcaacagccccagcagcaaccaacatcacggctatcaagttgcggcacaataccagagctgtttcagcttcccgtctcagcttttgtggttttcctctggcgctaatcacatcagctccctctgattctctctcgtcatgcgcgtgccttgaacctgcccggtttaagagttcggctaatcctgcctgcgcgcgtcgctgtctcggcctctcgccgtcccgtcgcgttccgggttttcgcctctcgcctcgcgcgcgtgcggtcgcggtcgccctctggcgcgcgaggcgaccgcggtcgccctctggcgcgcaagcgcaagtggcgcgtgctcgcgtggggccacggaacgcgcgcgcggcgccggataacggcagaggcgacgcggaaaagtcagagtcagccgtcgcgctcgcgtttcatcgacgacggaagatgtggaggggggaatagggaatcaacagcaaactaaaagcgcacgcgcgcgtcattggttgaaactggaaaaacccaacgagattacgagagaaactacctcaccggaatgctacgataggccgttgcggggtccttgaccgagccggtggtgtgcgtgggcgtggcgtcgtttcctctggtgatgagatgagatggaaagagcttttcgctgcaacagaaaactgacagatggatggaaccacgcgtcgttttggttcgcccatgctgcgtgctttacatagccagttggtcatatatcctttgctcatctcatggcaaaagttacacgtgcactattgaggaataatggaaattggaaaatcgactgtgcaaacagagctgcacacttttcaaagcaaaatttctaaagagagattccatccagaataagttaatttagtactaaatcacatccggtttctgagacggagcaagtaatctagaaattttggcgagagctagacgtaccctctttgattatgctgacgtttatgttcacaaacacaacaagctatacctattttaacgcttggtggaacagttcttttactagtacaagtcggcatggatttctttctatgagtcaattacgtgaaccgggactacgaatcgccctcttgcatgtacggtcggcattgaacttgactcctcaaaaactacgcgcgtcaattttcctgataggttcgatacaggtttccaatatatcgacggataaggtctctttaaacggttttaatgacagcggtgaaacataaccagtttgttgttatatatagtcggccactcggacagcagcttgtcttggccgtggaaaaccaagtcaactaccgcgaccttcctcatgcaaatgcgtatgtatgacttggatgagaggagaggccgagactgataggactgagaccgagccaagtacgcaacgaaacaagcaagcagcttagctatcgccatatgtgcatgtatagtcggcattgcccctgcccggtcggtagggacgacaaaatcatggttcgcctatgacaacgcgaggacgtacggtacggtgtagattgacctcgttcgttcgctcgctagtccagagctagcggtccagggggccactacctgtcaacaatcggtgctcgtatgaatagccgagcagtatcgcgaccgttatacaagcagcagcacatggatggtcgatcgatctgcgggtggcaggcgaggcgtaccgatcgaccgtacacgcacttacctggtcaggtgcatgatcgagaattcgagatacgcaacgcacggttggatcgattgatacgcagaatccgcgggtgttgatcgattggcgataggatcagcgtctggaattcgtgtgaatcatgcacggtggggcgcgcgagttgcgtgccctgattggggcgtgtagggtagcgcgtgcatgcgcgcgtacatgcgaggatgggagcgagatatatatccagatatgtgtggcggagccgatcggggtgcgggacccccccgtgccgggtgccctgggtacctgcccgctggctacgcgagggaccaggcaaccactcgcgcgcgtcgcatccgcatgcgccccaatcaaccagactctccttctctccttcttctgtttgctcgcgcgtcgtaggacccggctaggcagtacgtacgcctctcagcctctggctgaatggctggctaagatccgccacttctagcgtgatcgaatgcgcgatccatctcccctgcctcgcgcctcgtcgtgttgctgcgtacgatgtgtgccacagtgcggccagactagataccggacagagaatttgaggtcctgtggctaagctgtgcgtgtcaggggagggagtccgtcgtacgcgtgcatgcacggttctgcacggaacggaacgtcacgcgagggagcggctatttttgtagctggaccaacctgttatttgttgcgtacgtacctcatgcatacacatgcatgcagccatgcatgctgcggcagtttcacaatgtcaatatgtttgtactgtacggtgtatctagatcggccggttagctgatgatctgataatccggaacgtatagctaaaaaaaaaaaccccaaaaaaatacattagattgggtacggcgaggaaacaggatagatgcctatgtgataaaaagcgaaggatatccttccaatattgagccagcaaacaacgaacagtcgggacaaaagttacatggatgatatgtgccatactttctgcaatttatctatgcagaaaataagattgtgagcgtacgtacatagtgcgatgtgccgatgtagacatgaatggaagtcgctgtagtgcttgtacacacccaactaaagtttagcgaaacaaagattctagatatccaggagacctttcgatcgtcttatgcagacaaataatgcaacggcactaactgacactcgtaacgacctgcttcttccaacatcaacatgtacctttccatggtatattgtgatattgtctacatagacctgtacgaagacctggtcccagcagagaccgggtgtaaatgaggtgacgggggacgtaaaattcagagtctagtgccgacttgcaggggcaatttaaccactgcaatttcctttgatgaaaattctaatgcgtgtgggcgagttttaaattgaaacaaataagagtacaatgtactgcaggaactaaccggcctcttgtcacaagtgcaacaaatgggtcgccgtttaaagttacttagaacaatgctacttacactatgctgggctctcgagggaggttgggctgaaaaaaaaatccctgtcatgaacgtttaccaaactactaaatttcgtgcataagtttatgtataattttatttaaaagaatcaagtaaatctattttgacacctataataattagtattcaattcattatttgctaatcacttactccctccgtctcattttaagtgcaatcatgagtttccgtgtccaactttgatagtccgttttatttgaatttttttataattaatatttttgtagttatgagatgataaaacatgaataatactttattcgtgacttatgtttttaatttttttttaaaaaaaattaaataagatggacgatctaatttaaacgtggaaaatcataactgcacttaaaatgggacggatggagtatttgattttacgtgccactaaaattcaagtcaaactgtctccagaactaaacctaagttttggatgtgatagctttgtgggattgaaatctttagtcttttgattagagtaaatgtcataattgtggcccttgctgcctctctatcttttaaacttttttagtttgcaagatgcatgagaaaatcatgcttcggacaatgagttttcctctaacttagtggaaataaggatttcggcacaccgggtgacatgaaagtattattggtatgctatatcaatataaaacaacacactattgttgttcgttaaaaaaatattgtcgatatcaacaactactcaacacgtcaaatattgtgagagttactgacaaatatcggtttagtgtcaacagatattagatctttagatcttatacccataagtatgcatcgtctcattttaaccagtagatttgctccggtccaataaaaggtatctcgaagtatcatacctcatggtaccaaaaaaattattttcaattgttgaatctaaccatgcttatcctgtctagctaatccaacgatcggaaacgatttggtaccgtgaggtaccggtaccttaaaataattttgctggaccagaacaaatctcttcaaacagacacatagttcctcaatcgtttccttgccgaatgccgagtagtaccgacgtattcattcaagcatgcgctcgctgttggaagacacgtacggcgatctcaaatactagtatttcctgaccagcacgacgatctcaaatactagtattccaccggccagctagcgtcgggtggccgctgcgcgcccgcctgccggccacgtcgcgggcgccgactcgtccaccagcatcaccagccttatcgatcagtgccgtccccgggccccctccgccgccggagtgacattgtcgctgccacgcctgccggctcgtgtttgattgatcgggctattttattgctcgcccagctggacacgcgcgacatcgcacgcaaaacgcctggcctattgcacgcgcacactgctacgcttcgactccatcatatcccgtcggtggacgatcgatctgcgtgttacccaagttagcagcgagcaaatcgtccgtgctgatcgaaacgtgccaaaacggggaaggctaactgtactacgcagtcgcatgtgggcgcgcggggcggctcgaccgcgcgcggagcggcgccgcacggcacggaacggaagagatcgatcggtcaaggagcggtagagctgcgaccgggcgcgcggatatgcacatatgaacatccgcgcaatcattgaagacacgtatgtcctgcggccgccgtaacgtggcccgcgcgtcgatccggcgccacaacgacgcctccgcgagctccggcccccgatatttcctttagctagagcccgctttgctgggtgccgtgggctagctcactgcgaccacagacgcgcgcgcctcccggcccgggaccgcttccgcgctacgtctactacgacgacgtactatcgtgcatcccctatcagatcagatgcgtggttccacctctcgtcgaccaggacaaacaccgaagcgcgccgcatcgtctcatcaggaggtgatcgaaacgcgcacaggtgtcccgcgaccgcacgaagcggccaggagccattgatgatcccacggcggttgtcgtggagtaaggacggcgccgagacgaccggtcgcgcgcgcgccgcggcggttgattggctctgggcggctatgatgaggctatttgactatcaacggctctcgtccgcgccctgcacaccgcaggcaagagcccggacaaagcacgcattttggcgcccttgaggccttgactccaaagttagatcgcaacgtagccgccccgcgctcgcatgtgattcgtgaccgccgcgcccgcgcgcgcgccgcggtggggtgctacgtgcaaattccctgcccgcgtgccctggacggcgccgtgccagcaccgtgcggctctctcgcacgtagttccgcccatcaacctgcaaaccttgcaggctttctagcggcatccgccgccgtgcatatcctgagacgaaatggcactgcatgtatgtgcaactaggataccaccacggacagtttggtcccccaagaatctatccgaatcgcacactcatgctgtgcttcagccacttcccgatccaaattgggctcctgcccccgtgggacctgaccaccgggtctcatattcctcatagataaacttgtttagatacaaagatggactggtagctaccacactacaggacggaacagaatgcataattcacaaagggtagccccccatgcatgtacgtaattgtcctttgcctgcgagaaaatatcctgtcaaatcgcactataacattttaatattgtgcattgcatattcgtttcacagaatgctactactactgatcaaaggccaagtttcatttgttctcttacgtgaagcatgagtttgtacacacatacatgtagcctgttggtagcttgggccggtacactgataatgccgtcataattgaacgagaacaagcgatcaatatcctcccctgccggcagcatggcgcgttgcaaacgtctagaaggcaatggcctcatctgcgatgaccgatgaagaaataggttgagtatacgtttataacgcagctcattcgaaagttgtgtgagattcagattcagcatcacaactgttagactatattacgaaatgcctgccactccttttacattatattgtatactaatatagagcctcttttacatttgctcatagcgatgaggatacgttggattaagaatgaacgcaaatgatggttccgtgccacttgtccttttgcttgcatggagtcaggaagagattaggaacaaccgaacaagagggtattttcaatggtccacgtgtccagaaaccatggcagatattttgttactaatagtttccacagtagactactactacacctcctcagcgtccttccctaatacacatatactagtagtattcagtttcgagttgaaagattttttgacgggatgagttgaacgactgaatttggatttgatgaataagagatgaattgaagcacaccctcacagctgtcccatcacatgcaaaggtcaacctgtagatctgaatgcacatgcctttgaatttctgattaagatgttaacctactactagaactgctaccatccgatctttttttgcccgaatcaaaaaagagagaaaagagaaaaaaatatgcttttatttttctcagaagaaaaaaagaggggtagagctgcatgcgcacgaccatttcgcgacggactaacggtttgttcaacacctgtcattcccatcatgagcaggttaagcatttcggcacgcattcctactttgcaacctgctttagctagccgcggtcagtgataccggcaaaaattcccaagtgatgtttacttcgaaaaaatagattattcacgcatcaataaatcataaaatgagtatcttacgatggactcaggaacaatcggtagatgtgtttaccgacaaaaagaaaaaaaaaacaccgccgcaccggacaccaagtaattaagcagaacagtgttcaggccagtatgatggctggttggggatgatcagaggaagcggccaaaggagagcagcattataggagcaggagcaggagcaggagcagcagcagctgctgccggggcagtacgtagtacgtacgagagcgcgtacagtagctgatggtgtggaaacagggcggaaagggagaggtgagctggagaaagggatgattctctcgcgcgctggccagaagagaagagaggcccatttagctatcactgtattggttaaccggtttaaccgatcagttgattaatccggctctctcgcccgcacgcctttttccctttatttccgtattgattgcgcaattattcggcagcgtctatctgtctctctcgcgcgcggaggcacccagctcggctattctagcgcgtagtggtggtgctagctactagtagtagtagatttttgggcagcaagcggccgcagaaaaggagagcgaaacggaggagaaaccgggaaactcagctcgcggccaatctataaatagctgccacccctctcgcctttccctccacaccccccccaacaacaccaccgcccatttccctttctcttcctcttcttcttccttctcctcctactcctctgcgattgacaaagataagtgaagtgagcaggcgccaatgggtgcttttcttctgttcgtgtgcgtgctcgcgcctttcttgcttgtctgcgccgtccgcggccgccgccggcaggcgggctcgtcggaagcggcggcgtgcggcctgccgctgccgccggggtcgatggggtggccgtacgtcggggagacgttccagctgtactcgtccaagaaccccaacgtgttcttcaacaagaagcggaacaagtacggtcccatcttcaagacgcacatcctgggatgcccctgcgtgatggtgtccagcccggaggcggcgcggttcgtgctggtgacgcaggcgcacctcttcaagcccaccttcccggcgagcaaggagcggatgctgggtccccaggccatcttcttccagcagggcgactaccacgcccacctccgccgcatcgtctcccgcgccttctcccccgagtccatccgcgcctccgtcccggccatcgaggccatcgcgctccgctccctccactcctgggacggccagttcgtcaacaccttccaagagatgaagactgtgagttcttactgcctaactcctcttcccactctgctttgctctgctctactctgctttgctgatcgatccgatgtgtttgttgttgatggcatatacaacagtacgcgctgaatgtggcattgctgtccatcttcggggaggaggagatgcgctacatcgaggagctgaagcagtgctacctgacgctggagaaggggtacaactcgatgccggtgaacctgccgggcaccctgttccacaaggccatgaaggcccggaagaggctgggcgccattgtggcccacatcatctctgcccggcgcgagcggcagcgggggaacgacctgctagggtcgttcgtggacggccgcgaggccctcaccgacgcccagatcgccgacaacgtcatcggcgtcatcttcgccgcccgcgacaccaccgccagcgtcctcacctggatggtcaagttcctcggcgaccaccccgccgtcctcaaggccgtcaccgtaagttcgcctcctcatatctcatagtatatcaaagtccttgatggtgaggctgaccgcgggtgccatggatggaacaggaagagcagctgcagattgccaaggagaaagaggcgtcgggcgagccgctgtcatgggcggacacgcggcggatgaagatgacgagccgggtcatccaggagacgatgagggtggcgtccatcctctccttcaccttcagggaggccgtggaggacgtggaataccaaggtgagcagcagagcagagctgtccggtggcagcctgtccgtccctttcgagacagcctcgcgcttctcttccgctgcgagtgaactggaccgaatggggcagactggttccttaactgaaatagactaactcgatcagtcgtcccagaatctaacctcgttcgatcgtctgctctgtgcagggtacctgatccccaagggctggaaagtgctacctctgttccgcaacatccaccacaaccccgaccacttcccctgcccggaaaagttcgacccgtcccggttcgaggtcagcatcacgaacccactcttccgtgtttttgttcccttccctccctttcctttcccggtgcggccgacttcctagccaagtcggtccgcggtttgcgagcagtggccggtatgggttttcctgaccccgcgtccgtcccgtcactgttgcaggtggcgcccaagcccaacacgttcatgccgttcgggaacgggacccactcgtgcccgggcaacgagctcgccaagctggagatgctcgtgctcttccaccacctcgcaaccaagtacaggtggtccacgtccaagtccgagagcggcgtccagttcggccccttcgcgctgccgctcaacggcctccccatgagcttcacccgcaagaacaccgagcaggagtgaaaaccgaacagggagacaaaaagaagaagaagaatactagcatcagctaagctggggaaagctggcaaaaccaacatcaacggcgggcagcggcgccacgcagcgcgcgcgagtccattttcgcggcggtcaccgtccggggggacacctgttggcgccgcagtgggagcgggagaccgaacggtggattccgtattagcacggatcatcagagtccttgtacagattcttcagctaggaccacggttggcaatcgagaggaggagcagaggagttgatgaaaaaaaccaaacactacgtagacatctgagctagggagcgccacaaagaagtggcccttaattgtaaaaccaaccattttttatccttttttgcttagttttttttttggccaacaactataggagaagagtagagaagagaagagaaattggggagaaaatacagggaggatgaagaggccctgattgggatgtaagctaggttgcccgcctgaaagcaggctggcatgcagatgcagctataggtcgaataatcgaggcgagcgatgatggacggatggatcgattcatcgatcgccagagtcaaaagggaagaacgtcgtgatcccccgcgggctaagccaggccacgggagagcgactcctctgtaccgtttcgtccaactcaagagaaaatgaccttcttgagaaaagtattgaattgtccctatacacgcgcacacaggaattgctacccagcaccctatattgcagttgagcaagcgattttttcgatcacttcttgtgtgtaagcatgcatgcatgcttccaataaactaattctaatctgcagcgtgatccataaaaatatcggttggactttgggataggatactacccgagtcaaactgatggaatgatgcatattgtggatgatgagttcttttaaaactaaactaaaactatctgttgcctctctagcactggaagggctagctctttgtaccacgtctgtgatccatctccaatcttaaggttctagaagctaactttggatgccaatggcatgttcttgattctttttataaaaaaaatgaatatggaattaggagatgattgaaatcaaattgttactcttggtctaaatgttggctccaaaacaacccaaatgcactatgatggtttaacccttcaaaatatttcattttgttaaaaacaaccataatggccaacaactactaagattgtagcgggtaatgttgctcccattgggcacggtggcattggtcaagcgtcgatgaattaggccaaggtcgcgtggaacaacaccctagggaattgaaacaacaaatataatgttggcatcacatagaattcaaataaaatgtggttaatggagttatgaaattcttccatcgtgtattcgtgttgctatacaatcatatacgcatgggagattggatgagaacaggataagtatttttcacctcggacgaacacatgcaatttggttcccttgatagaagttccagttgatttatagaggtatcaaaaatggtttacacttaaactcacctacttatccgtttaccatgttagctgccaaggggtgaaatcaagtttggtacgtcagctcatcgtatttccgtatcttagcccatattttctttcggagttagaaagtatggatagagtcaataatctatcactcagtaactcgtatcctatttcatatttgttgtttagataatagtaccacatatctatttttctctctaatatcatccccacgtttcaggtcgggtgagtggatgggtatgtggaaaatacttatcctgttttcatccaatctcccatgcttatatgaactaacttaatcaagttgaaactgagcttttctagtgaaacaacgatgaagtttggatgataccataattctatccctatcgattggattagactcccctaactttgtgcagtttacagttgtgacactgatatgacaatgtgagaggatctgtttccctatcgattcgcccaccgaatctcaaattaaacatggtgttgacaattttcttgggatgaactttggaagcgccgtagtacgtacagcggtacagggttggtgaccgagtcgagtgattgacttttggagatggaaacaagcatacttaaaaaaaaacagagagacgcttaaaaaaacagaggtgcaaagagccaaagagagatgcagaggaacagagcgaaagcgaagtttccaggaaagcggaggccgaagtctcctctccctctaatggcgagacagatggaaccctatcctctgtgccaattattcagccagccgggcaggcaggcaagcggtcacgagcccggcattattcagttgcccatcgatggaattcatggatggacaccgatgtggtattggtgagtgaactgagcccaatcagtgacaggcaggaggcagctgcgtgcgatagcgcgcgcccggccgggtcggcttgcaatttggcctttgcctgcccatttttttagtcactgcgtgcgcgcgcgcgtccaccgatgatccatctggaaatgtgccttttactacaagtatgtttcggactttcagtgttcgtgtgcgcgtcatgcatgcagggggggaggagacgctcctgctgattggccgctagattctctgctcttctgctactggctaatataatctcttcctttcctagccattcccgggctgacacgtcagcactggtcagccaggagaggcttgacgagctccccgttttgcctaatcccatgtgctagtgccgtactagagactagagttacgggttgtcaaccgtgtgcatgcacttgcaatatagtatcacccatggttgatggttgcatgtgctggaaggtaagagcttagtgttaatgcagtacttctggtataatactgtaaaaaaatgggtgtacacaccggagaaaacgagtgggaggaagaatgtgacaagaaagtgaaaattgcagcgaacgtattggttaaatggaggacaaatggctacaccgggtgtttttaggaacacgctatttagttatgttgttgtcgcatgagagttacatatagtaattttatagatggcagcgcatgagtagttgctaaccatgtttcttacgtggcgtgaagtttgtgtcataagatggaagtgaacctttccacttccacacatcttgcattaattattgatcctaccatatggttcgttcctttttattaagtgacatagaggcagcctctttgagatgtactttgcggaaggtaaattatgtatataatgttattcacattcacagtagaaaagtgcacaccaacaaaaggaaaagaaaagttaatgcccgaaggtaatgtaaagagacaatccattatatgccact

SEQ ID NO: 28350 - DNA, 1128 bp, Oryza sativa
ggcctgttgtcgtcaggcacgatcatccaacatgagtggttgtgtgctattgattcagctgtggatgtggttaagactaccggttggaaggcttaagtggaggcaaagctttactccttgcccctacaatgagccagacatggagaagacagtggcctacctttttgagagtactaccactgcacatgctcaccgggatgtggcatacaagcatcatgtcaatgagatggactgcttacagcctcaacatgtaaatacttccaatatcacttctagttagacatttacttctttaattgatatactaaccaacgacatctcttcaacttttgcagattgagtggttaccatacatacaaatgaggcttcaagcctgaccctgaactcgatgtgcaatcgagactctgactacttcatgtaccagtgcccattgatttgtttttgggcagttgagtaccaccttccgcaccgtgtcatgcgaaagttcgggaagaaacaagactggccggttgaggacatctcaactagagttgaattacacaagtaaatatttcttatctttgtttgctttcattgtcaatgttcaattttgtaccatttaacccttgtcgatgctcactattgtttcatcaccttccacttgtctaggtatgacagggtgagaacaaagaaggtgaaagactgggggctagagcataacagatacattgatgaatggaggacagccggaaggaacgacaggtacatcgagactatacaccaaaatcatcttttctcagagtaccttcgttggctgctcctataatgctgctctcctttggccgattgctctgatcattcccaaccaggcatatactgggctgaacactgttctggttaattacttggggtacggggcggcggagtttttttttttttttgtcggtaaacacatctaccgattgttcctgagtccatccgaagatactcattttatgatttattgatgcgggaataatctattttttcgaagaaacatcacttgggaatttttgccgtatcactgaccgcggctagctaaaacaaggtgcaaagtaagaatgcgtgccgaaatgcttaacctgctcatgatgggaatgacaagtgttg

SEQ ID NO: 28351 - DNA, 561 bp, Oryza sativa
tgcaagcagctcatcatggaattgcatttcatgaataatttaaatagaaaaatgtttttaaatcctccttttggctttgggccgaaagacggcccaaaacctctctctttctctctccctccccggcccagtcggcctagtccgccgcgccccttcctcctctctctcggccgctgacaggtgggtcccacctgtcaggttcgtctttctcgcgccgccgccgccgcccgaaccctagccgagccgggccgccgtctccttccaaattcggccgcgtctttcccgatcgggtgaaattgattgagggcaaatgatccttgagatctcctctatcttttctcttatggaatcatgagctaattcgggttggaaatccggggattcgagtttgattcggatcgatctctctcctctaacctaaatctttccttctcgccgccggtcgccgtgggcctccgccgccgctcgctagcccctttaaaaggacccccgagctctcctttaaccgccgccaccctcgctttgcctctcgtggcttggagcgccctagcgccgtgccgc

SEQ ID NO: 28352 - DNA, 7195 bp, Oryza sativa
ctaaacaaacactacatttaactcaccagatcaaaaggaagcccaccaaacagaacccagtttttttgacggtgaagaaatcctgcagaaaaaggtaaatatgaaaggacactaaaaaacaacttgcaagtttggtggagtggaaggaactggatgcaggctgttataccttcaaattaccacacatcgattgtgtgagtgcagaattcaggattgtattccagaagatagtgtagtttagcagaaaagctagcatgcatgagaatagcagcaccgcctacaatcggaataacatcatatgatattgatagctttctgaagaataacagaagttggatgtgtcactcctccactgaagtgaacaggcatgattgggtttttctttttttaaaaaaatggtgcacccagaagtgctggaatctttaggtgtctaaaaacattacagataaaaggagggtagatattgcacaaataagatcagtgatgaccatggttctgtgaaatctgtacctgaaacccaggggaatagaggtagggaaattctatagccttcttaggtcaccctgaatatatgtcagaaaaagtactgaaggcccacagacaagtcctggaatccaaatggataggatatgaatgctaaggcaaatatggtttaatctggatattatgaatatgaaacaggtcatcaaaataataccgttgcaccacatcaggccgaagctatttagaccactagattttcctaaaacaaaacaaaactgctggttagaaagctatgtagtttagaatgggattgtatgtggcaaaactgaaaatgaaatgttacctatacggtttatagtagcaaggtaaacagctggtgtaatgttggccacaaagacaatagcatacccacgagcatcaaacgacaggtctcgagctccagcgataaatgctccaaatacaatcaaagccacgctgacaaacccatggtaaaaaaaatcagaaagtaaaatatggcatattcagaacataacaatgttctggaaatttttagcgtaagaaaacaagtgctacaactgcaaccttatttcaagctacaaaaatacaggtacaacagttagcaataggctacagaaaacaaaaaacagcaacagatactaattgctagttcactgggatagactaataatttcagggtttccaaaagatggaaataatatatagaaataaataagaaagcatatgacaaaaggaagcttacattagttactagcacgtcagactattctgagaatattacgaatttataatacagtaaaaaaaaggaaaaatcatttttatagacatgtacctgccgattataggtggcgtatgcttctgttttgccaagaaatactccattgtcattgtaaagactactgttgtgcgcctcagtgttgtatacatcggaacattgactccacgcacagattccattgaagctaacttttaccatgatggaaaacattactcaggattcaattcaaatagaatacatgcgactaagtgtatttaataaatgtattataagtgaagaaagaagcataccatatagagtaaataagccaaagaaagaggtgtagtacgcaacagtattctgaacggaacgaagaataacgcatcagaaggcacggatggctcgctatttgtaaatgaaattatctttagccgcctcagaacataaagaaggcctgttgagcacaccatctgcacatgtttattaagtgtcaaaaaaaaaaagaggcaggagatgcgagcagcagattacatatatgcatcaagaagttcatcaacagtgatatcaaataaaggtatgaaaagacctttagcaatatccattgctaagcagatgctcaagtaagggtcggaagttcagaatgttctttgattagataaaatcgaatatgtaatgttttgattatgctatcctacagtttatctcctagactacaagcaagttattcatgtgtaaatgtgtaatgcacacttgcacaacataacagcaaagccagactttccagagtccatccaaggggacatgagaagtacctgaaggagcgtaatgacatttgcacaggggaaattatatgaagacagtgctgctttgttaaacatcactagcaacactgcggattgaaaagttgccaaagttagtaaaatgatacctgagatctgaaaaatgaaaacaaatgtagaaagaacgaaaacaagatgtccgtatgtgaaattaagtgactaatccctgtttcataagaacaccacctagctgactatctgtgttggacaactaagtggcataatattggattctcaactcaatcatcaccaggttttcaacctatcatcgacatgctatctgcatctcagagatctctatcgattttgattgcttcgcagatctgccatcatggccaaacccgaaacaaaagtttcagaattttcaccaaacgcagtttttctcttctaaaaggttattatccttgtagattttcactgaaacgctgacagtaattactacataatgatgtttgtacagccgctgaccacttagcacctcctgtcctagtatttaatgttgaagatgcaagcagcctcccagacccccggaacacatccgtcaagtgaaacccccacgaatttccaagcaccacgcagcatgtactttgcgtgtaatgccaaaatggatgaacttttttttctgaagttgttggacacaagtcaaccaaccggccctcttcccaaagataatcgaatccaactgaattaacgaccaaaactgaaaccaaaagtcacctagtagtagtacaaattcgtgagctgaacccgcaggaaccccaaccacgcgctaccccccaaattcgcagccgcatcacgagacgccaccctcaaattctcgctaacgacgaccgcatcccgagacccagccgacgcatcagagaagaagaagaagaagaagcggcgcggatcgggggaacgtaccggagcaggccatgtaggagagcgcggcgaccgcgccgcgccgcgtcatggcggaccccttgaacagcgcggcatcgtcgccgccgccgcccccgcccccgttgcccttccccgcctccgcggacatcggcagcagcgccccccctcccttcgccatctccgccgcccggatctcccgccccccgaagcctccgccgccgaggaggacgagcaccaccacgacgacgacgactcaggaggaggagaagtcacgaggatatttctaaacgagacgcggtcagcccgatccgacggccagcctgcctcgtccgcgcggtcgcgatgcggaaaacttcttctctctccgccttcctggtgcccgagcgtggccagcgcggccgccgccttttttataatgaagtggaaacgcttttactcccaccgtcccataatctcccaccgtcccataatatagggattttgagtttttgtttacaatatttaaccactcatcttatttaattttttaaaaattattatttattttatttgtgacttactttatactttaagcataactttttattttatatatttataaaaaaaaatttaaataagacgagtggtgaaaaaaaaaaattaaaatcacttataccgtggacggagtgagtactacacaaaaattgcgccctctcgctgtccgcggcggccttcgcttcgctcgatgggcttggctttccgccgttggtgagttggtcacatcacatcatggatggatcgcatcgaccacgtcgaggccggaaaattttttggggggaaagaaaattaccagaaagccaacacgaggaggcagccctgccggctgagtggagtctcttatctcgacctgacctgcgaatgcgcgatgtcaccacaagccactgagagcaagtacaattacagggctataaaccagatataaattatattttaaaaagataaataaagaaagagaagagcagcggactatacatctgtagccagctgtaacacggacttcagaacgtaatgtgtgtataacaggtaggaccagatatctatctatctgttatattattaaaacagccttgaaaggaggcaccacgttcgctgtgggactagaaattctcacattaatcggagaaaaaaagaaaaatctacaccgttagatcgtagtggatctaaattataacggtgtaggttgatagcaatatatatgtagtacaattgtagtttttaaattataataagttgtggatgaaatatagcaatctactgctcatatttggaatcaggcagaatcggattatttttctttgatgaaaccgttaaggagtaggattaggattgcagccgcacgaatttttccttttctttaatgaaaccgttacggggtagaattgcagctgcccaggagccgagtgccgaccggcccttcatactctgtctggctgcacggctcctgtgcttagaattctagatttactgtgaaaagcataggctcatggtaaactaacacacgaacccaatacgagattaattaattttcagaacaacaaaataaaatctgaaattagcaaaaaaaaaaaaggaaaagaagagtttgagtagaaatacaatttaaaaataactgaaattcgaaattaaaattatgcaatattggaagaagagtctatataaaaacccaatacgaaaatattaaaattcggaataaaaaaatagaaattataaaaaagaaaagaaaagaagagttcaggtagaaatacaatttaaaattaactgaaattcggaattaaatataagcaatattgaaataagagtatatataagaacccaataatactaattaagattcggaatgaaaaatagaataaaatccgaaattggacaaattaaaaagagagttcaagcaggaatataattttgaaacgactaaaaataaaaataaaaaataaaaatattaaaagaacacaatacgatattagttaaattttgaaataaaaaataaaataaactctgaaattataaaaattaaaataagatttaaactaggaatacaatttataaataattaaaattggtgataaaaaataaagactattagaagaaaagatcatctaaaacacatgacgggattaattaagtaataggcctataaaagagtagagtggtggcggttgatgggatatctaaaatctattaataaaacactaaatagaatgataatgggcaggtcgtgaagcaaccggtctaggcggttggtgggacttcggaaagtaaaaaaaaaaaccaatgataaccatatttgatttttaaaatctcaatgataataaaaaggagaggcggcgggagggtcatacaggagtacaatggcagagccgacgatggttggttagacttctagaaagtaaaaaaaatgaattccaacgatagttatgttcgatttttagaatcccaatgataataaagagtaggcggcggacgggtcgtagaggagtatagtggcagcgtttgacgagatttctaaagattataaaaaataaaatccaacgagacaataaattataaaaactataaggtccaaatttaaaaggttcgggcttatgaaaagtaaaaaaaaccaatgataaaatctcaatgagagtaaagaagggaggcagcgggcgagccgtattggagtacagtgataaagtcgctgacgttttggtggaacttccagaaagtaaaaaaaatgaacctaaacgataattatgttcgatttttaaaataccaatgacaattaagagaagaggtagtggacgggccgtagaggagtataatggcagcgtttgatgggacttttataaattataaaaacaaaacccggcgggacaataaactctaaaaattatatgatctaatttttaaatgttccaagaagaacgaatagaaacagtgctagatcgagaaagcaaataaaaaaaagatatgacataattaaggggtatcaactggcgtgtgacttttataaaaactataaaattaaaaacacagtgatgataatgtttggtccaacgagataattatttaataaattttaagtaaaattatattaaaaatatataattttgtatgggtgttagccgcgtaattgcgcgggtcacccagctagttaatattgtagtaagtaattattatatgtattagcttttatattaattatagatgatttgaagctattagttggctgtaatgttaaacttgctctgatggctcgctcggtcgctacgcgcgacagtatactaaacaagcaaatcgtatctacgcgacgggatacgtcgatccactggggcatcatccgtcatgtgttgtgtggcttttgacggggtgatgggccgggctagatagagatggggcttgggctggcctggttcgagtgaaccggccggggaatcgcgtgtcacctcgagatattttaaggggcagcgcgttactcctatccttttctactgctagttgctgtcacataaacgagcaaatcttggggatatggtattggtatccactggatgtgtgatcaacagccttctgcttttgttgttcgagcgtttcgagtgtttgcttggattagcagatctgcttagtaaggtaaggcgtcatttgccgatacgaattaggcattgttatatgatgtacttccggttttggttgatgcgtttttgctttgagcgtcattgaaccgagcaaatcctgatagtagctgtcacctccaaattagtacgccatcatggtgtgtgatacacctccacctttgggtagtgcgctttatggagagcagtaatgcgttccgttttaagcatgggcaaacggagcaaaacattgtatcctcataggtagaggttgttactaaatctaaccgctttaagcggttaaatgaacggtattgagaccagacaggttggtgcatggtaatatcattggtggagaaaccatctttcctcccggttcgtaacccccatttaattccagttatttaaccggggctacaaatccgggactaaagatcgctatctttagtcccgggtgaaataaccgggactaaagatcgatctttagttccggttgttaacaccacccgggactaaagataggggattaaagaggagataacagcagtctagatgccccatccttttttttttcttttttattttctccc

SEQ ID NO: 28353 - DNA, 2942 bp, Oryza sativa
  unsure (1)..(2942): unsure at all n locations
atgaaaaggctaagagaaggatatgataggagttcttacttccaaacatgattacttcaatgcaagttacagcaataaatccagataaaatttcgtgcttctatttactgaaggatgaacatttggaactaatctcatggcacggaataataaacagctaatctgctcaacattctacttagagatctccagagttctacaaggttagcttaacaagctctggcctccaaataacctatgataatttcaatggacctccaaacatcctatagttgttttaactcaaacaactccatccacaggacaagcagtgtaagtaaataacatatttgtactccagccgagatcttcttcaaatggcactccatgctgagagtgacgaattccttcgaaaagtaaggagaatgtcactgggatggctctatctaatagggcaacatatcctatgcacacaagccctcacgtgtncacacgtgcacaccaactaaaaaatgtcaccaaaaaatctagaaaaaatcatacacatactttcaattgtattacacctagggttaaaatcttaacgtcaaattcattatattttagccgtaacaaaaaaaaaaaacaaaaaatctgacagttttaagggtgcaattttgtcagaattttatcttttttgttattctctatgtagaatgaatttgaagatgcgactttgcacgtagatgtaatactattgaaagtacatgtatgaatttttctagaattttttgtgataatttttagttggtgtacacggtgtgtacacgcgagggcctgtgtgcataggatacgctcccatctaatagagcccgtgcaattcggaggagcacataacaaaaaaaaaaatgtccaacctaatgacaagcacctgcgagctacgaacctatatatggcatttcttctgatttcatccacccccaatccccaaatcccatgaatccgcatgctataagctagtaaaatgaccaaaaaaaaaaattcctcaacccgagcactcaattcaacacacacgagaacaatcagtgcataaaccgatagaatctttcacggtgaatcgggaagagggggattattacgatgggaaaatcgaggggcgaccgccgcgtaatcttctcctcgtcgggggccgcgcacaccacgagcgcgtcccatcttcgccgcctcctcgaggggaccgccgcccgcgcgagggagacggaggccaccgaggccccgaggggcccgggcgccgccgccgccgccgccaccggcgcagcggcggaggccgaggccgagaggcaccagacggacgccatggtgaaggcggcggagctggctctcttcgtggagtggagaagtcgggttggaattggggtttcgcgaagtggtggtggacttcttgagcttttcctccaccggaggctggctctctctgagacgagaccggctccgggcgataagagtcggcccgtgtacagtaccgccgacttgctgctgtgcggagtttgctgtgctgtcttagtgtcttgccgaggctgagctggtggagaatttctgcggatgcacgccacagatggagaaatcatgtccatgtccctcggcctaaaaaaccatatttgcagaaacgcccgtgaagagggtaaatactaaatattgtgtttatatcatgttcatactatgtattctcttcgtttcgtattataagtagccttgattatttttctagttaaactttttaagtttaatcaaatttaaaaaattagcaatatctataataccaaattagtttcattaaatatgacattgaatatattttgataatatgtttattttgtgttaaaagatattattattttttttctattaactcggacaaatttaaaaggtttgattagaacaaaaattaaagctaatcataatattaagggactgcctatatatatactagataatacctcgcgcgttgctgcgggatatttttttgcatgacctagagttgtaaacttttagtaatagatattgaccgaaagttgtttcatatagtctaatgttacatgataattaatttgaaaccctgatgtttgtagcagtgaattgtgaagatgttcacctagaataatggaagttcttaattaattagcagcttatttgtttactgaatcacattcaccagtttgttatattcttacgtcatgattgaatggttagcctgattaggttgcaagcaacttctgagctccagccatacgtacaacaaatgaacctgccatctacagtaaaaaaaactcggttagtcgagcaacaatgtgtaggctgcatgtgaagttaacggtgtgtaattaacagtgtatatattttcaaatatatataaaaaatacgtacaacacactttgaacaatagattaagtaaaattctatgggaacatttgaaagggtcagttaagttttacctcgtaatgcagtattgcactttattgagtaaacaaatagctgaaaattttccctagtaaagcttatacatttctagacttttttaaactaaacaaaaaacgtgatatttgcaggatgaattcagaaagagaaaaaaacaatccgtaaaatagaagctacggagaacgaatactaacacacttaactgatggatagtgaaatactgaaatacctgccctgtactgcagatgacgatcagttgcacttctattttgtgtattgatcaaatcatgcacttcatgcaattacatcctttcactacatctgaatcacctgataataatatggtaaggtagtgaatcacctgatgatactatggcaagaaaaatgagaaacaaaggagaaagattagagcaccttcggcaacatcttttattatgaaaaggaaaactggattctcaaaaaggtgaaaaccatgacagttaaaggtagaagacctggggataataaac

SEQ ID NO: 28354 - DNA, 7272 bp, Oryza sativa
cccactcccacctcaacccgggaccttaacccgtaaggtcctcaaccggagtctagggtctcgtcggcgctgaagaagaaagaaggtcgccgaagttggaggagaaggcctggagtacgaatcgcaaagttcatccggtggaccaaaatctgcaagtttttgaggtagattttctttcaacagatcgttagcattcccataatattaaatggaggaagcactaaagtgatgttgtgtaaaaaggatggcgattaagatacagtgatatatggagttcattcttcacaagtagggatggcagtcgggcatgacaggcacgggtagagactacccatacccgtgcccacgaggtaattcatgcctgcgggcatacccgttactatatgacgggcaaggaacactacccatgccccgttgcccgcgagcgccatgtgcccgcgggcatgcccatttacccatcacaaactcacagttcaacatttcaaccacaaatctccacaagcagagagacattatcacaatttaaagaaagggtagagttgtaccaagttcaacaatacaagcattacaagttcatcaatactagatggtggcatttatactaatttgactgagggaccacatgtcagttgattttcgcgggtaaacgggcgaagcgggcatgggtagtgactacccatgcccgtgcccgtatgcccgttgggtataggttttgacccaataaaaaacccataggtactaaatgtagaacaaacccaactctattagggtttttacccatggataaacgggttaaattgccatccctattcacaaggtaccaactttggtgtttgggattattttagaaaaaatggtgttttcagggggcagagccagagtgtagtcaccgcctcaccggaagtctgggctggtcgacgctgagagccttttaattacttccgttgttaaaatcatcttttgaatgggtgtgcatgtatgtatttataagagtgaacatgcacgtgttacgagtgttcgtgtttctactgtgctcttgtaaaaaaaacagtctatactaggaagacgactcacagtggcgcagctaggggggtgccaaagggtgccaacaccccctatgcaaacactgccaccattacaccccatgtttttactctatattaaggttaactaagataagtatttatctaatttattttgtgtagcttgaaagtattatcagtttagttagttagcaagtctaaaaatattagcaagaaatatgatctacaaaattagtttgtgatttctcgtctttttcaaagtaaaatagatgatacttatttgtgagattattcaatattatttgtgagattattcaatagtttacattaaaagaatttagtaataaagagtagtttcatacttccaatgatattattaaatagctaaaattcaagtttttcttaaaggactactttacgcattacttgttattgatggtgactatttgacatcttttgctatcaatattagttattcgatctcatgatttatctttacccccacacccctctaatctcaaatcctgcttcgcccctgacgactcatgtgctttattagtgcgtggtgcgattggaattggtacgtttgctttcctttttcaactctggacattggccgttacagtacatccatcgctttgcaaagcgcgtcccgtgccttcagatcgttggcacaggccaggaccagccaaaaaggagaagaactgcatgcctatgttttcggttacctccgcctccgcgctggcgcgctgcgcttgtcaaccagggtaaaatctaatcttagggcatgtacaatgttctttattagtggtctctctctattgacatataagtaaatttgatgacatggaagaaagagaaaggagaaaaaagaaatatggttgttatgcacgacaacggcttagagtcgactctagcatttattaaagcaaattttgttacatagtggtgaaagaaaggaaagaatagtaaaaaaatattttgatacattaatgattagagtccatattgtctccaactattgtactccctccgtttcgaaatgtttgacaccgttgactttttagcacatgtttgaccgttcgtcttattcaaaaacttttgtgaaatatgtaaaattatatgcctacatcaaaatatatttaacaatgaatcaaatgatagaaaaagaattaataattacttaaattttttgaataagactatcagggttatggataccacatacctaatagtacttgactaaatctcggcaggatccaccacataccatatcttatatggaaactgacctcgagggagttccggataaggaaagacaaccagagttctacatggaaatgacaatgactactcggattgtatccatattggtttccctagttctacttggacaaggggacacctatgggtataaatacaagccccaagccccccttggaggagagaggacacgagagaatcaacacccaccatggaggatcaacacctaacacaatcgacatagaagcctacatacgccaagacacgccgccggatatcgacttcagggataagcacggctagtaccctacggtgtctccggatactgtcaggagagacaaaagcgctatctctgatctcgccgggcacagattcgaggaggaaggctaccatgttgtcgactacgagtcagaccttcaaaccgtcatgtcgataacagttagataggctatcccaaatattgtacttgtgtgattatggtgaataagagcaacgaccggctccggccaacaggatgtagggttattacctgacaattcaggggcccgaatctatataaaaatcctcgtctccgtctcgcatatatcctagcaccaacgatccccatactatgaaataccaggattgcaacatcaaacgtcgacaaagacgaacggtcaaacctgtgctaaaaagtcaacggcgtcaaatatttcgaaacggagggagtatgatgctagcctctaaatagcgtagagctcatacctgactctacttttatacatgcccttagcatgtaccgtctaatcggtacgcgtaacacacttgctatatatttcccgcgccgtggcccgtccgtgcctgccgcacctgcagtcctgcacacgcattggcccgtcaggacaccgggcggcggctcgacgggatgcgctcggtttccccccagaagagagcagcaaatcgccggcttgtggcatggtggcctttcgcctccgccgacgtgcggaccgcgacgctgagcgcggtgaacccgcgccccgcgaatgtaaggcgccggcccaccactgccaccccggtgcgtgacgacgggctgacggcccatgacggtgcggagcccatcgaccgagcggatgcgcacggatgcaacgcggcccaggcgcacgctgttgcgtgcgtgcgtcgtccctgcggttagctcgcttgctccgtgtccgcgtgtcacgtcacgtggtgtatcacccggttgcgagcgtcgtacgcggacgcggtgcgtagtacaataccaattctactacgacggattaggccggaatcaatggcccgtgcctgtcagcccaaaagattcacctggccgtgtaaagcgcctgccacctgcagctcatgctccgacggctgtcgcagggctcgcctgacacgtgttgagcccggcgacaggtatattcagatccgctacctagctagctttgctatcgggttggactctctgcaagtccggcacatgcatgatattcaaccgggggctcacacgatctcttaaaccgttcgtgtagattattagtcgtcgcctactcgcctgtagtactactccgagtatagattaattaatcgaaccgctgcaacgacactcgcgcacaacacatgcattcgctggacgtgtgcgtgggtgtgggcggccgggaggcccggacaccggacacccgcgcgcgtgcagcgaagaaacgcgagggccggccgcatgcacacgcacgggcgggcgcaagatacaggagcataccgacgagcaaccgctttgttgggtagtagcttcgtcgccgagagcacgtacacaagcatgcatgcatgtaaagaggtggtcctgtatagcctaattttgtctcagctccttggacggagccgtgcgacgaccctgtgactatccgatcgtaacccagattattataaaaaaaatcatatatatctaattaagctacgcgcgtaaccgagggagttaaacgtgtacgtgcaccgatcacaggtaggttaatatactgtacttagtaaaaaatcactgcgagggagagactaacatgtgtgtgtacgttttgtttttacttttcaccgctgcatgcacgatggcgtccggtttgacggtcaaagcttcggcaggaagcgcgggaaccgagcgcccggaccggtcctggcgcccaatattctactcgcgcgccgcgaatactctactggtgccgtcgtactacgcactacgccgaggaggatcccatgcacagtagcgccaccaccgcacacgcacgcacgcacgcacgcatatgtgtgtgcaccgcatggggaaccggcctgcccggctccccccccctcctcctcctcacgtgcaccgtggaaaacaccaacaccaagcatcccttattgcagaggaccatgccttgcatgtgtcaaccgctgcatctgcatgaggcaagacagtgagttcagcagccagccagcgtgagacaatctgcatgctgtgcccagcaaccgacattttcctctctctgcagggcagaatcacggaagctagccctgtgtatttacattgatcaatgctagattcgcaagttggtaggtagagagacctgctgcatatggttattcctcttctgcgtacgtgtagagctacccagcgtaattggtaaccaacgaggaatgtgaaaatagcgtggctgacaaacaaagcttgcgcagagtactgttggtaagtcctgccaatacacacacacacacatgatgggtttggatatgacggcaagcatgcaatttgtagttctatacctgcggagatagactcatagaggagcaagttgttggcagatggtatgatgatcgaggtcacctgttgtagctacttatatcccaatgaccagcctagccattagctaactatagctagttgcaagcgagatagcattattaacattctccctgtaatcatgtatatgcatggtcctggagctctgcacatgcacggctagctccccggccggggcgtgatatgagggatcgaggagaggacgggaagctggggctgatcaggcaggcatgttccgtagaaacgttcatggcactcctctcctagctctctctctctctctctctctctctctctctctctctctgcatatgctgcgtgcgtgtaggcactgttcattcctccgtccccagctggtgtgtgtgtgcatgcccggaagacaagggtgtgtgtccttgtagagggcacagcttgcaaccccagctcccctactttattcggggtcaccgtgacctttctttagggttaacctttctcgctctttggggttagctgggcgtttctcgatacggagagagagaagagagagagagagagagagaggagaggcccgagtgatgcggggaagacagtgggtttggatcatttgattatagtaccaaggaatgatcaagaaagataaacagtggagtgaatataatatgctcagagtgagattcacaccagattgacactttctgttctagtcttgcattttcagaatatagcaagtaggttttcaaatgtacctgtacgtgcatattggatagatttctttaaagagttctataagaaacattgatgcttttgcattagccttgaagttttacgttttcacctattcgcttaagaatttaatatctaaaataaatcacctcattttttttgaaaactatcaaatataactgtagtttaattgtagtataattacaatctaactatacaataaatgtatatattataacttagtttcatataacctgtacatataagttttataaaatttataatgtaattacactatagttataatgtagtagctgtgtaatacagttatagtacaatgcagtatatttatatttgaaaaaaatacctaaaatattgtgacaatttttagcaattcacctttgcttagagcgacatcgctccatgcaataatggcagaagaaccatctccactcccttcaggggggctctttttctattatgggtggccatctagataaaaaaaacttatgagagatatatggtgattttctctttcaatttgttgaaaggagttgaaggtttttgttccactcccttcttttgttatcgtaatatttaataaaaacaaaaaagtattttaacctacatatatgtaaattaattgcatattatgcctaacttaccaaatgccttaaagatacatagacgaaaacacaatagtagcttacaaacactcattgcacatatgttgaagtgtcacatcacgcaatccaaggggcatacaaatacacaagttagagcaagtttaatagtatagccaacttgacggagctcgtggctcctcaccgggagaccgcacaggcccccctttgccggttcggccgggggcttagggtgaaatctcaagctctctcggtatgtggaaagatcgccagctaggaagaaacgcgagacacgggcgatgtatacaggttcgggccgctgggaagcgtaataccctactcctgtgttttggtggatttgtgtatgaacaagtaacaaagtgtcaaccagcccccaatcgctctgggatcggatctggagaaggccttgtgtccaaaagtcctctcctatctaagtgggccaagtgtgagccaacctctcacttgttctaggttccgaatctggaaaagatcatcctctttccccatgggcaaggtcctccttttatacttcaaggggataccacatgcacccctccttttcaaactggacttttcttcccttcataaatggacggagatttgcacggttgccctccgaacgtccttctgatgggacggcacatacctacctccacttctgccgggggcaggcgcgtcgtgggaacgtggctgtgcgctgacgacatgagcagtgtcagaccggtcacaaatcggtcattcttgtccaccacgcgtcagcctagcaacgtgcatgttt

SEQ ID NO: 28355 - DNA, 18640 bp, Oryza sativa
tggtcacagaccggataatcgagtgcactgcactgtatttcatgcggcgtgacacgtttagccgaggcgcaataaatgcgattaggtgagaccccgctgtgctcacctaacccatacacgcggagtagaacccgcgaggggtcggggcgcctcggccctcgggggcgaggcaggagtggtccgaccgacccccccctcggggagaccaagaggtgggtgcacacatcaccctcgggcccgacgtcccccgagggtgccaggccacgtgggcgattgtgtctgcctcaagcctctagtcatgatactcccggtcccatgtcaccgacagtagcccccggcgttatgccagggcgatcgcccttctcaagggaagcggtcgggcatgacgccactcctaaagcctggtgacaggtgggaccggtctccatggttgggcaaaaacccaacggtctcaaaccatgcacatcggtaatggtaacttggctgtcaataatgggcggtctcttcaagactgccacattacctgaacagcgcacgaatctgggcgagccgatttgcttcgcctggagatatggtgatggtgcttttctcggagccatcagaatagcgtatagcatcttctgggcctgagggtatcgggttttggcgtcccggagggcctcgctaacaaagtagacgggccgctgcacctttcggcggggccgatcctcttcgctaggggccgcatctccagggcgctcttcctccgagaggcagcgcggggcgccctcggcttctgcgccgacgacctcggggtcggagggcgacaggcgcggccttcccgcagtggccccgaggctatcctgacaccgtcggacaagcaagtggagggccaactccggccgtcgggggccttgggccgccgttcggcttgggggcctctcggaccctgacttctccccgtgggcagcgctggaagagttcccttccggaaccgaggacggcgcacgcgcgcaggtccgggacgccgccgaccacatcgtccacagcttcgagggtacggcccctcggctcgcgttcgccctcgactccgacgaggagggcggtgacggtggtgcggacgacagcgacgacaaggctggtgacccgggcgcgtcagagtgagcccccaggcccccgccaatcttgaataactttttctttcttcttccgaggccttcgggcccccttcttgtatagactaatttaatctgcaaccaaataaagaggaaatttctatgtcaattctatttgttgtgtgtatgagacgaggatggtctatgcctcggtccttctgtgtcttggcttgaacaagggctcgtgcccaggtcctagtcctcaaatggctcgggtcggggctagtgcctggggagatccacatgtcgaggctggccaggccgggaacgtggtgaccgagggttatgggtgacccgattgtgggtttttgccgattcccccccggagttcaccacgtcccggggcacggctcggttctgggccccgtttggcgattttagccgacccgagcccccgaggacaggatcgagcacgagcgtgctaattcaagccaagattcttcaaaaggaaacaatggcacagacacagtccttaggaaatcgaaaatgcttttattgaaatacggaagagaaaaaagataagcccccggccaaccctgcacgccccggggggggggggcgcggggttggcccgagcccaagacctgacacccgacccccactaggggtagaagcgacgagggtgttcgatgttccacgggttaggcagctctgtgccgtcacccgtggccagccgaacggagcccggccgggggacgccgatcactcgatacggaccctcccacattggtgagagcttgctcaatccagcacgcgtttggacgcggcgtaggacgaggtcgtcgacgtagagtgatcgggcccggacgtggcgctgatggtagcgccgcaggctctgctggtagcgcgcggctcgaagggccgcgcgccgccttcgctcttccaagtagccgaggtcagggagcgtcggcttccttctttttgtcgctcgcaggcctcccctttcgggtggccagcgaaacgccctcgacgacgtggacatgaccctcatcgtcggaataggccgacctcttcttcctcctcctgtctcgccgccttgtttgagcagcagatccgggggcggccgaagctgccacaccggaatcggaggggttccaggtccatgcttcctccttacgagccactcggtctgcgagctgaaaaagctccgcagtagtctggggctctttggaagcgatcttttcgagcatgcggttgtgccgcacaccccccctgaacgcgtagatcaccgcgtgtgcagggatgcatggtatggtattgcggacttggcaaaaccgctgaatgtacgagcgaagtgactcatcatcccctcgctgtaccgcgtgcaagtccgcttcttcgcctgggcgcggataagtgccttgaaagttcatagtgaactgttggcataaatcctcccaagagtggaccgacgcaggtggcaggttcattagccaaccccgcgcctgtcccttcagggccatgggaaagaaattcgccatgaccctgtcgtcacccccagcggcctcaatcccggtcgtatagacctggagaaactcggtggggttgacactcccatcatacttctcggtgatggtgggccggaaccttgggggccaacggacattccgaagactcgccacaaaggctctacagccgacaccaccagccgggggcacggagggcaggtcctcacgtccatgtcgaggtgacactctggacgaagaggcgccctccgttgcgcggggagtacgccggctattacgccagcgctcgatgtcgaggcgggcatccggctctccatgctgatcctcccgagtcggaggtgccgacgagggagtggcagccgaatggcgtgcaacagccgccgctcgccgcgccctccgccttgacgacacggagccggtagtggcggcgccggaggtcttggtggtggcggaccgtccaccagcacccaggcgctgctgtgccgtcatgaccaagttggccacgtcgtccagccatcgctgggctggagactccgggtcagggacgacgggcgggtgacgtaggagcgcgccaacagcctgaagcgcgccctgaggcgtgctgccgtcgccgtagacgaggaggcgacgctccccatctcgccgttctcctgcatcacccgcgactggcgatgctgcggatttttcgacactctcgagcgcctccccctgcttaggattttggtgtggaggaggtgggggagtacgagctcgacggcgtgggtttggctccccgtcgtcgccgctcacactcggagagaggtcgtgcacctttgcttgctcggccattaggctgaacaagaaaaacttggcgcacacagaggagtacgagagctcagaaaacacacgatgagccccctacctggcgcgccagatgacggagctcgtggctcctcaccgggagaccgcacaggcccccctttgccggttcggccgggggcttagggtgaaatctcaagctctctcggtatgtggaaagatcgccagctaggaagaaacgcgagacacgggcgatgtatacaggttcgggccgctgggaagcgtaataccctactcctgtgttttggtggatttgtgtatgaacaagtaacaaagtgtcaaccagcccccaatcgctctgggatcggatctggagaaggccttgtgtccaaaagtcctctcctatctaagtgggccaagtgtgagccaacctctcacttgttctaggttccgaatctggaaaagatcatcctctttccccatgggcaaggtcctccttttatacttcaaggggataccacatgcacccctccttttcaaactggacttttcttcccttcataaatggacggagatttgcacggttgccctccgaacgtccttctgatgggacggcacatacctacctccacttctgccgggggcaggcgcgtcgtgggaacgtggctgtgcgctgacgacatgagcagtgtcagaccggtcacaaatcggtcattcttgtccaccacgcgtcagcctagcaacgtgcatgtttgcccttcttcacacaacatcttgcctgtaatggttaggatgaagcctggcatatatcgatcggggctaacgtgccatctctgggatgtaacacgctagctccagctggggacgagtgcctagaagctctcgtcttgacgggatggggcgaagcgtgcgtcagaccgcctgtcgccacctaacccgcgatttgaccggtctgtgactggtcacagaccggataatcgagtgcactgcactgtatttcatgcggcgtgacacgtttagccgaggcgcaataaatgcgattaggtgagaccccgctgtgctcacctaacccatacacgcggagtagaacccgcgaggggtcggggcgcctcggccctcgggggcgaggcaggagtggtccgaccgacccccccccctcggggagaccaagaggtgggcgcacacatcaccctcgggtccgacgtcccccgagggtgccaggccacgtgggcgattgtgtctgcctcaagcctctagtcatgatactcccggtcccatgtcaccgacacaactcttagctccaaatcatctatagccaatgtaattgtcaatttatacaatagttgcttactatactattaatatatggtcctacctgtcatacacacattacgtcttagagtctgtgctacagctggctataaatctgtagcccgctgctcttctctctctttctttatcactttaaaatatgtttatagctagcttatagcctgctattgtacctgctcttagctagaaagagtgcgtggttaattgagtcaaattaattttgtcttctcacgataaacacctatagaaaaggggagtgtccagattttaggtgactggaaattttaaataggtattaatagttgtattaatggcttatggtctgttaatttgtactccctccatctacttttgatagtcatatttcatcttggcacacagaccaaggataagtaattctacttattatcatccatttaaacatgctactccctccatctacttttgatagtcatatttcatcttgacatacagaccaaggataagtaattctacttattatcatccatttaaacatgctactcccttcatctacttttgatagtcatatttcatcttgacgcacagaccaaggataagtaattctactcatcatcaatttaaacatgatactagtcattcctcgtaaataagcgattcattaatatttacatttctcgatgctcatgtagccaatcttgtgtggaagaatgaagagtcatgcattaaatacgagaaagttattaagatgatagattgttgaattgaaatatgcctatcaaaaataaatttttcagatatgaaaatatgactatcaaaagtagatggagggagtactagttattcctcgtaaacaagcgattcattaatatttacatttctcgatgtccatgtagccaatcttgtatggaagaatggagagtcacgtattaaatacgagaaagtcattaagatgataggttgttggattaaaatatgcctatcaaaaataaatttttcagatttggaaatatgactatcaaaagtagatgaagggagtaatatgctaatttaagccacttatttatgcatggtgatatgttctaaactcttaggggatgtcatcactggttcacctgcacagttaaaaatgcaacacagatattttaccaaaaatcctcattttttttctaacatctcggtgcattaagattcaaaaaattataccatatcttaaaaaaaatcaactccatatttgtgaagggaaaaaagaagataattaaattgtgaattcacgaccttctatttcccttcttgtgtggatcgagttcaaacactccaatactttagcattccaactaccaaatgtgatcccatcatctcatcttccaagatcatgttcacacacaccgccggatcggagcggaaggtaaggtgggcggccggtttgcatgcatgcatgcaattgctaaaaccagaagtcgatggacgctgcaaaaacacagtcaatcaggcggctgggcatgcagggtcgtcataccagtccaatccagcgattcacctcgaaagcaccataattatagatcagcgggcaggcctaggcgcgcgcccttggctagccttgtgccctattatcggtggtgcccgccgcgctgcaatggctggttggaactcggaagcagtggagagagaacgagagagatgggccatgggcgcgagacgaacgacgatgcgcacgcgcgcgcgcgcgcgtccggcggcacgacatgtcagagaagagagaggcgggttggactgattttttttctgcacaggtgtgcgtgcgcggcggtttgaccggcgttgttgaggcagcgagcgtttcgtctctctctctatgctctcggttatttttttcttcttttctccggcgcgagcgggaatctttcgctggattcgtcgccgttggacgggacgaaccgtccgcgcgcgctaggacccgagcgtgaatccatccacgcgtgcgcgtgcacgtacatacgtcgtatatacatacatagtagtgtggcgatcttaacttgcttgcttgcgcgctatcggatccaagctctgatcgagtaaggtctaagatagattgattaagatccaaggatatgtcgtccctgatcgatctcgttcttgttaagcttatttattcggctagctagctctttcccgccactgcttgcattggtatatatatttggattgatcgagctcctcgatctacatgtcatgcatgtcgtcttttgtttgggttcagattcatactaattaaaaggagaacttgatccatgctatatagtactatatgacaataattcaacaaaacaattgtcatatcccgtatggtttatgaatgcctgaacttttcttgatttggtaggagttaaattgctctccatatgtattaactgacggtaaacaactgctagctccatccgttctcaaatgtgaacatttctaatatttttttgcccccttcagcttcagaatcctgacgaaacaaaagaaacataactacttgctagctaccagcacaacgtctaaggctctgttcttttggttgagttgggaacccatccctccggtacggaaaacgaagcagtccattagcacgtgattaattaattatttgctaatttttttttcaaaaatggatcaatataatttttttaagcaactttcgtatataaactttttgcaaaaaacacaccgtttagcagtttgaaaagcgtgcgcgcggaaaatgagatgggggagttgggaactccaggaaacgaacagagcctaagactagtcttctgctatactctgttcttaacttataaatacaggcctcctagaacatttcccctcctctcaggtggccaggatattttttttcttggcctctctctcctgccatcttcacattgacccaaaatgtagtgcatcccctggaaaagctatacctcccccgtatcagcttccaacttagtacatccctcctctcatcctcaccaatgttttcactgctgctctgatcatcagcaagaaaaccaatcccactgttctatcagcttcttctccccctgagatggcttctgcaaacaactggctgggcttctcgctctccggccaagagaatccgcagcctcaccaggatagctcgcctccggcagccatcgacgtctccggcgccggcgacttctatggcctgccgacgtcgcagccgacggcggccgacgcgcacctcggcgtggcggggcatcatcacaacgcctcgtatggcatcatggaggccttcaataggggagctcaagaggcacaaggtatgcatgcacgcgtgtgtctctcgttttctagtagtacatggagtgatgggtgtttgatcttgatatttgatgttaacgcagattggaacatgagggggctggactacaacggcggcgcctcggagctgtcgatgctcgtcggctccagcggcggcaagagggcggcggcggtggaggagaccgagccgaaagctggaggacttcctcggcggcaactcgttcgtctccgagcaagatcatcacgcggcggggggcttcctcttctccggcgtcccgatggccagcagcaccaacagcaacagcgggagcaacactatggagctctccatgatcaagacctggcttcggaacaacgggcaggtgcccgccggccaccagccgcagcagcagcagccggcggccgcgggcgccgccgcgcagcagcaggcgcacgaggcggcggagatgagcaccgacgcgagcgcgagcagcttcgggtgctcctccgacgcgatggggaggagtaacaacggcggcgcggtctcggcggcggccggcgggacgagctcgcagagcctggcgctctcgatgagcacgggctcgcactcgcacctgcctatcgtcgtcgccggcggcgggaacgccagcggcggagcggccgagagcacatcgtcggagaacaagcgggccagcggcgccatggattcgccgggcggtggcgcgatagaggccgtgccgaggaagtccatcgacacgttcgggcaaaggacctcgatatatcgaggtgtaacaaggttagaacaatattggtttgtctatgctactatggctagctacatgcctacatactgatcgatgatggattgctgattcctttcaaatggaaggcaccgttagttagaaaattaatgatctcctttttgagtcgaggcgcgatcgatctatcgagaacataaactatcatcagatctatggttctatactagatagctagctaactgcaatcgaatttagataaataataatgcaatcgctcgatcgagacagtggctatatatgcaactttgagttagtatatagtttatgtgatcctttggaaaggtaattgggtataggctatatatgtagaaagttcattgatctaagaaaaggaggacaatgaaattagatgttgatgatacggaattagtatggagttagactaacttcgttaacaagctaaatatacgattgggaagtaaataattttgttcacaagaaataggagccacactagtattggtaattgttgatagatacgatattactaattctggtattgcccatattctaaccaattgaaaaaagatcaaaaacatgctaatacttttgcttattaatttttctcactaatgttctattgcacacatatgcgcttagatcgaacatgcaaggatgtcaaccaatgtttatatttttttttcagacgtgattttgaatcttaatagcatgcatatgagctttagtaaattacctgctcttgaaattgttggtttcaggcatagatggacagggcgatatgaggctcatctctgggataatagctgtagaagagaagggcagagtcgcaagggtaggcaaggtaatgcaaaatgattatatatcatctcttttctccctccagcataacactacgtatgtatatatgtacacttaatttacagtactgattaagcattctttcaattcgtctgttccccatcgcctaatgactctatccggaatgacaccgttatgctccgcaatgcgcagtttatcttggtatgcatgcaaacgccttcagtttttttttcattgtatataactatattagtgactgcacaatcattatacttgtatcacgactactcaggtggctatgacaaggaggataaagcagcgagagcttatgatttggcagctctgaagtattggggcacaacaacaacaacaaatttcccagtaagaaattaaacatataagtttgtcgttttagttttctagctagcttgttaatagatcatagttttctacacaccacttataatacagtatataaaaattaaattgtgcacttgttgattgcattttcccttttttattataaaatttcactgcagataagtaactatgaaaaagagctagatgaaatgaaacatatgaccaggcaggagtatattgcatacctaagaaggtaactgatgtttcaccatatggaattatcactcccagaatatcagactatcacactgagatatgatttcattaattaaatatgcaggaatagcagtggattttctcgtggtgcatcgaaatatcgtggtgtaaccaggtaattaattgatttatgttttcttcctagctagtagtatacaaaaaagcacgcaatgtactagatgtgcttgttgtccttatttatatgtattatgaactactaatctctaagctatgtcaacatatatgtacacggctcatgttaactgtatatgcttaaattttgtagtgatattttggtgttccaatgttgtaatatagattaacatataatttttgagcaggcaccatcagcatgggagatggcaagcaaggatagggagggttgcaggaaacaaggacctctacttaggcaccttcagtaagctgctacactgatcttagacctgtctcatctaaacttaatcgctctcctaatgaagatccttaaaactaatcaatgactagtcatagtgttatatccccaagatctaagtcatcgacccgtactaatttagtccttttttcttgaaatcttcgtacgtctcgtagaactgaagattagatattctatatgttgccctatggcgcataaaatagtagtactcccagttagcgcattaactatgtccgaaatgtacctttcaaagtttttgtctcaaagttgtctgagaaaaccggggcatggagtcaagggccaagtagaaaaccctagcccctttgaattttaatcacacagctctagctttgccctttgcttgcaccgtccatgcgtgcatgcatgcatgcaatatggaacatgttgcacacatgcgtttgggaaacaaaaaccctaatcatatgcatctgatcatgatgataatcgttgcgtataggcaccgaggaggaggcggcggaggcgtacgacatcgcggcgatcaagttccgggggctcaacgccgtcaccaactttgacatgagccgctacgacgtcaagagcatcctggagagcagcacgctgccggtgggcggcgcggcgaggcggctgaaggaggcggcggaccacgcggaggcggccggcgccaccatctggcgcgccgccgacatggacggcgccggcgtcatctccggcctggccgacgtcgggatgggcgcctacgccggcttgtaccaccaccaccaccaccacgggtggccgaccatcgcgttccagcagccgccgccgctcgccgtgcactacccgtacggccaggcgccggcggcgccgtcgcgcgggtggtgcaagcccgagcaggacgccgccgtcgctgccgccgcgcacagcctccaggacctccagcagctgcacctcggcagcgccgccgcccacaacttcttccaggcgtcgtcgagctcgacggtctacaacggcggcggcggcgggtaccagggcctcggtggcaacgccttcttgatgccggcgagcaccgtcgtggccgaccaggggcacagcagcacggccaccaaccatggaaacacctgcagctacggcaacgaggagcaggggaagctcatcgggtacgacgccatggcgatggcgagcggcgccgccggcggcgggtaccagctgtcgcagggctcggcgtcgacggtgagcatcgcgagggcgaacggctactcggccaactggagctcgcctttcaatggcgccatgggatgatcgatgaagaggagcaacaggagctagtatagctaattaggggatcgatcgattaattaagctagatcaagtcaagtttaggttagacgaatcttgatcacggttgtgttgcaactcgtttggtcgttgatcaggttttgcttgactgggtgtgagtgacacacacgcaaggtgctgccttccggaagctgggtaatggcaggtaagggtataagctagtaaagtttgtgttgtaacttctaagttaatatccttgcttgctgttagttttgggtatagtttcagaaggatcatgccaatcctcagaggagatacacactaattaatctcgtgcaatgacaataactccatcataatatcttggcgctcatactttatttagttgtcttaactcttatcattattgctctatatagttcttagatcaattgccatttagacaatcactagtatttatctatatctataaaaattgggcaatactcgtacctcccacgtgttaaaaagaatggtaatttagccatccttagaaatgtaatggaaagtatagaagtacattttctagtataaaactcaatacctccaaatacttggtactttgaggtactaaaatttagtataaaatttagtagcttagttgttttcttaagaattgtaaaaaaaaattaacctggaagatttggttagtaagtgtgtggattaatatataggttgtaactaatgtatataccgctatctaaaataacagtgataatattttttaataatatgtataattaaagtttggataattataatatcaataacaataacatgtgcaatgcacgggctagcttggtttgtaattatagtatatattattgttatcgataaaaatcctgacaatagaaactttgtatacatgtgtcatgtttgtgtgttatcgagggaatgccaatcagacaaggtacgatttttacacaggtttaagccctccttagagtaataatcctacgtcctgtcagtttggggaggttgctttatttatatatggagaacacaagtacaaaaggggtgtatgtgtctatcataagcctatctactaatcccgtagagggttttgatgaatggtggtatgatgtatgtatgaaagttggactccgctggctctcgatggatcatcgcctccacctcacagccttacttccctcctccctccacatcacggtgggccgatgtgggtcaaacaactctctcatagactccgtcgccaccgctgtgtgccccgaaatcgctcagcctctatcatgcatccttgtctgctaggttcctcgagcgccacaatggttgcataggaaggatgggtgttggtggtggtggtcgattcgatgggccacagaggaggggtctgagagctgaacccattcgatgacatggatgtcagcgatgagctcgtcggaatgccgcttgatcgaccacatcatcatgcttgttgacaccgttggcaatggcggaatgatgcgcggatctggaggaagagggaagggagtgacctcgccgccgtccctctcttctccaccgttaccgagttgggcggttttatgcgacctcacggccgtctccgatgtcagctgccctgtttccggtcgttcctgagccacccccaaccccactccacctccttgctgccatggttgcgatggcagccgccaccaccacatcgcatctcctaaccatccccaagtcattcctacccgctgggcgctgttccttgccagaacacttgatgcatcgaactccagaggaatgagggggagagatggagagaaagaggagaggtagggggggaggtgagtagattgtagatgacatgtggggctcacttttatttttgccaaataagcgcttggtcagcacgagtggaccgggtcaacttgccacgttagcgaaaccagccatagatactgtcgaagtacctactttaactcggttttataagttagatgttaagatttctggtattgcaatttagggatgtgtttgaaactcgatctcaaatgagggatcaaaagtgaacttagtaccaaaattcatcgtaattaggatgctgggccctaataggtgaaccgggcccaatgccatctccctactcggttcatagtcaatctccccgtcgcctcgtcttcgactccccgtgtccgagcgagtccgcccgccgcccgagcttatctccatcctacgagcagcggcgccggctccggcgtcggcgtccccctgctccttccgccgcctcctcgctctcgccggtgagcatccacacgtcctgttacccgcatcctctttctcatctctctccgcccattcttcttctcgaattcgcgttcaaccctagctctcttattagatctggatgcttttcccttttgcgttacccttagtaagtactaatagcagacagtttgttccccgtcaaattggggttgaaatgatcatccataccccatctcaggcccgtccctggggaatgcccagctgaattcaatggctcaagttactgcgaccgcgaatgctcgggtgctcggttttcctgccgccagccgccatggtggccctgtaggatcgcgtgctgggccggcgtttctgaatctgcgtgctcccgcacttcgtcatgacagtaaaaagcatcctttgagaggtactgattttcttgcatatgtgtaattttgcattggatgacaatataagctcgttactgcccatacactaacaagtggagaaaaactgaaaattgttatgcatacaggggtgaaatcctggatgatggtctttcaggaaaatgattgttctgagaagttttatttttattgggatacaagtttacaattaccatagttatagtgaacgcacacttgatgtttgtagacttgttactctatcttaaacggtgcatcaattgtgattaagttacttatcagcttcttttttctttttttaaggtgtatgaattcatatttataacatgttatttctttgtttcagttggtgctgcctcttcattattcacaaagtatgatcctatcaaaggcatcaaaccattgctgtcaattgacaagttacgtcctagaactcaagttggctgtcgagcatctttatcatcattcagcttccctgagttggagaccaaacctagatggtggtggaggaccttagcgtgtgtcccctatcttctgccgctgcacaacatgtggtcctttgcagatgctgtgtaccagcttcatccatacttgcagcagtttgggttgttctatgcattcatcgacacaatggcgttagtcccaggatggctctttctgatgatcttcatgaccgtctacttctttgtggtcaggcggaagtggttgccacacttcttgcggtatcacgtcatattggctattctccttgatactggttctcaagctctggcgaccatgtgcaactggaatccaagcattgtttatcagggtaaaccaatggtgtttttctggatgacgattgccttcattcagatatccacagttcttgagtgcatgaggtgtgctctggcaggcatgtatcccagcgttccgtttgtatctcaaacggctttcatccactctgatatgagtatgttcaggtagttggttagtgcaatatgcatctttgaatataagaagcattaagggatttttatacgagagatttgaaaactgctgagacagtaaaatgttgggaattatgagatacaagaggtggggatgcaaggggatgaaatcagaggcaatgcttatttgcagtgttggcacttctaatatttgtggcctggagagttacttgatatattgtttaggttgtgttttgtttgattttgaataggatgaccattttgaagactgtgagttcagttttatagccctggaattttctttttttatttttatccttggaggcgcccttgaaattctcttaaacctcttcaatgttgctgtgttgtgttgttgacatattgacctgttaataacgtggtatgaggtttgatgtctgcaattacttggatgcagtccatagcagcataaggctatgagtacgaggttatgaggtggaatgggcttactggagccggtatacatgaaaaggaccagtgttgctcagccacttctccaccgactccacgtgccataacatgatacattgatactgccaggctaagctggaatagctaatatcaaagtgaagaccaatcgattttatgtacgcagttagtaaacggaacatcacagctgaaaatatctttccatcatatatgcagttactcaatggaatattacaaattaaattatcgtcgcgcttagttcctgccatattctgtttgtctggtatgaatttcagttgtacagaaacatctttaaacttaccagaaaaaaaaagaataaatcagatcgtggtcttctcaatgctcgctaagcaatggagctgtaaaaatagtgaaacaactttgtttcagaccttctggtcaagctctgattgtgatgacttctgagttttctcgctgggcaccgagtaaatctgcctctctttgcctcccggttttgacgaagcattcccgtaccaaatcatgccaatcacagcaagcatcatgccaaggactacgtgaaaattaaggccctcttttccaaagaaaagaaaacccaaggtcaatacaagaatcgtcttcatatggcctagaacttgaaatgagacagctgtgaatcttccaatgcatatgaactggcttagattggtcccaacagcaattgtgcacgacaatacaatgaagaactggaaattaagtgagtgaagaagaaagcattagtcccagtttgctcatgtaaggaatatgtaaaagtcaagggaacatcaggtctgcactgctatgataaaaaaccatacatgtcatgctcattccataaaattttattcatagatagaagaaacagtgtaggcaactaggtatctcttaatctccatgaagtatatataagaagcaaaattgctattgtgcaacaaagaactattcatatacttctgtactatttgaaggagggaccatactgtaaaaacacatttcaagtttcaactgtaatgtgcaaggtagcttactaactactagcagttaggtggttgatccattatagagaggtaatgaacatgcacaaaagggattgaaaagaatcactgccagtactctaatatctaataacacttggataatacaatgttcaaaaaaaatatctttaaagctgctgtaaacttatatcaaaacagaacttaaaatattcctttccagcctaaatcgtaattcatggaccaaatccaggagataaatctggtggttacaggatatggtaaactcttcatggtcatcagtatctaactcaaaacggattcatctacagctatgtacagtttataatgccgaaatagctgcatagagccaaatgggactgtaatgcaacaagttcacaagagaataagcagagaactgattcaaaacaagaatcacataccgtaactattgttgtgtaattgaaagtatcaactcttctattggtcagccagaagtccacaaaaggccccagtattaacagggatgctgcctgagctggagcagtatgacccaataggttgaatgagccaagcgagtacttcttttgaaggtgatgaacgtactgcagcatgaaagaaaaataactggaataaaacaagtgctaattatccaaaacctcaccattaaaagtgaaaacagcagcgagggacaaaatttctgttagcagataaatgagtaagactaaatatttgcaactcttttagatacaagttactattgaacatttcctttgaacatgagtaatcagtacagcagttagaagcaagcaaatatcgacagaaatccagattacagaatgagataaatcagactgaattcacacgaacagtttggaaaatatgtaaatgtaatgtaccatatgcgacgtaatttgaactgaaactgctcattcagaagccaaggtatttaaaaaggagccaaacagagcagttatcactagggcatggaatacgtcaaaatgtgcacaatcaaatactcacatgctgctgtagtgctgtgctccaaactgcaattacagctgctagcagcccttttgaattcacactaacatcagtcacagtacatacagcaactcctactaaaacaagcactatactgagttttgtattccttgagtaacggactttgtcaaacaggatttccagaatgcacaagactggaataatacacaacttggcaatctgaagaggcatgaaacgaaaattagtatgtgccctccattctaacattgaatatagaaggatttaaaattactcttcccacctgatagaatccaacagagttccacatcaaactaacattcatcccaacaattgataagtttgcaaaaaagacgaatttaacgagttctggcaatggtaaataggatggctgaatatgtcccaaccatttcattactaatgtcatcaaggttgtggttgcaaaatgcaatccagtcaatgttgtagctgcacaaacacacaatggaacacatcattagcacaaaaaatctgactggtttgctgcacaacgatagttcggtttag

SEQ ID NO: 28356 - DNA, 20879 bp, Oryza sativa
acatgtcacaccagtacaaatcagaatcaacaattatctgcaacagttcatatccttccaccagatctaccgctttgtataaaaatacaacggcactgacataactaggacagtcgcggtagtctctacccgacgtgaaatcccaacaaccttgccctgcacactcacactcccagttcagaaccgagtggaacaaccccgagcggagagaacaccccaccctctccgaaatccgatgccggagatcagcgcagtacgcggaactcggattccgcggaggcagcggatgcgcggatggaatggaaggaatcctccccatcggcggaggaggggaggagaggagaggagaggagacgggagagagctatggcttcgatacctcctcttctccgcagcgggccgcgtcgggcgatggaatggatgggccccttctcttcctcctcctcctcccgtctcatcttctccgtcctcacgcgccatcacgcgtacgcgcaggggggaaaaagtcgggtcgcgtcgcatcgcgcgtggccgcaagcgcgagtgcgtgcgcaccgagccaccgaggtgttgtggtggtggcctggtgcggtggtgggcagcggcgccgcccatgcggctcggctcgacttgggcttccgccgtgggatgggatcccaaccgaattgggcccccggtgaaactaggtgactagcccaactcaaacccagccatccaggcatccccgaacgctgcatatgctgctgcaggcgcggccacccgccgggcggtctgccgtctcgcttccgcgacgacgtggccttcgccgtcgacggtgttgggtgtaatcccacatcgataattgacgatagagaaacacgacttaaaagataggaatgatgctcatccatcagactagtcttttgggttgtataggcctagaatctaaagttataactccggttggacctgtggtggaacagatctaatgtgactgtgacctaggtgacccatggttgatgggtcaggatgcgcactttaacttgaaaacgtgtcggggaaatcacgatgttgtgatcttgctgtgtctacgcagtggcggagtcagcatggggggaggggagggttctttcgaccccactacccaatccatatatctattgaagggggttaaaaaccactacccaatccatatatctattgaagggggctaaaatagacttttgtctgatttttagaagacccaaaaacccaaaagactgagggcctgttcactttgatgccattttcaaccttaccaaatttttgtaaagttgcaaaaaaaatggctatatttagtttgctgctaaattttgataactatataagaaatcctaccaaaattttggtaactctgcaaaaattttggcaaatgctaaattttggtaaggtttttttttggcaacaaagtgaacaggccctgagaagcctccactataattttatcctgtctccgccactgtgtctaggtaggatttatttcgctggacagctttttttcaacgaagcagagtagtaaatttttctctcaacttttttttttgagggaaatttctctcaacttttggcgactggtccatccaccggacaacagtttgatgaaaagcactgttatttagtggacgatattaattaggcagaagctcaattagggtgcaaaactgacggtgattgatccatgacagacagcctaaccggctaacccccacccttcttgacattgcaaagaccacgcaaccacgtcgagagaaatctgctagaggaatggctgtgcaacacacataacttgtgtgacacaggacaccatctgaaacgagtgtcaccatttccgaaaacaaaagaaaacgcccgcaagattgttgagcctgaagttctgaacacgacaaatcttttcttcttttttttctaaatggagaaatgctacacaattggtgttcctgaatgattgtgattatggaataactaatgactgctatactttatttaatcgctaagcatggaagtatggaacacaacatttatttcggatgtaatgtaagcatagagcataaacatgcgttggtctaattcttcccattacgtacctttcatttgcaaatcaccaccaaatccttatcttagtagggttttgcagtgtcgatttgatcgctcatcagccaatgtcctgtgtgcgaaaaatactacttgctcacagtctactactactactacaccaaggctcaagaaggggtttggtgctgagtttacttcacatgacccaccactgggtgaggtatgtctgcactactgcatattgtgctttcgctccattcccagatgttacatcttagcttcccaccgatgcaatcttccaactgatgataaatgcaggatagctttgccctttttcaagcaggttgtgcatcctacgtcactgtctaattccatacagtatctagtaactagttcatccggtgctcgaactgtactatatggtatagatggttttctggaccaacgtgatgacccttttcattgaaaccgtattctatatgtgcgtacctaatctatagaaaactggtaagaatgtattgtgatgcacatttctgtcatgctaggacgacgatagtgtatgacttgcttcacttccctagcagcgtgataaactgacgtcatgtgatttatggtgcagtgatttggtctaaaacctcaaaagctgacagaatcattttaccgaattgtgttcattagcttaacaccacgcataaggtggcacatcaatccccatatggctaggtagttcagattgctcttctcaggcctaagaataactgcacaagattttctgaaagcaaaattacacgcattgtgacattttacgaacccatatgcaccagtcatactcatcttggttgaaacagtttctgcatcatgagcaaacatattgcagacagaccgaattcagaattcaaatgacaaaacacaactaatgtaaggtttttaaaattagctgcaaacccatgtaatcctgcatcccggtagaatgtcaagagagtgggacatcattcttgagctggaagtggagcaggaagaaaaaccacttccagtgggggcttgtgtgtgtttcggttcggacacagaactcaacagcccaaccgctccagttgagtttgacagaatgctggaaccaccaaacttcccttggttgccttcttcatcttcttcttcctcccctttcccgcgaaagggccactcccgctgcatcctcgacgcctacccagctatcctcatctcctcctccattaaactccagccctcgccccctttttaaatccaccgaccaaacttcctgaaccttgccaacagtacagaggcctcgcttgttcatcttcgtctcggctctgcctgaaccttagcgccatggacggcagtggtgtgcgccggatttaagctttgtttaggctgatgggtcttcatgcttcggttcatcttcgtctcggctctggagttcttgtaaggtatggtaaccatgtttcggttttgcaatgaatatgttcattagctgcttctgttgatgaaatttgctgggttagtcatatgtattctgcacttactagatatgtgcagtataatggcaaggttaattctcttagtatttaggaatcatataatatgatttgctcggtataataagttttcacttggacccaatttcgatataatgatattaatcctgcaatacaatgagctatacacttaatccttagagaccttggggagatactagaaggtaccatttttttttctttttaataaaatttagtacctcctagtcaaatacagcaagaccattctaatccttaatacttggaggcaaaaaaaattatgttcatatttgtggtttgttttcataacgcaaactgataaaattgtatccaaagctcaaatgtctgaggttaaattgatgaactgataagcaattgagatgttgagtttcatctagcaaccaacaaccactaatcatggttgctttagaaattagaataccagagaaagaaaactcctttagaagagcttgacactagagtcatgtcagctttagaaattagaatactagagaaagaaaactcttttaaaactctttttataaattacaaaacccacttagaatgaggcatgtcatctttctaggattagtgtcatctactcatcttggtacaaactgattgtgtatatttgtatgttctgtacttgtgtatggatattgtcgcaacaccctacgtctgcactatgctcaactaataagctactagtgtaaccaaatacattgtagttcactctgagttacaactttttcgaaagaatgctatgtgcataagatgattcagagactaggatacttattccatgatctaaaaaagatactccctccgtttcacaacgtaagtcattctaacatttctcacatttatattgaagttaatgaatctagacatatataacttcaatatgaatgtataaaatgctaaaatgacttacattgtaaaacggatgaagtaattttaatatttaagacttgaatgctccatcatttgcttttcagctcatcaaccgcggccaaaatttaaattaaaaaacttaaattcagagttgttttttatgttttatcgtagttatattggcttttaaatcacgaggaacacgtttaaaaaatttacacataaattattgttttcactaataagtgttacggtttataatcagcagtggacgaaacgatgaaacttgaagtgaagaactgaagatcctgttgagttggtggttggtacatttcaagtgaagaactgaagaatcgtagagggaacaatgtcggagatggaaggagctctgagatcctgcatggagcagctgctcatcgccagggaggagcgggagcagatcatcgtggaggcggccagcgagatctcctcggagaagaagaaagcgcgggagctccagcggaagctcgacgccgcgaccaagaaggccgcgaagctcgccgccgagaacagcagcctcgccaaggccctcgacgccaaggacgcggcgatcggcgagctgagggagtccaagtcggcctccgacggcgagctcgccggcgcgagggcgaggctggacgcggcgcagaagcaggcggcgtcgctgcagtacgaggtgcggatgctgcagaaggagctggagatcaggggccaggagcgggagtacgacctccagtccgtcgacgcgtcgcgccggcagcaggcggagagccagaagaagatcgcgctgctggagggcgagtgccagcggctgcgcgccatggtgcggaagcgcctcccgggccccgccgccatcgccaagatgagggacgaggtggaccagccggcgacacccagaaggtcgcgctccgtggcgccgatgtcgccgcggtccgtggcgccggcggcgccgatgacacccatgtcgacgtcggcgcggccgatgactcccaccatgtcagcgcggccaatgacgcccatgtcggcgcggccgatgacgccgcgccgtgccgccgcggcggagcacgagacgcccgcggcggcggccaagctgcgcgccgtcgaggacgagaacaaggcgctgaagcagacgctggcgaagagggacgccgagctgcagttcgtgcagatgaagtacgccgacgaggcgtgcaagctctccgtgctgcagcggcagctcagcgagctgaccgaggagaacaagcagctgagcgacgcccatggccagacggagtcgtgggcctccgcgctgatctccgagctggagcagttcagggccgcgaagctgcagggagcagcagcatctgagatgagcttgctcgacgatttcgccgagatcgagaggttggagatggcttcaggtggccaaggattgagatcgcccaagaatgcgcattcggaagcgatttcttcagagaagaatgataaagacactgtcctagaaaatggtatctctatctccaatggccagcctgaatgggttcaggatatgtgcaagcttgtgatgcagaagcatgaaaccagtggggaaaacattgacacaattcttgaggagataactcgtgcattggatcagagtgctaataatcagaaaggagatgatttgaatggatcatatgactggagcataatgaaggaaatggtgttcagcctgactgaaaagatcacctctgttattggcatatctgaagaaggcaatgttgcaagttctcaaaaattgctgcttgacaggtctgaattttgtgctcgccttgagcatttggtccatgtctgtcatgatctactgcatggtaaaactgaccttgaaaagtttgtgcatgaggtttgtttggttctagagtatataatcaaccagtacaagaatatatcattccaagaacaaccagacactgtgaataataatacagagaatttggatggagaggaatcatttggtaacatgaatggtggatgtgacataaaaagtccgaaatcatcatctgctccagacatacaaactgaagcactggaagaatcaattcagtcggtagaaggccgaaaaacagatcatattttggttaaccaagaagagagtcaacttgatgaagaactcacaagagttatactagaccaggacgagaaaatcagtcaggagaactcagcatcctgtgagatagaaaggtaactaacactgaacacatttaataataatctgttcatgtgcaattaagttagatgagaatggtgaaaaattgtgttaccctttaaattactgagaaattaagttactgcaattaagttagagtaccaattttactgctactgagaaattgtgtcccatcatgccgtttttttaaatgcagcccccatgatcatccaagtgctgaaaccctggcagagaaagaggaaaagcatttagcatcagtaagtttctctgttgctcctataattttcagtaatcatatgcatatcaatcatataggtatctggtatgcttttttcaccattctcatccatacataatacgttcgtcagaacttaatcacaaaatttgagcttatgcagagttcagagatatcagcagcggctgagaagcttgcagagtgtcaggaaaccatcacaaatctaagcaggcagctgcgagctctcaagagtccggcggtttcaggcaatctagacagcccaatgtccaactccagaccaagctcatctgactacaagccccagtcacttgcatgcattcttgctgaaggggaggactccagcactgaggatgccatttctcctgcaaccaaagaggtgcactccaagaaagagcctgatgctgcatcacggaaaagcgtagcacaagatggtagtgttaatgctgccctcaaagctgtcgaagaggaattaacacaaaccgttgttcatccgatcttcccagagccatcccaagagattatttctgctgatctcaagaagaagagacggagccccagcttgctgggcaggataatgttcagaaagaaagtggaaggcagctaggtcatgctgctgatctggtggatgcactgtgctggtaaaagcttgcaaaatctagtagcgctccaccactatgctgtcactggagatttcgactttgaacgaacgagcttgttctgtttgttgagcattcctgttccttagggtgcaacctttttggacacgtattctgtcacagagactgatgacttgtggtaagagactctgagcacatgatctgtatcggttttccttgacatggacaaattttctttttgtatttatggcctccatggttgtgtaaatgttaatttaataagttaaaaatttgttcttgttcactggaatacgtacatgcaattctttttttctgtctgagcggctccaagtttcaagacctctctatactgtttggaaaaatccatacaccgacatgagattacaggtacagaagtagagattttggaaaaaaaaaatatatcacaaattcacaaataaaaagcattggagatggattgcttctgaattctgatactgcagaggcagatatccattgtgccttttgaaaccacaatagcgatctactgttagttgccccgtagttgtagccatttgaatgcaaaagcatttcaagattcttttaggtagggtgaggtcgccaccagtactcatcccaagaaggattctctcatcacagggatgtgaccttctgactttgcatagtatactactactatatttactttataaacagctgaaaaataccaatcatgctttcctttcaaataaataaaaaatcatgccggtgattgtcgtaatcatttacgaggtgtacagtacatcaccggcccagctgatctcaacagaaagaagcacaattggcgtaggcctcatcatctagaagcaatacgtcaaaacttatcccgagtcagcagcacaaaggatggccatattcagatattctaaaggcggccgtgacaggatagaaggcaacaccatcaagccactggggtttccagacgctgaccgatcccaaaaacaaacaaaagtctgaagcactaatatacttgcgtcaaatacaaaagaacggcatcactgcgtctgcatgctactgacaattttctcaaggctttatattcctcgagtcatttgcgttgcagttgcagacacctggatgcagttctgctccaataattagattatcattcaggttgcagacaggaactcatccaggcccggtgatgcctgggacggcaagagcttgtctttttctttcattttttttgtgttatttttctgctgctgatagactgatgatggcaattgtttgtcacttgtcagtcatgtactctgccttgtaccttttgttgctggatagcgttattcggcaacgtagccatgttatcgtgtcttatcctgtaatacatccgtcccaaaatatagctatttctagcacagtactttgttctaaaataaagctatttttctacctaccttctcctctcaaccaatcacaactattctttttttacctattttctcttttcaaccaatcacacaccttcttcaatcattctcatctactttcttaataccgtgccaacctcaaaaatacttacattttaggacggaggaagtaggctttctttgggttgtaatgcaggccaaatggcaacttgtagaatggtttcagatccttcacgccgcgtttggtttctgaaggggactgagatttcgtctccttcccatttggttatagttatctgtttatcaccacaagtttactgtttgcttgtgttcttggtccaattcagactgctgcagtgctgctttcttgacctgcagctcatccaaattccatgtatacttttcttgccatggttatcctttgtaacactaaactgtttctgcgcctgcgttgaaagttgatctgcgtgtgacgcgttcatgtattgtaccttaaacttcatcacaaacttgtttcactaatttgtcaaagttttgctttttgcaagtttgcaaccgtaggaactgatagtacaaatgatcaaggacagaagaagatgccattctcagccatgcaattttgtacttcaacaactgagtcttttatttttttgaaattgaagctcttccccgatccttttctcatctttattccagattatagttacagaatctacctccaggctccagccctacatctttacaccccaaagaaaaagcaaaaagaatgaaaggggagaaaaaaaaaaagaagaacgaatcagaagctctgttctcaaaaaaaataaataaatcagaagctcactatataagacaaccttttccatccttttaatcttttgacctttttacatgtttacatctaggtaacaacatctagaagatacaaacatccatggaaaactgcagccgcgatgtcctaactcctaagcatattgtcagaatcagccattaactgctgctaattcctgtttgacaagtgagccacctgtccctctcatcattgcttatgtcagtctcgtaatgagatctcgaacaggtcggagtcggcgtccgggtcgccggccgacgcgccgccgccgccgccgttctccttcctgctcttgctcatccgcgacgccgtctccagccagccggagtcgacgcggcccatggagaagaggtcgccgctgtcgtcgaagtcgaggcccagcgaaccgccgctccggccgtcgtcccccgccgacgcggcgcggaggaagcacgggttcgccgtgcgccgcgcgttcgccggcgcgtaccggaacttgccctgcccgaggttgaccagcgccatcacgtcgaagctggaggcgaggaccgggtacatcggggtggagaacgcgtcggcgttgcagctcacggcgtggaccagctgcccgtccaccgtgaagaacaccttccgcttcgccggctcgaagccgcagcccaccaccttgtccacccccgcccacgacgacttctccgactcgtacaccagcttcatccctgccatcaaaatccgcagaattttcagctcaagatttccacggttgcaacgcgagaaagagaattcttgttaccgtcgaggtagaccgcgccgttggagtggaagccgatggacgacgcgtacgttccggccagcgacggccgtggcggcgcggcggacgcggcggtggcgaggccgaacgacatgaccgtgtgccgctgcttgtcgtggtgatcgtcgactttcgtggcggctctggtttcttggaccgcgttcttggcgtccggtgcaaagctgatgagcttggcgcggtcgctctcgctggagccgtccctgccgcggcggctcgccctcgacgccgaccactccggccgccgcgtgttgaggtagatgatggtgatctcgaagtaggcgtcctgcgggaacggcgcgccggcgaggggcgggccgggcagcggcaggctcatcctggcgaggcacagggcgctgctgttccccgccgcatcgtggtcgccgccgcggagcgggctcgggatgctcccggggagccacttcttggtggacgccgagacggccgccgccgccgcggccaccaccgggttgagccgcaccgcctgcatccgctccgacgaccccgcgggcacctcccacgcggtgtccgccatgtcgcggctggtcccggagtcgcaggcggggcagagcccccacagcggcgacgacgacgccgacctcgtccgcggcggcgccacggcgaacacgaactgcgcccacccgttctccgccgcctccgtcaccagccgcgggtggtccgcccactggaacggcccctgctgcgcgccgccggcgccggcgccgccccggtgatgatgcctcacatcgacatgcccatggtggtgatggtgcaactgctggaaccggagccccgcgcggccactcgtggcgttgtacctgatattcagcttccccaacccggggctcaccgccggatcccctcctccaccaccaccagccacactctccggcagctcaggctgcgcgttccgcgacgacgagctccgccgccggtaaacaagaacagccaccgcgaccagcgccgcgaccggcaggaacacggacaagaacagcttcagccacagcgccatactctcctaattaacctcctcgcacctctcactctcacaccactctactcgatcaaatcatcctgcgccaccggagctgagtcggcgaggtggggcgaggtcatggacatggtggtcgtgcctggactgattcgtgtgacctgttgagttgtcgtgggggtttggtttggtgagtggtctaggaaggcaggcgcggcaagggaggaggctgactggctcaacggaagcaggcgaggaggaggaggaacgggagggcggttggagatggaaaggtttttaagccgcgggaaagcggggtgcatttttggggtgatttctctgtgggtgggtagcccgtagccgacgggaggagggctaatctgcaacgggtacatgggcacgtcatagggttgttaggttagtgacgtgatgtgagaacgccttatgttaataacacaggcgaaagtgttccgcaccaaatctctgtttcctgagtatgaacacttttcgggctccaaatggagaaatgtttttgcgttccattggctttatagcactcaataattaattaaacatttgttagcatacagttgtgagactaaacatttatcaataagcgtagcatatatatatccacgattctatgatagagacgccaattgtagtaaaccagtaaatttagtacatatttgtatttttaattttaatatagtcgtctttgtcattgtgttgttcttaaaccatcgactcgttcaactagatatattggctaaataataacaccttcacacttttacgcccccacattttttgttgttagtatattacttctgtgaaaaaaaaatgaaatgcattgaaattttgtttcggcatataaaagttaatgatcagtataaccttgaatacgacgattataatctttttagactaacgagattgattgataggacaagcctaagtgttttaagacaatggataaattggtcattgctttaatagaaactacaactacttattacaagctaaacataagagccttactgaatgaatgattgaatgaatgcaaaaatttaattttgaacggaacattttgttgtggataagctagtagtgtgtccttctctcacttagtgaatgtggctcacaactttgatataaaatgcattcccagaattatgtatgaatatatgatacatttttttagaactaatatatgatacttggagtagtctagtagatgcagcactgctctcaacgaaatgtcactatgtggtatttgtgacaataagttgtagttggttagttactatcactttcccaatcactatgataaactacatgacgttaccaaatacgtgtaatgatgaaagtataagtacacaattggtagttttcgctcacatctcttattttaaataaaataaacaattgaaacgctctagtcactcacatatcttattttaagataaataaacatatcaacatgcactagtcatccgcataccagctcatctgtactccctcccatatttgattttaaatatatgtttgacaattcattttacttaaaaattataaaaacattacttgttttgttgcgacttttaccattaaaggtgctctaaacatgtcttatgttttatactaaatttttaataaacgaacgatggaaacatgaataaaagtaaataatgtcatatatttaaaaatagatgtaatattattttgctgatttcaccaatgtgaaaaaaaaactgtccctaagaatcggtcaagttatgtaatttgtgtaacctcccccctccctacaaaagaaactgatggatgttggcagtacttcttttcagctgaaaatttttcaaaaaaaaaaaacttaagcgcgtaattaatctgcataacgcatccgttaacccttttttctttgcaaaagcttcagctctgacctcactcctcactaagccatccccttgcagtttaatttggaggtacaaaacgccggtggacgtaagccggatggcacgcgagaacagacgtcagatatataccaaatcctatgaaaagtaatatgttctttctccgatgcgtcggtgtcgcggcaaacgtcagatgcccgcatgatcatccccggccgttctgttcacgatttcttccacttttttctattccaacggctcgctaatctctctctctctctctcgttgatagcaatcaacagcacgtgatttggaaggggctcacacgtggggaagcatcgatctgggacggtgtcatcaggcgagagtcatatcctgttcggtctgtgcaggaacgagttgaatttggtgcttagtatctgtcttaatcatggagctatgcatcttttgtcagctcaacttgggtgcttatttttagtcccatcatgaaagtgtattactactagtttcttgttatggacagcttgtcctacttttaaatccatctcggctcaaacagagaatattggctttggacataaccttgatttgggccttgcaaagggaatgcatttcgattggaccaatataactcagtgaagcaattgactaggacggtacaggcccaaagacgaggtggaaacagtacaaaaggcatcaaaatgcctgtgtccacttgcttggagactggagagtgctttaacctgagaattcttttttgtgtgtggagaaaaacctgatattatgtaaatggatattacctagggtaagcctctcatttgcatattcattcagattcaaagccaacaaactagaaagatagaatagaatgatagaactccagctcctcgttgggttcacgactctacccacccgctagagaactctagttcaagtcctggtgtcgataattatgaccgtgtgcatctgtgattagtgtagatgctggaatgtatagaaaaaaatcttattaaattcaactagcattgtggcctgcgcagattgcgcgactaacatcattatattttctctcatataatagcatatatgttttctcattatattatttaaatatattaaaatgacaacataattttaaattttaatatgtaatgttcctattgtattttatatacgtgttagttatgaattatttttaatatcaaattttagttatttgtaaattatatatattcctatatagactctagactcatcttttaatatatctttttaattttgaatttttattatttctaattgaatttctatgtggactctaaacttatctttcaatattctttaatttttaatttcaaattttaattacttctaaattgtattcctatactgactttaaactcttcttccgatgtttttcttaattttgaattttagttatttataaattgtatttttatacgaatcaaaacactacttttaattttattatgtttattccgaatttttgttagatttaaattcctatatggactctatactctacttctaatattccttattttttaattccgaatttctattttttttcttaattgtatttctatataaatctatactctacttctaatattctttatttttaattccgaatttctattttttttcttaattgtatttctatatggactttatactctacttctaatattccttatttttaattccaaatttcagttatttcctaattgtatttctatatggactctagtttcctctctaatattccttattttttaattccaaattttaacgatttctaaattgtatttctatatagactctagtctcctcttctaatattccttatcttttaattccgaatttcaactgtttctaaattgtatttctatatagattagtcgattagtcgagctgttttaataatataatagatagatagatatatagataggcattgctgcattcttcactccttgatctaggaagtagcttagaaacaaaagagaacaaaaaccttgaagagaattttctgaaaacatcaagggcgtactggccccagcccaggttgcttcggcccagccctggacatggtggctccttatcggcttctttcttgggccatgtatatggcgtcagaactcagaagtcgattccgcaacaggaagaactcatccctctggttcctcttcccgcacacaaatttcccgtcgcccgggtgcaaaatcccatagctggcggggcaaaattcacacttcgtcttgtagccgtgcggtttactcttatctgttgatagagtaggaaaacagaagtcataaattaggatccttgttatgagagtaaaatcattagcagctgacatcagagagtcggcatagcagagagtgacataaattaggcaccaaaccaacacacgataaatgcagtttatgaaattcaataaatccgtaacatgagccgtgacttaccgatgatggtgcaggtcacaacggtcgcagagtcgtagtcgtcgtagcgtagctcggcgaagaactgcttgtcgggtgactcgggaggagccctgttgcgcttgttgcgggagcgtcgcttgcggcctcttttcacgtcggattcgtcatcatcggcagcagcagctgctgcttcatcggctggcttcaccgggctgctcctcctgcgagccaggaagctgacatgaacccagagcgcgcgtctgaagctgacggacgcataacccagagccttgacaggtcgaactcggcgccctggaaaaatgttgctactatgtcagtaacatggtttcgtttaagtacattgctaatcatcggttttgcatccatacatattcagttgttactgcagttatgtacgtagtgaggtgcttacaggattgttagcgttgtagtgatggagagcgcggttgacatggtcgacgatcaaggagagttcagcttgcctgcaattgcaagtgcggaattattgttaccgctacatatactcctcatcttaagaaaatgaagaaatatgcttccttccaaaaaaaaccctatcactgctcgatgcacttatattgttaaattcaaaaacaaaacgcaattcgaaaaagtatccaacaagaaattagtccagcaacgagagtaattctaaattttacgcaacctttcgtgttggttgtaaggacatttttttttcgttctcgtctgtgttcttttattggcctagggtggtcggtcacgcttagcagcggccgatccagtgctagccttctcccagatatgtgtgtttgcgctgtcgatatgtggatggtggtatatatttttttctttttcctggttatgaccttccagtattgtaatcttgtattttttttctgctctatcaatagaacttcgcaccgtctcgtgcgagttgttaaaagaaaaaaattacgcaaccttagatattatggtctaattaagttgtacaaaatcacaaaggttttggcatgtatcacataaccctgggttggtattatgggctataaagtttcacgaaactaaactatttatcattttaactttgatcggagaaacacctaggggtttttcggctagctccacaaggtggtgggctaaacgacctgggttcgaagctttaccccttctaattatttgatattaggccctttcctaatatttattttaactttgatctactacacgtttgaggtctacaatcaacaatcacatatcaaatttatgagtttttttatctgttgtatataaatgttacatccatataagtaaagcttcttaaaattgtgatataaaagtatgtcaaatttgttaatgatgtggttgtgtcaaaatttatatagttttgtgagactacaatagattgggttttataaaaactattctctctctctctctctctctcttaaaaaaagttcttttctatgaccattatgctgtggcacacaacaatatatcgtgagaggatttttttttaatggaatcgtgagaggaattgcaagttcaattttccaaacggccccggcccgagccaaaccgcttgagatctaaacaatcaatcaacatagggaaaacttgcagatcgatcgtgacgagctagctgtagacgatgatcaatggaggcgcaaacatggcatgagaattgagatcgaagacgtaccgccgttcagggcatgggaccccgcctcccctgcagcgacgaatgtcgcagccgcagcggcgcagccgttccaccgcctcgtcgatcaaacgctgccgccgtactagctccccgcgcgacaggttgaatagaaagggcagcctcgtcgtcgtcgtcggcggcggcggcggatcagcgtcctcctctctcgcttgttgggatcccatgtcgctgtgatccagccaagatctaatgttttacaagaaattctcaaaaaaaaaaaaagagaaaagctttacaagggaggctaaagtaaattcggcccatttaagtgttcaggcccatttaagacttttaggtgctgacgtgggctgcgcgtcgtgacccaatggaacgggctggcttgcaactccgtctcctcgcgcttcctcccgacggcgtcccgtcctggatgccccgaggtggccgttcgccattgacaggagtacgaggagctacgtgcatgggggtgagtatgtcgatcgttgtttccgaggagattggatatcgtcggagtaagtactccttccaatcttcttctttttctctctttttttcttcccgaaagaaacatgctttggatctctagttactttcttgatttcatcggatcaaatttggattctgttgaataaacacaaggcgaataggtttctctaaacgatcgatcgatgcacgaagcttcagattcagagtgggcgggcaatccggtcaataggttggtacaggttcagacttcagatttcttaccagcgaacagtgggctggttggaggcttgcagcaagctcaatcagccggtgagtccgtgactccgtgttggtgacttggacgaaagaagatgttcgacctcaagcatgccgctgtcgatagccgacatggcacggggagctcgctccacagccgcaggcgagaagataagaagcccaatttgcatggatgattaaggtaataaatagcgtttatagcgcccgtaatagcggccactatatagctgtagcggacctctaccgctacagggtagtggactgcaaatagcgtattggaacttaacggccgttatagcgcttcgcggccgctatagcggcccactattgactttattagatcgctattaaacgtgtagtctaaattttaaactttaactaaaacttgatgttaatattgatatacagttatttttcttaattttgctcttggaacttagcatccgcaatagcacctactatccgcaattcgctattcaaacactaatccactaccaacccgctatacgctatttattatcttgtggatgatgcatccttgagctttcccttcccgaattccagttccagctactgagcaagataagtcagcatgtcatttatcaagacggcaacagggagaagaggacgtatattgtactggacttccggggacgtacgacgaatgttaagatgcctcaacatctcgtcctttgtcctgtatgactggatttgtatgtcagctatcagcataagcggtcaatccacggcacggcgatttgagaaacgaagcacgcggatgtaatgcaatgttattttcgaagtgtttttaaacccttggccatggggcctggcacaaccacacacgagaaaagactcgtatatactctattttaggaggcaaatctccgggggggaagaaaatctgccatctagcttgatcgctccaagaaaggtaattagtttttttaacctttacttacggtgcttaaaaaaagttttctaaacataatttcttatacatctattatgagctatggaatgattacaattatgaaacatgtcaggattaatttttcgttgttccgatgtgccttgcacgggcaccattctatgcctgattttcaaacatatgactttttttattgtttgatttgcatttttaaaatattgttgtagcgttaggacatgcatattactagtatatatatattggagaaacaacttttactgtgatatttatggatattataatcaatctaaattttccatattttctcatacaatgaaataggccaatttatcctatcaccttaatcagtagcccaagagtataaatgtctactcaatagatcaatggattaggtcgttgccgttggtagaagaacaaccttgcacagactatttatgttcatgagaatgtttttggcttatccttttcaggtcataaaagagataccaagcccttacataacaaaacataccatggttgttccatcggcattgctgctgccgctgccgctgctattgctgtgttacggatttggaaacatccattgctcaccagttcataggagcagcatcgatctccactcgctgctcgacttcaagcagggcatctctagtgatccaaatgaagccttgaagtcctggaacaccagcacccactactgtaagtggacgggcgtcatgtgcacccaaacgcgaccatggcgcgtctcagggcttaacctcactggtctaagcttgggtggccaaattagctcctctctcggaaacctgaccttccttaattatctggacctctcctataataatttctttggcccgttgcctcttcttaaccggctccaacaactgaaaaaccttatcctaggaagcaacagtttgcacggggctattccagtctcacttacaaattcttccagcttgtcatacctggacctctccacaaaccttctagttggtgcgattcctgcgaacataagcttactttcgaacctagagtatttggatcttgatcagaacaatctcaccgggaccgtcctgcaaaccataggagacattacgtcattagaaatactttatctttttcaaaatcaactaagtggaagcattcccgataagatttggcaattgccgaatcttatgcaattggtgctcggtgaaaataatttgtcaggtggaataccacaaaccctccataatatatcttctctacaaagattaggtttggagtacaatatgctaagcaaagcattgccacctaacattggtgatgccctctccaatctcgaagtacttgggtaacaatatgtttgaaggtcaaattccagcttctttaggtaatgcttcagggctacaa

SEQ ID NO: 28357 - DNA, 4791 bp, Oryza sativa
acgaatcaagatccaataaatcagacctaaccgggatagtacgagattaatgacaagtttaatagatctaaataagctgatagactctgtataaagtgattgatatattgaatctaaccaagatagcaaagcaatccagaaacgagccaatatatcagataagaaacgcaattaagaacttaattagaatattggacttaaccgagaaagtactaattacattgatacaagcgaagttgacggaacttatttctcaccggagatcgaaactgatgcaacacagctcgaaactaagaactcgtagaaaactaaattatggtggtgatgcgccgaaagttatatatttatctggtcatagttaccaagactctgggcatacatacttataccctcgggctaaaacgagtctgctcgaacatgattcgactggcttaggattctatctccttaataaaaggaaaattaatacatgtcttacctatagaaataaatctaaaaaaaaatctaactaaccaaacctatcctagattttccaaccgtaccaagccaaatttatagtgtcaacttctccttttgacttgccttgactaacgacaattgtcaaattttgccgttaacagtttcttacaatgatctagctcgagctacatcaggcttcttcgagtaaaacctaataggaagagaaatctatggttcatagttactgacttagttctaagcacgacttagtagatcaaacttaactgatgcatcactaagtatgaaaagaaacataatatctagacaatcaagcctttgattgattttcagggtggtggataccttagttaatctaatctagcaagataatttaaccgataccagtataaaccctaaaatgaatctcagccgatatgatcaaattaagatgctaatctagattaactaagatatatgataaataggtaggtaaatatatcaaccgatccagagtgatccaagagggcgaagtgatgtaaccttgaacaacatcaatgtagctgatacaatctctagggccggcgaaatgtaggacttgccccttcaccggagatcgaactgaaccgatgcagccttgcatcaggtgacaagtttcgccggttgataagtaaaaaccttgaaaaagagggtggcgatgcgccgagagtagttgtattgatctgtgagatagtttacaatgactccatgtgtacatatttatatccatgggtagatactagtccttattggataataaagaaacttttctaagataaaaaggaaaacataaagtccttatcggacactaaacacactctcctaaagataacaagaaactaatggactcttcctaattaatagataaactctgcatcctccttttgaactcggtctcttatggataaatttcctttaattcaattaatttccttaaccgaacccatcaagaatcagactactggcgactgttagtgcccatcggccgatttgtcacaccccaatccggcaccgccatacaacggcacctgacaagagcgtgtcgtaggaaaaacggcgcgaaccgcttcatacgaaaccacgatcttagtaccagtcccaggacatagcgctggtacccacggtgacaaatatgaatcattgcaatccttaaaataaatagaggacttatttaccttaacttaggttgcagctcagaacagcccgagaatgcaacagatgacccggacaaggaaataccaacaacagcagcagcagcaacggaaccaacggactaacacccaacaccacagacgatagctaggaaccaggacgaaaccctattcttcacttcacttcatcttcagcttcagggcggaggaactatatatatatatttatatagagcaagggtgagtactttcgtactcagcaagccatgggaattaagtgtttaatgcaggcttcaaaggaaaggctgttgtttttgcaattgattttagttaaactcctttttgaaacaactaagtgagtgcttctcaaacgacacagatgagacagtgcgtctcgttcggtcggagtatgtgcaatgtatcagtctttgaatagattcaaggttggcacccggccaacaactttcaaacggccacccgggcctagctgatcccatcagccacagagattttcccaaacatcgaacccattccacaacagcaatttcacaaagtagtaatcaaacaaaactacactaggaatcacctcacgtccgcccatgaccgtgggcacggctgttcgaacaatttaataacctctgcagagggtgtacactttacccacacgacgttactagccttggtcacctaacccgtgcggatcaaacacgtctggtgacttggggctttcacgacaaggcatttcgaaagccgacacaggttcaccatatgccaacgagaggggtcccagaccgacaacaggttaggtcccagaccatactgtgccaggaagcccgagggttctccccggcaccaccccgttgaatccacatgtctcttggcatcatggttctcccgattagcaaattactcagctaggggtgtcccattccacccatgtggtcgcacttgagacttatgttcggatgaaattccaagggaaccggtccttaagtgcaagagcgggaaaccgtactcccggtaggtcccccggtctgtggtattggaaattcatttagtttgcaaacaccaaccctggtgtcgggttttccaagtttttttgtaaaaccccaagttttacccatcattggatattttaaaattgaggggaggtgttccgatgcgcatgcccgaaggcccgtgcatcaaagcacaacagttgacaaaggaggtttaagtgttcaataattcaaggagggtaattgcagcaattaggattggggccggtaggctatctcgcaagccgcggccgaaatactcgtgttaatcctattcatgcaatatttgcggaaaagaaatacttagatttaaattataggtgcaagatgatcaaaggtcacttgccttgctcaaggccttcattgagcttcacgaatcttcaagaaaacccgcgatcgacgaaaatccggtaatcgcaactatacgcaaacaatcgaaaacctaaaaaaaaaaccaaaagaaagatcctatttagactggttaatagtgccattaaatagatctcaattttatggaattactagaagcggaacggagtcaatcggatgagcagctgagaagatattgaattttggaagtttaattggaatttctgggcgaaggaagatatttgtggaacaaggggaaattgatttatgaaatttatagaaataatattctcaagaatattattgaccgtcactgacgtgcgggaccaaaggaaatgatttataaggaaatgattcatggaattttggaataaggaattgatttatggaacaagggaaaaaggatttattgcatttactggattaaggaaatgatttattgaattcatggaaaagaatattcccaagaatattctttaattactcattgacacgtgggaccaacagggggaaagatggacttttgtgtaggggagctgatttgatggagggaagaaatatggactttagctcatgagggatgggcactgggcttagagggagggactgaaagtggactttagaggtcggaccgagggagagggggcacggcccgggtgtggaaggaatggcccacggccgggcgggcgaggccgagccgggccaggcatgcgcgcgggcgggcgctgaccggtcaccgcttgacccggtcaagcgggaccggcgggctgaggtggcatccacatggatgccacggtggcaaggcgagaggggaggaggaggcgcgcccggagatcggacggcacacggcagccgatgggttccggcgagcagcggcgagccggagggggatgcgggcaccggtagatataggaggagatggggaactcattccacggctcggatcgaagagaggaggcgcgacggcgatcggtggcggcggcgaagctcgtcggatcggggatgtggtcgcgcgagggaagggacaagggggcgcgaactcgggcctagccgaaccggtacgcgactgcgatgcgcacgcggtgacgcgggacccgatggtcaccggcgacgcgggacccgatggtcaccggcgacgcacgcgcggcggcgttatgcggcggcggaagcggcgacacagcgcggagacaaaggagaaggccggcggccttggggcagccagggggaggtcaaggggatccccgggagcatggcggcgagaggaatcggcgcgagaggagccgacaactgtggattgcggcggcggcaatcaccggcgagcaaaaggggaaacacgaggagacgacgagggttcgattcaaggggggtgggagcatctccggggttcaaggaatccgtttccggtgtcagatggggcagagcggcgccgtggtggcgcggcgacgggaggcggcctcagggagcggtcggcaatggcggcgaggccatgccgggcggcggcggggattggggtggcatccatgcgtgttcgggaggctagccaagctaccacgcgagctagagagggagagggcgagcgagaagggagaacggagggtggcactaccgagccgggacgggcgcagtgacgagcggccgacggcgcgggagcgagctctccggcctcgggctgaggaaggggaagaaggagggtgcccggagtcccgcgtccgcgcgcacacactggctcccccggagct

SEQ ID NO: 28358 - DNA, 2489 bp, Oryza sativa
agggggctcggcattgggttttataggtggcgaggatggagcttcgaggggaaggaaggagggctcacgggcgtggtcaaagggcgtgggcgacgagctggctcggcgtcagctgctcctctgccatggcgctggaaacgagcgaggagagctggcgtcggcccgagaggggaaaggggaaaacggagggggagaaagggggctcgcgccttgccgatttcgggagagagagggatgggagcgagaggcgctgcctctcggttttggacggacgctggtggagcggcttgggcacgcgctgcagagctcgcggcaggcagcggggccgagcggcagcgcggcgcaggcgctgacgacggtggcgaccgggcggtcggccacgaccggcgcatgcgcgggaaccaaaggcggtggggggttcaaatggcggcggcgggaatcggcgccagggagagaggaagcagagagagcaagagagagagagagggtggcgctctctctcggctcgggcacgacgcacgtgcggaggggaggggaaacgggctgagaggagggatgggccgagggagaggaatttggcccacaaaacagagggatgcaaatagacttttgcagaggaattgaattggagagaattggagtttggaaatggaatttggatatctttggagtcgggcgaatatttagcaaggttttgagatttggaatttgaatttcgaatttgattacttggactcagggaaacagggaggggtcaaggaatggattcaaggtggactcggatatttgtggaatcgagacaaatattttggcgatgattcaaaggaggctattgacctttggaaaaattgaatcggaattggaatcttgaggtggaggattttgatggcgatgaaagggaacaacaatggagatttgaattgagatcttggcacaacttagactctcacacaaagaacgaaattttcacatataggattttgccgaattagtttttaacgcctcgcgaaaagcggagcgttacacgattctaggactctgaagccgatactgagtctaggctgatgataactcgaggcttaccaaattttggcgttaacacgcggccgaacgaactgggttggtgcttggtggggctagcttgggttcattaggtgagacgtcgttgccgaagcaacaagcaagcgcaatggtaggggtcggcattgactcggccgcgacgaagcacccattcttgatgaacccacacagcagcagcaatgtcgacgttgccgccgtgtagttagctatccaccagcacggcagcaccacgaagcatttcatgcattcgacggtgccaatgcagcgttcagcaacttgagtggaggaaggctaggggctctgcctctcgcgcttgccgttgctgcagcagctggaaatggtgaagcaggcggaggagctacgggtccgatacgacgtgctctacttcaactagcaacagcagcagacatcggtggcagtgtcggtgcagcagctctcaatagcattgcacatccaggagatcgtcggtcggttgatcgcggggaggagctcttcggtcgcgggctcgcggagtcggaactcccactggccgccaccacctggcatgcgaggagtgagaataggaaaagagggatgtgagcaaaaagaaaaagaaaagatattagtactgacatgtgggtcccatgagtgtcacataggataaaaccgatatccaaaatcccaagggactcgattagctccgattttcgaagatggaggccttatatcaagtattgtgaaccgttgagggacgtgaatctatcaggggcaagaattgaggaaggtaaaatagacttgttccttttgtttgggacataggtcattgttaacaatggaatttggcatcatatttggagaaggaaaaggaagatcgaagcggatttggtgttgaatcgaactgagcttggagttggattgcgcatcggctggatatcgtatcggctgaaaatagggtatagagttgatcgaggttgaagaagccgatggtcgatacaagccgatatgacatgacttgggctcgatatgggtctagattgggataaccgtctgtcacaccccaatctgataccgccgtacaacggcacctgacaggagcgtgtcgtagggaaaacggcgtgaaccgcttcctacgaaaccgcgatctcggtaccagtcccaggacatagtgctggtacccacggtgacaaatatgaatcatagcaatccttaatataaatagaggacttatttaccttaacttaggttgcagctcagacagcccgagaatacaaccgacgacacggacgaggaaacaccaacaacagcagcagcagcggaaccaacggactaacacccaacaccacaggcgacggctgggaaccaggacgaaaccctaatcttcacttcactttatcttctcttcagggcggaggaactatatatatatttat

SEQ ID NO: 28359 - DNA, 8104 bp, Oryza sativa
tttgaaaatgtatttggcgaggattcaaaggaagggattgactttcgaatttagatttcggagacttgaattgggagaggagatttgaggcggaggattttgatttcgatgagagggaacaacgggatttgaattgagatccttggcacaacttagactctcacacaaagaacgaaaattttcgcaattaggattttgccgaattagtttttaacgcctcacgaaaagcggagcgttacagatccaccccccttacaagaatctcgaccccgagattcgaaggtggaccacacacacgaaaccaaaaagggatcttcagacttcttcacagcttcagactctgctagtcgttcttcaactttttgttgcgtgcttgccgcaaaacggtctggtattctgactcacttagcattcttcatcttactgtggctctgctcttgcctgtggaacctgttcttctcctgctccttcaacttgctcgagattcacaacttttccatttgtttctacttgcacatggttcagatgactttgtccaataggcggtgacgtcagtgagatagatccactgttcggtgccttcaaactttttggtctagatacgttgggaaggcctgtcgttggttgaactcgctttgacttgactttctgagggcaataccacgaatagtgtcccatctcatggcagatgaaacattcgactcctgccttataaccacgtctttttgaaggtgtagggcatggtacggagttgcttccttcatggctattactgttgatcattgtggcttgctgaccaggttctgacatagtcgaacgagacgtagaaccggaaccatttgaatgctgagatgctttctgatagtattgtgctggcgagtttgtttttcgacacaaatcttcttttgcttgaatctctagggacattactttgcgtctcttgtattcttgcatctctttttctgcatcttctagtaacaaggacttatcgaccatttgctgaaacgtcggaaagtcgtgagccaaaagtttcactcgcagtttcgcgtccattccttttaaaaattttctgatcttctttttatcagtgtctacatcttctggggcatatcgggccaatctattgaagcgactcaaatactcgttgatgcaagaggatccttgcttgatatttgcaaattcttccttcttcaaatcaattatgctttcagggatgtgtgctgagcgaaaggctcctgcaaactctgtccagacgatggtactagcatctgtatgggtagcacagtagttatcccaccaatctgcggcaggtcctcttaactgatgtgcggcgtaaagggttttctcttgcggagtacactgtaccagatttaatttcctttccatatctttaatccaatcatcagcttcaataggctcatttgtttgggagaactccggtggacgagaccccaagaaatcattcagttttgatttgccatcatcttgaaccatatggggttgacgctcttgtgtgtgttgttgttgcatagcaattatattctgaaccattccttgtattatatgcgtttgcatggccaggatttggtgaaggtccacgggtgggggttgattacctcttgcgacatcattaactgatccggaagcaaccgtatgatcactctcggcttcttgctcatctgtccggttaactggttgatcggggatttctgactgaactagctcttcctcaaaaccaaagcggttaggggcacggatctgacgggtggagcgacgtgccatctgcttctgagggactgagatctgactaacgcagaaatgagataagaaaaggaggaaaacaaaaacactacatcaaaacggttttcgaaatcacagaagacataggtggtgtgttccagccggtaacccaactggtctaacacctgaacacggactaccaaacaaaactcacacacgcacttagttcaccacaactcctaccgagcgggtgacggcactaaggttagcctaccaacaagggcttaactaagactcctagaggcttgagcacacctttctttaactgggcgtgaagacaggtttaccctaagataaaagtcaaaacgaacgactagctcctacttttggacaccaaagatctttcgcaaaactagagcaaaaggggacaacgacaccttagctttcacaaatagtttttgtattcaaataatgccatcctattcaggggtttcgatcctagggccaactaatgctctgataccatctcttgtcacaccccaatctgataccgccgtacaacggcacctgacaggagcgtgtcgtagggaaaacggcgtgaaccgcttcctacgaaaccgcgatctcggtaccagtcccaggacatagtgctggtacccacggtgacaaatatgaatcatagcaatccttaatataaatagaggacttatttaccttaacttaggttgcagctcagacagcccgagaatacaaccgacgacacggacgaggaaacaccaacaacagcagcagcagcggaaccaacggactaacacccaacaccacaggcgacggctgggaaccaggacgaaaccctaatcttcacttcactttatcttctcttcagggcggaggaactatatatatatttatagagcaagggtgagtactttcgtactcagcaagtcacgggaacttaggtgtttaatgcaagcttggaagagaggcaaggttgttttgcaaatcttttgtttgaaatcattttgaaatcactaagtgatttatttctttctaagtttgggccgaaaagagacttgcgtctcgattcgactttaagagatgcttttcaacaactcaattggtaatgtaccgacctcccgggtcagatcattacttctcggctcccagagccattccacttgattaatcggctcccagagctttttttcattttctcggactcccagagtccagctgcccagcagcacaacaatccgcttccactcgggaagcctagtctatgatgcccgcagacatcccgaatcacacagattcgtttctgaccactcaggtcgtccatctgccacataggctgattctggttacgattcccacaccacaacaacttttcacaaagcacaggcaaataaatctacgcaacgggaaccacctcacatccgcccatgaccgtgggcacggctgttcgaacagttagttaacctctgcagaggggtacactttacccacaagatacgaacttattccgaacacccgtcggtatcggaggttcgcaacaaagcctttcccaagccgacccagggttacctcatgccacatagaaggatcaaatcctcacataggccattttaggcgtgcacaaatcaaactccaaccacctttgatcggtaagtgagcaagcttctcgtccttgccttacccggaacccggtttgtccgaccccgccccggcgttcccaactattggcatgcgaggtttccctgaaccgactagttacttagccagggtgtcccattccaccttgtggttgcacttgattatgttcgatgagtttcccacaggaatcggtccttatatgcgaatacgggacagtgccacataggcacaacccccgcatcgcgagttttcacaattcattttattttcaaacacaccgacaccacatgtcgggttttgaaggcttcacaaacccatttcccaagttttcgacaagcaacggtgtatgtgggatatttggtatacgcgctcagagagcacggataccgaagtaccacaagggtggagcgacaaggattcagggtagtacgacctacagaaattagtgcgactactgggtaggtccgtcggtttggcacgcaaaccgaggccaagcaagttaagtgtgtgaatctaataatgcaagttgcaaacaaaataataatgacttttcaattataggagcaattgatcaaagggtgacttgccttgctcaaggtcttcacgaagcttcacgaatcttcgagaaaacccgcgatcgacgaaaatccgataaccgcaactatacgcaaacaatcgaaaacctaaacaaaagaccaaaagaaagatcctatttagactaattagtagtgccattaaatagatctcaattttacggaattattggaagtggaacggagtcaatcggaagagcggttgggaagatatgaattttggaagtttaatttggattttctggtcaaggaaaaggatttattaaatcctttggaaaaaggaaatggacgagggatgtgaatcagacttttctcgggtggcattggcgcggcccgagggacttgcgcagctcgggcgagcctaatgggccggcacggcctgcgaggagggcggcccaatggggcgcgggggagagagggacggcccggtggaccgattccaccgcgcggggtcccgggtggggcccgcttgtcggcggcaaggttcacggtggggagagcgcacgcgggtacggtgctagggtttggtgggtgcggtgtgcgggcggtgcgccgggtggatcggatggcagcgggcccacatgcagccggttggcgcaccgtggaccgtgcgcgcgaaggtggggaagggaagaggcggctgacccggtcgcagccgacgtggctccgacgtggctgccacgcgggccaacgggaggaggaagaaggggaggccgggaatgaacggcggacggcggccgagttcaccggagcaaggcacggcctcagtggaaaaagggagcacaccggggaggagggaagggacgagacgaagcgagccgacggctcggattcgccggaggatggccggaatccggcggattgtggcggcggcaatcgccggcgagcaaagagggaaatcacgacgagacgatgagggttcgattcaaagggggtggagcatctccggggttcaaggaatccgtttccggtgtcggatggggcggaaaatcactgaggagggctggcgacgagcagcggccttcgggagcggacggcaatggcggcgaggctgtgccgggcggcgacggcgctagggaatggtttggggagaccctagggagctcaaggacggtggtggtgcgaggtattggcgagagggcccacggcggctcgcgggcgggcgcggcggcggcgaagcagagcaacggcggggcggcatgtttaaggggacgagcgagcaaccgaatggctcggggcttatccaagatgatgcagatggcgagaatttgggcgaggagctcaccggcgtgcgggaacggtatcggcggcgatttggggatggaaaggggtggaaggccgatggcggcacgcgaccgagcggcggcgcacggcggatgacgccgaggcggcgcggcgtcgaggcgagtgcgccgggggagaagagagggagaggtggcgcccggagctcctcgtcacgcgttcacgctcgcaccggctccctcggtgctcggcgacagacggcgacggcaaggacagcgggaaggcaacaatggcgcggtgaaggcgagggaaaaacgagagggatatggggaggaggctcgggctttataggcgcggggaatgtcggtttggggagggaggaaaccgacctcgtgggcggtcaaggatgcaagggcggcgagctggcggtcgttgacgcgtgcagccaaggcggcggcaggtgatgacgccggcggtgtcgggcaaaaggaaaaagaagggggaaaggggcttgttcccttgccaaaacgagaaaaaggaggagggtgagtgaggaggaggaggagagggagagcagctgcttctcccactcttggacgggtgcggcgtggagtggcgggggccatggatgacgttgacgatgacggcggcggtcggtttggcatggagcgggggcaaggcggcagcgcgtggcgtcggcggcgcaagggctgatggcggcggcgaccggccggtcggccacctcgcgagcgcgcgcgggaatgggcgaaggcggtggaggttttgggcggcgacggcgggaagcggtgtcggcgcgagagagagaaagagagagagagagagagaaacagcgagagcgagagagacagagagagcgagcgacggctctctctctctcggctcacatgcgtgcaacgcacgtgcgaggggggggggaagatgatgggctgggaggggagatgggccgggggaggagaatcggcccatccaaaatcacagggaggtaaggtagacttttacagagaaaactgatttggatagaattggagagatttagggtttggattcgagttcaaatttgatactcgaactcgagggtttagggatgtatcaaggggaattcaaggagaagtcatgggaaagattcaaaaggaaaacttgggtatttgttctcgggaacatagggtggagtcaaggaaaggaaacaaaacgggggtttggacattttgggatttggaaatgtatttggcgaggattcaaaggaagggattgactttcgaatttagatttcggagacttgaattgggagaggagatttgaggcggaggattttgatttcgatgagagggaacaacgggatttgaattgagatccttggcacaacttagactctcacacaaagaacgaaaattttcgcaattaggattttgccgaattagtttttaacgcctcacgaaaagcggagcgttacaccgtcattgccaaatagagatagagctcgattaaggcaactgtatctaataattagggtattgagtcggtttgttagagatttggtaagagatcgccgtatatggtcttgtttgtttcttaactttagaaatgtttgagtcgtgtccataatggactaagtttgtactcgaggtataaatatgagccccatagcattgtaatacggaagccaatccaatacaactttggcgcatcgccactgttttacttttctcgttttccagcgagttcttcgcaagaggtaactcgtctcaatggcccgcgctgacgtgttaggctcgacatcgcgagtcattgctgtcatatgtctttaatctattcttagcttctcaatttagctctatcggctgttgctcacttcagggtttgtgttggttttagttaaattgtcttgctagattagattagctaaggcacctaccatcctgaaaagtgtctaatttcttgattgtctacactgtatgtttcttttcatactttaagatgcatcatcccttgcatgcttagaaccatgcaaactagcctacaattaggcataataaggatagtatcgggtttcagccgatcttacctaatatgcatgtttcacccccctgtttcatgtatattcgccacttatatagatagatcgttttatataagcatatcaagttttagtcagtatcggctagattcctacaccttcatgcttgatttatatttgatatgtttatatggaccaatctgtttatataagtttgtactagagtattagctagtacgttatttttcttggtctaaatattgtcacatcggctactttcataatactgtcttaaatcaatctattgaattccatagattgtattacagtcgattgggcgtgtttagggtttattattatttcatatatccagattatagccgatttggtctaattctatcggctgagaccatcaacgatatgctatcatcctatcggccgatcaactatcggtcgattgattatgcttttattcttttttgctgattgcaggattaaatcagctggcacacccttgacacactcgaggctagcattggacctgcactggagttaagcagatctcccatgccaccgtattttcacatcaaaagtcgtttactagtccatttcaccatccctgggccacatcctattttgcccgttcgtgctatgtagtgcagtcattgagttgtaatctgcgataggcagcctattttcaccagtagatatggggaatgttacatgatagtatcccattcggatgggatgatacctagctaggtataaggcgatacctcgaaagtatcatcttctccgaacgagttatcagtcgatacctactaggtatcagacgatctct

SEQ ID NO: 28360 - DNA, 8827 bp, Oryza sativa
  unsure (1)..(8827): unsure at all n locations
cttaggagtctcaaaattaagtgtactgcatacatgtgaataatgcactaaggaaaaaaaaggcaaatcatatgatagaatcagtggctaacactgtgccttctttcctttgtatttttgcagcttaagttactcaaaactcggagaggttacctgcatacacgactgtacacgaaatgcttatcccgctgctgctactgttctacggtgttggcaacatcagtggctcaacgcttcctgataacagcacagatatgctctctcttcttggtttcaaggaagccatcaccaacgatccgtcaggagtcttgagcaactggaacacaagcatccacctctgcagttggaacggcgtctggtgcagccccaagcaccccgggcgagtcacggcgctcaacctcgccggccaaggtttgtccggcacaatcagcagttcagttggaaacctgacttttgttcgtacgcttgacctatccaataataacttctctggccaaatgcctcatcttgccaatctccagaagatgcaagtccttaatcttagcttcaatacactggatgggattattccaaacaccctcacaaactgttccaacatgaggaaactagatctctatacaaacttgctagagggtgcgattcctccgccaataggtcggcttagaaatctagtttacattgacctttcccggaataatctgactgggatcatcccggcaagcctaaaaaatatatccctattagaaacaatctatcttcaacgcaaccaacttgaaggaagcattcctgatgagcttggccaattttcaaatatttcgttgatggccctaggggcaaacaggctatcaggtaatatcccagcaagccttttcaatttgtcttcccttcgaatactagaattacgtgcaaatctgctaggagggattctgcctagtaacatggaaatcatctcactaatctacaacacctcttcatgggccagaacatgttcaaaggtcatgtaccagcttccttaggcaacgcttcaatgctagaaacaatagttttacaatctaacaatttcaccggcagaatccctacctccctcgggaagctatcaaatttgtataagttggaccttgaactaaacatgcttgaagcaaaagatactgaaggatggaaattcctggatgcgttgacaaactgcactgctctagaagtgctcgcattagctgaaaatcaactacagggagttataccaaattcaatcggtagcctatcgaacactcttcggtatctcgtgttgggtggaaatgaactatctggcatagttccctcgtgcatagggaacctttctgggttaattcaactgtcattagatgtaaacaagctcacaggttcgatcagcccatggattggaaatcttaaatacttggaatatttaaatcttggaaagaacagattcactgggcctattccatattctattggcagtcttacacggctgacagagctctatctggaaaaaaatgcatttgaaggtcacataccaccctccttgggaaaccctccactactcttaaagctggatcttacctacaacaatcttcaaggcaccataccttgggagattagtaatcttagacaactcgtctacctgaaacttacatcaaacaagcttactgggaatatacctaatgctttggaccgatgccaaaacttagtgaccatccaaatggaccaaaactttctcacaggaaccattccaatttctcttggcaacctaaaaggcttgagcgtactaaatctttcccataacatcttatcgggcaccatcccagcagtactgggggatctacctctactcagcaagctggacctttcttacaataatctccaaggagaaataccaaggattgaattattcagaacatctgtttatcttgaaggcaataggggactatgtggaggagttatggatctccatatgccatcgtgcccccaagtttctcacagaaaagaaaggaagagcaatttgaccagattgttgattccaatagttggtttcttgtcactcacagtgctgatatgccttatataccttgtgaagaagacaccaagaagaacatatctatcgttgctttcttttggaaagcagttccctagggtttcttacaaggatatagcccaagctacagggaacttctcacagtcaaacttaattggaagaggaagttatggttcagtatataaagcgaaattaactccagttaaaatacaagttgctattaaagtttttgacctagagatgagatgggcagacaaaagcttcgtatcagaatgtgagatcttaagaagcattcgacatcgaaaccttcttcctatcctaacggcgtgttcaacaatagactatagtggaaatgatttcaaagctctgatttatgaatacatgcctaatgggaacttggatatgtggttgcataaaaaaaataccgctgttgcttcaaaatgtttgagcttatctcagagagtaaatatagccgtggacattgctaatgcactgtcctatttacaccacgaatgtgaaagatctattatccattgtgatttgaagccaatgaatatccttcttgacagtgatatgaatgcatatttgggagacttcggaatttcaagcctcgttcttgagtctaaatttgcctcacttggacattcctgtccaaatagcttaatcggattgaagggaaccatagggtatatagctccaggtatatatggttattgccacatcttcaattcatgaaaggcaatttgttttctgaattaatacttagacgttgcattgtactaattagtgtgattttatcttttcttttagagtatgcagagtgtggcaatgcatcgacctatggggatgtttacggttttggaatagtgcttctagagatgctgacaggtaaaagaccaacagatcctatgtttgagaatgagctcaacattgtcaactttatggagaagaacttcccagagcagataccacatataattgatgctcaactccaagaagaatgcaaaggcttcaatcaagaaaggatcgggcaagaaaataggttctataaatgcttgttgtctgtagtgcaggttgctctttcgtgcactcatccgatcccaagagaacgaatggacattagagaaatagctattaagctgcaagcaatcagaacatcctatgctgaagcgaccaagcgagacgatatgcttcgaagaagggagttacaatgtaccattgaacttgtgtaattgtgttgtctgttggctttgaatacaacgtgcataaaacatgataaattggccatcagcatacactggatgtgtgtgtgaggaactactcttctgtactgcaatatatagttgtgggttaattttatcatccttaaaaagatattggaaagtaacatattttgtaggtaccttgagttactttctcaagaatcgtaaaatttctcatagttatgtgtgcgactatggtggaaagcagtattggtacgcactgtgcattgacactttgatttgggtttcacaaatttggggaacggttcctacaggctacagtttatgtaactgggataatgggattgtgcatgaaggatatatatttttaagccgggccggcctaagataggcggacaaaatttacttaagaaaggagtatggattgtgaaggatataagctaggtggttctttggacagcttatcatggcgattaatatttaatactccaggaacataaaccaaaatctgcataattggtgtcagattgcatggaacaacacagctaatccgcgcttatcattcaggagttaggactatcacaacctaagttgggtcgatccctaaatccaaatcccaacctgcagttactgatcactagaggagtatataagattgaggaaaccctcgggtaccttacctgtaccgtgcagtggtatatgcccattcgacgaaagccgatccgtgcgctgccgcgacgtcttcctcttcccgctaggagaatcgacggccttagccaggacgaagtgtctgattccggtaacgatgagggcccgccggagcctgcgcccccagccaaagcagaatgcgtctcccgagctcaaggggaagaagaggaagacgccgccgcgcgaggtcggtgagtcttccgcccggcgccaacgtgcaccgccgcggcgcctccatcctcagctcctgcagggttgctcggctgctgatagctttgctttgttgggccatatgtatactacttgggccgttctaccacttctagcaggaatcctatcttacgcagacgcgctagcaaactaactcgcgcacgatttggatccactaggcccaccctatcctaggctgcagttgttagcatttttttctctttttcccgtgattttctctcctcgtttcatgtgcaacctttttttctcgcctgatttttttcttttttattgcgcgatttttagctctttttttttgcaagattattttttccggtgtgctatcaggctaggtactcattttattttcaaaaatattgatgcaaaatttaaaaaattctaacacaaaaattgaaaggttctagctcaattttgaaaactttcaactaaaaatttgaaactttcaactgaaaatttaaaactttcgatcaagatttgaaaactttcaactaatatttgaaactttcaactcaagattgaaaactttcaactcaaaattgaaaaactttcaaatccaatttgaaaactttaaaaactttcaaaccaaatttgaaaactttcaactaaagattaaaaactttcaactcaaaatttgaaaactttcaaatccgatttgaaaactttaaagttaaaattcaaaactttcaaatcaagtttgaaaactttcaactcaaattaaaaaaaaccatatccatttttttactttcaggtctaaattgaaaattctcagttcatcttttaaaattttaattctactaatttgttcgttattttgctataaataattacgcttttacgctaatctaatcgtgtttagcgctaagcgggcgcttagctacgtgtggcatggcgacgcgcacgcgagttactttagcagcgcgtatgcgtgagctagtcgtgccccacttctagagccacggcgcgtgcaaaccctgcgttgtaacgagcttggcaccagggggcaacgccaaagaggaatgagttcactggcctcttaactttacgtcgagtttgcatgacatccttaatcccaataccagaaatcttcacccctaaattatacaaaaccgtaaaatttaggtcctagggcagtatggtctctggtttcattaacgtggcatcctagtaagcaaaataaaaaataaaaaaattacaggatccacatgtaagcgagtaaaataagaatatggggcccttatctcttctttctctcttttcttctctcctcattttcttttctttcttatcttctcttctcttctcttctcttcagcaatcttgggaggcaggtggcgtgagagaggggagatgtagctggtgagcccggccaagctccgccgccttgagcgccttgcgacgggaggagggaacggggtagaggggacgcggccggtatgagatgggaggggagaggcacggtgattgggatggcgaggtgataggggacggggggcgcgtgcacgacgacagggactacgaggcgatgggggatggagcgtggggcaggcaggcgttgtgatggcaactcggtgcctccttcacgggggagccgtggtgattgggacggcaaagcgagcggcttggtgacggggaacagagtgtgggacaggcgagcgagcatcatgaaccagcggtcttcgtgggcggcgacctgttgctcgaggtggagcggcggtgtgacccgcggtcaccgaggtcaccacctgcttccaccaccttttcatggtcaccgtacggcgtcgtccctaggcgtatactatgagatcttgcacgggcacatcgcccgtggcttgctatagtctccgtagcccacactagaggatgactcgccttgcggcttcagtgtttagacgggcaccgatagcggcgacgcctgctgcgcctcgncggcatggctccggctgccccttgtgcccctggtcccatcaccaccacaggcttgtcgagggtggtgaatggtgctccatgaccgcaccttgccacccactacacggtgaccatcgtcgaacactatcgagttgtggatcatctgtgacatgccacattttccgctggatctgcggcggtcaccgtgtccaccaccaccaccacaacaacaatcaccacaagcgtcggcgtgtcgtagacagccatgggggacgacgagaagggcggcacgaagcgcgcaagaggagcagcctcagcagtatgaggcgatgacgaaggcccctccatggtgcagccgctccagagtgaggtggcctcggcggtgaccgccgacggcaactcgcagcaggtgcagcagtggcctgcgcccacaccgggctgatgttccggctcgtcagaggagtcgacgacgctgacaccaagtgagcgctaacatgtggggcccaccgtacaccacgtcagtgaaaccagggataaattgggtctatactgcctcaggaccctttttacatggttagggatagttgaggggtagagatttctagcattgaggattggggatctcatataaattcgatgtaaagttaaagggacgtcaggtgaacttattccacgccgaagacgcttcctcgcgagaagcatatgcagccactagcccactaccttaagaggggaaaaagataagaaaaggaaaatcttcggcggtcctggcggatttcattcccatttccccaacacgcaaatcagagaacactggcaagaggacaaactactggcgacgaaaaatcgaagtaaacagtaaacaccaaaggagtcgctctctcttctcttctcttctcttctcttagcaatgggccatggcagtggatgcaacactgctgtagaggccgtggaactgcgttttaaaagttctgtatccaggggcctaaacccgctgtatatgcaagttaattagtatctctagtctacggcaaaccgacgattacagggagagttcgccgtggcggtgctccctgttcgagcagaggttcgttaactttctcttgttttgttttctgattagactgtatgcataaagcactgcatgtcttatttactgcgggctctggcttgaataggcctaaccactcctagttcccgtctacctacaatgacaatataatacttgtgtgtgcttgacttatgtgatatatctccacagataacgatgtgagagagaacgacggaaatagtgacgggagtggcatggttttaattttaaaaatttacagtggctactagccgataacgtaaacagtactatagtagtgacatttttctgatttgtcacatttacagtggcatggatccaattaaccctatacagtaccatattcactcgtagattttattatgagacagataaagcaatagcgaagctttcttttctagccgtatgtgttttacttgggccgtacaaccactgctggtcactttgtacgttacgcacgcgctgtgctcaacctctttgtggacaattgcgcgccgcgactgacacttcgacggtaactgctagatatctgcagcatgtgaagtaaaactttggcaagaggacgtaatactggtctactgcctccggagatggaaaatctggatcggtaaaagcggtcgagaactcgagatacggcagagaaatggacgagggcgccagatgtgacactgctgtagaattgtgttttttaaggccattgtccaaggaccaactgcccaatctggtactacttgtcttcggcaaaacagatttacagggagaattcgcaaccgctgttcgctccgagtggagattcccgtcgattcctatcagtatgccctacgcactgcctcagcgatttcatattgtgcacatggacataaaatacatcatatgcctattcattcatattttgcaggtgatatgtgttccgagcaagagcaacccgtgaaactcgccatgtttatacaactggtgttgttgctgctattttatggagttggtaacgtcgtccattgctcaactgtccacgagttcagcatcgatctgcaatcactgctagatttcaagaaaggcatcacggaaagatccaagcggagccttaagttcttggaacactagcactcacttctgttggtggaaaggtgtcatgtgcaccactgcacggccgtttcgcgtctcaacgctgaatctctccgcccaaagcttggcaggggaaatcacctcctcccttgcaaacctcacgtttcttcgtgcacttgacttgtcctcaaatcgcttctttggtcggttccctctccttaaccacctacagcatctgggttttctttacatgaatgacaactcactcgatgggattatttcggacacacttacaaattgttccaaattgacacaaatagacctctctaataaccagctgcagggtgcaattcctcctagaataggatccctagagtatctgaaccttggcaataatagtctcactggaatcatccctgcaaccattggaaaccttgtcaaatttggatatttgaaccttggtatgaataatctcactggaatcatccctgcaaccgttgaaaatctcaccctgttaacagttctcaggcttgaatacaatcagtttgaagaaaaaatccc

SEQ ID NO: 28361 - DNA, 3613 bp, Oryza sativa
atccaaatttttatttggtttgtatgaatatgacgatccaatttcttgtttggttggaggaatatagcatggatgggaaaagctaaaagttagtgggacccatttgtcatatatatatatatatatgatacccatataggactccatggtgctcgggctccaaggtataaaacacacaaattctctcaaatttttaaaaattttcaaattgtgagtatatacctaggtatatgaatttgattcatacaaatacctaacaacaaaacaactcaaactcaattttatttcacaattcattattacatacctaacgaattatatgtttgaatgttatatacctagaaccgaaatctaacaaaaaaaaagttcaaactcagttcaaacttgtttgagcttgttagtaaagaagttaatgttcatatctaaacatttaaaaaaatttcatacttattcaaattgggtatatacttaatttgaatcttggagcccatactccatgtagcaccagttaatttacctatatatatatatataatcatccgatatcttgttttaaagatttaattataacaaatataatggtgtaatcaaatcataaattagataaacggtttaggagaaaaaatcatttggagattgcttaaaaggaaatcaaaccaatcacagccaatcagaataggacacatcacccagtctaaaactggatggcttcatccagccaaatcgcccggatgcactcattgagggaatattccctattccgggccggccctatccacccttccctccaaccagacactaaaaaaatcggatgatcatatcccatcaagtccacctaaccaaacacacccggcatcaaagcaaaccaacccaaaatctctgtccctgtccggttccggatgaaacatagagatggaccaaaagtaaagatctctgattgaaactggacatgccacaacaaacttgccagctcaaacagtgacgagcagcgacgggtgacaaggtgaaattttacaacaactggcaagtttgacggactcaaggtcttcgttccaacggcggcaaagctgagataaggcttgagcttgagtgcttgaccatggcatatgcaagtcgtggatgtgaggccgctgaaaaaccagttttaagcccctgcaccctgaggcgtgagccagattagtacccaactcaaagttcacacttcacacaccacccagccaaacaaagcagaatttccatcatgtgcactctgggcaagcagaggggcagaggtgcgctgctcttttatgcctggttatttggttaatacttggcttttttactccatcatctttagttagtacgtattaaaattagttgttgcgagtgagctgtgaaacatttcagaaaaaaaatttagaggactttcagaaagttgcaccttgtttttttaatgaagtactttctccgttttatattataagactttctagcattatcctatatatgttaatgaatctagacatatatgtgtgtgtctagattcattaatatctatatgaatgtggacaatgctaaaaaatcttataacctgaaacggaggtagtacaactttgtgtttcaaattacatttagactgcattcgtttctcacttctcccaacctctactctctcgttttccacacgtacaatttcctaaattgttaaatgatatgtttttttaaacattatctataaaaagttattttaaaaaatcatattgatctattttttaaaaaactaatatttaattaattatgtgctaatgagactctccgttttacattcgctccatttgcagcatggtagggactaggacttgcgaagttgggattgtaagattaccagagttggagcattggagggtagggctgattgcgtaaccatgaagtagctccagtagcgatcataatatgtcgcaatatttatgtttcactaattgcaggcagcgagggcctgatgtctgtcaacaaaacggtgaaactgaccatgcccgttctattggcattgttgctgttgtcctatggaactggaagcattcgttgcacgacgatcgctgggaacagcacggacgtgctctcgttgctcgatttcaaagccaccaccaacgatccaagaggagccttgagctcctggaacaccagcatccactactgttggtggagcggcgtcaagtgtaagccgaatacccgagggcgagtcacggctctgaaactcgcgggacaaggtttatcaggccaaatcacctcctttcttgggaacttaacggaccttcacacacttgacttgtccagcaataatttctctggccaaataccccctttaaccaatcttcagaagttgaaataccttcgtttgggccagaattctttggatggtataattccagattcactcacaaattgctccaatctattttatttagacctctctaataacatgctagagggcacaatccccccgaaaataggtttcttaaataatctctctgtattggccttccctttgaattttctcaccgggaacatcccctcaacccttggcaatcttacaaacttgaatataatgctcctcgcaaataataagattgacggaaacattcctcaagaactggggcaactgtcaaacttggggtggttgtccctaagtgaaaacaacctatcaggtggttttccgcagggattcttcaaaaatctatcttctcttcaaatattaagcattcagacgaccttgcttggtggcacattgccatttgacattggcaatacactccctaatctcacaaaacttttcttggctgataacatgtttgaaggtcatatcccagcttctttaggcaatgcatcattgctacgagggatagatctatccttaaataattctactggccatattcccaactcttttggacggctttcaggtttgtctacattaaaccttgagacaaacaagcttgaagctagggacaaccaaggttgggaattcttagaagcgctcagaggctgcaacaatttaaatgtgctctcactagctgacaacctgttatttggggacgtaccaaattcaattggtggcctatccatcaacctgacaattttattgttgggcggaaacaacctaacagggatagttcctctaagcattgggaaccttcaaggcttaatttcattggggctagataataatggtttcagtggtacgattgagtggattggaaaactgaaaaacttgcaatctttatgccttcgaaataacaatttcactgggcctattccatactccattggcaagcttacacagctgacagagctctatctgcgaaacaatgcatttgaaggtcacataccgccctccttgggaaaccctcaactactgttaaagctggatcttagctacaacaaacttcaaggtaccatacctttagagattagtaaccttagacaactcatctacctacaacttgcatcaaacaagcttaatggggaaatacctgatgcattggggatgtgccaaaacttagtaaccatccaaatggaccaaaactttctcagaggagacatgccaatttcttttggcaatctaaatagcctaacc

SEQ ID NO: 28362 - DNA, 1383 bp, Oryza sativa
catctgcttatctcgatggcaattcaagactttgtggaggagtgacagatctccatatgctctcatgccctcaagtttctaatagaataaaaagggattctgatataacaaagagggactacaatctggtcagattattagtaccgatatttggctttgtgtcactcacagtgctgatataccttacatgcctagcaaagaggacatcaagaagaacagacctattgttgctttcttttggaaagcagttccctagggtttcttacaaggatctagcccaagctacagggaaattctcagagtcaaacttaattggaagaggaagttacagttcagtatatagagcgaagttagctccgactaaactacaagttgctcttaaggtttttgaccttgaagtgagatgtgcagataaaagtttcttatcagaatgtgaggtcttgagaagcattcgacatagaaaccttcttcctgtcctaactgcatgttcaacgatagacaatagtggcaatgctttcaaagctctgatttatgaatacatgcctaatgggaatttgaatatgtggttgcataaacaatttgcaagtgttgcttcaaaatgtttgagtttagctcaaagagtgaatatagctgtggacattgctaatgcattgtcctatttacaccacgaatgtgaaaggtctattgtccattgtgatttgaagccaactaatattcttcttgatgatgatatgaatgcatatttgggagacttcggcatttcaaacctcgttattgagtctagagtcacctcacttggacattctagtccaaatagctcaattggattgaagggaactatagggtatatagctccaggtatatatggttatttccacatcttcgattcatgaaaggcaatttgttttctgcattaatacttcaacattacattgtttaattagtgtgatttttatcttttcttttagagtatgctcagtgtggccatgcatcaacatatggggatgtttatagttttggaatagtacttctagagatgctgacaggtaaaagaccaacagaccctatgtttgagaatgagctcaacattgtcaactttgtggagaagaacttcccagagcagataccacagataattgatgctcaactccaagaagaacgcaagagatttcaagcaacagccaagcaagaaaatggtttctatatatgcttgttgtctgtattgcaagtggctctttcttgcactcgtctgatcccaagagaacgaatgaacactagagaaatagctattaagttgcatgcaattaaaactttctatgcagaagcgaccaagcgagaaagtacgctttgcaggagagagttagagtgtgtcatggaactagt

SEQ ID NO: 28363 - DNA, 4831 bp, Oryza sativa
gatctaagctttgattctctttctgaacagcttgtcatggtaattaataatacgaaaatgaatcataatatgcacatctgttgtcagattacatcggagaacactgccaatcgccaaatccactttttttcacttagacctaggactatcacatccccccggcataaaaataaggactatcgcatcctactaagttgggtcgatccctaaatccaaatcccaacctgcagttggtaatcactagaggtcagattgaggaaaccctcggcctcgggtacctgaaccctgcagcggtatgcccactcgccgaatgcccgtccgtgtgcctcttcgctccgccctctagcgaagtgcgccgccgctgcagcgcctgcgcgcgagacgtggactgtggagtggtcgggtgctacggtgctacctccgcgtccgccgcaacgtcgtggagtcgcgctgttaagtggaaccaaacaagacagggcaaagctactccttccgagttccgtcaaaaaaaaaaataaacatgggagggatgtgatattttctaatacaatgaatctggataaaaggccatccagattcattttactagataatgtcgcatccttgtctaggttatgtttttttaacaaaggaagtatgttgcgacgaagatggataggctcttttaggctcctagtagaatggcagtttggcaaggaaaaagtccctcaacttatcatcgagttacaaaatcgtcccccaaccacaaaacaagatatatagcatcctcaacttacaaaaccgttcactttaggccattcggtggttttgaccccggtattgtccgacgtaacagctgactcggcgtgggacccgcatgtgtcgcacatgtcagactgccctcgtcagccacttcttaccctcccccatcaactcacttcctctcccctcccctctccatgggcggtggccaacggagagcagccaggacacggcaggacggtgtggcgggcacggtcggcgctgcagaggagcacatcgcggtcgggcgccgccatggcctcttttgtcttcgtcatgccttcgtcgccgctatggccttccttgtatcctctccccaagggtcggcggcggcgagcacggcacgccgcgacgtggtgtgccctgttgaagtcaccccggtcgacgaggtcggcacacgcgagcggggaggggcgtcggtggcaggaccataggggcagagcgaagggggagctggaggggaacggtggtggcgaggtggaggaagagggcgccgcttcgacgaaactcccatccagggcgagggaggagcggaagacagagaccgcggcaacgggagggaggtggggatggaggcggcgaggagagagtttgccggttgacgcgctgtcgtcgccgccgttgtccatcctgcccttgctcatccgcgaggctgtcctcaacgagtcgccgcctaaaagtgctttgttcatagtttctagatcaaaaaagagatctatgagtccaggcataccaaaggcgtggccgccgctcatccacatacgccatcagtcgctcatcacgcgttcacgctccgccatccagcgacggggcgaccacgtcaccgcctggcaaatccaagaagaactagtaggaggggctgaacaaaccgtataaaactatagtcccctcttctaatgaatgtatgacataataaaattctagtggggttttatggggcctcttatgattacaataccggaagtggaggctcgagaccctatagcccccatggtagatccgcctgcctgcaagcctagatcgagtgtggcggtcagcggagtttggtcaggtgaagcatcgatgaatacaggcagtgtcgtttcttctgggcttggtgatgctgcaccatttctccctggaaaaagtacaccgaaggtccctcaacttgtcatcgggatacaaaaacgtcctcaaaccgcaaaaccagatacgcaacgtccctcaactatacaaaaccggtcacaataggtccctcggcggttttgatcccggttttgtcttacgtagcggctgagtcagcgtgagacccacgtgggccccacatgtcagtgtaatccacgtcatcaccctccctctctccccccctcttctctcccttcctcaaatctctctctctctcacttatctgcaaggtagccgacgcgagacgggagaggaggggggcggcgccgcgacagcggcggcggtggcggccgccgccgccgcagtggggaagcatggcagaggcgcggggaggccggcgagctcctcccaagtacaaatccgacgtcggcttggcggtggcggcgaggcgggaggaacgcggtgaggacggcgacgccatgagggcgctcgaggaccggtgccatgacggcggggaggcgcgggaaggccggcgtcggcgtcggcttgttgatggcggcgaggcgggaggaacgtgtcggcgccgggagccggagcggcaggaagcaggtacaggcgcgatggcgacggctcgccaggaccaagcgctgtcgtcgctgggagctggagggggaggagctcgcgggagttgttgaatcgaatgttcgatggcgagcgcgccacgacggggtgatttcgcaagtgttgcgtgaagacggcaggtcggtttatatagagaagggtcgcttgatcagggcgctcgcacgatctctactgcgcgtaaccgaaccggataagtcgcgcgtaacttatccggacttcacgccgtttgcacgcaccggatttttcggaacgtttccaaaacaaaaacgaatccgaatttgtagcaaaacaaaactgcaaaaggaggctgcatctgcgcaagggtgaggagccaatttttcggaccattcgacgcgtacgtcgtgcacgcgcgccgccggcccggcccggcccggcccggcccggcgagcgagcgcgcgcgtgtgtttcccctcttctctccaccacacatgcttcaagtggctaggaggacatcctcccttttaaggaggtccccctctcctagaataagcaaggtggtactaaactccacatgcatgccatcccatgaggtgggcttttgtgattttccaaagaattaatcttcgagtgggctaaggcccattcattaattccaacaatcccccaccaaatctcaaaatcccactgagatttgccttttccaatatactgtttatataccagcggttcgatggagaccaattaaggttgaacatccacctagaactccaagctacacttactcacaacttgaacaatggactacgccttgaattgcaagtcttgtgcaagcaagtttcactcaaagtcttatctgatactagaccgtctgtagactacccctcgggtggagcgtataagtcatactcctaggtctttagtaagcttcctagaagattcacccaaaatcttcatagactgcgaccaacagtcaagctcacaaaggtgagttctttcaaaaatgctctgcaggacaacatcttcgctaattaaagccaacagaactcattaaggcatagccaacctgccttgcagctcacgagagtatatgcatcttcacttggagagggtatatatattggtactctcctttagtttattaatggtttgttcttcccaggatctaattcacgggatctccgatcacataaactgggttaccaccatagtataactcacatgggtctcaaacccatctccttcgatgcattgtctatcacatttcgtgatagtcccttcgtgaagggatctgccaggtttctcgctgtttggatgtaatccaacgttataactccggagtttcttaatttcctgacagacttcaatcgtcttttcacatgtctagacgatttcatattatccttagaactattcactttgacaattaccgtttgattgtcacagttcataaggatagccggcaccggtttttcaacaataggcagatccattaatagatcacgcagccattctgcctcaacagtagcagtatccagtgccgttagctctgcttccatggttgacctcgtcaaaatggtctgtttgcaatacctccatgaaacagcaccaccacccagtgtgaaaacatatccactagtggctttgatctcatccacatcagagatccagttagaatcactataaccctccagtaccgcaggatacccagtatagtgaagccccaattccacagtacctttcagatagcgcattactcgctcaagcgcacgccaatgatcatctcccggattagaggtaaatcggcttaacttgctcacagcaaaggagatatcaggcctagttgcactagccaggtacatcaacaagccaatgatttgggagtattccagttgattcctagcaattctcttgttcttgcgaagcaacaagctaggatcataaggtgttggagaaggcttattatcaatgtagccaaaacgattcaagatcttctccacataatgggactgcaagagtgtaatcccattctcacctctaattagcttaatgtttaagataacatcagctactcccaaatccttcatatcaaaattttgagacaagaatgatttaacctcatttatcacctcaaggtttgtcccaaatatcagtatgtcgtcaacatacaagcacaaaataactccctcacccccaccatggcgatagtacacacatttatctgcctcattgactgcaaagcctgcagatgtcaatgttttgtcaaatttctcatgccattgcttaggagcttgtttcagaccatacaaagacttcaacaatttgcacactttgccttcttgacctt

SEQ ID NO: 28364 - DNA, 1571 bp, Oryza sativa
ttcgaaccactatgtgtatccttcattgggaaaaagctctcaaagaaggtagcattacgagactccataattgtaccaacatgcatgtccggtacctcggatttaactattaaaaatctataggcaatgctatgatgagcatatcccagaaaaacacagtccacagtcttaggtccaagtttgcgcttcttcgttattggtacattgactttcgccaagcacccccatgtgcgcaaataagaaagtgatggttttctaccaatccatatctcatatggtgttttgtccttatttctgttaggaactctgtttaacacatgatttgaggtcaacaatgcctccccccaccatgccttaggcagtcccgcggtgtccaacatggcattcaccaagtcagtcagtgtgcggttcttcctttcagcaatcccattagacttgggagaatagggaggcgtcctctcatgtatgatgccatgttcctcacagaataagtcaaactcgttcgagaaaaactctccaccacgatcagacctaagcctttttatctttctgtcaagttgattttcaacttctgccttataaattttaaaatagtctagagcctcgtctttcgttttcaacaagtgcacatagcaaaatctagtagcattatcaatcaatgtcatgaaatatcattttccacctttcggcaacaccccattcatttcacaaagatctgaatgtaggagttctagtggtgccaagtttctctcatcggtagccttgtgaggcttgcgaggttgcttcgattgcacacaactatggcacttagaacctttgacaatggaaaacttaggaattaaacacatgctggaaagccgagacatcaagccaaaattaatatgacataaacgtgaatgccaaacattagcctcatcatccacactgccacaaatatggttcacagacttattgcagaaatcagaaagggaaaagcggaacaggcctccgcactcataacctttaccaataaaatatccatgtttagacacgactactttattagactcaaaaaccaacttaaatccgtctctagtcagacgggagccactaacaagattcctgtcgatagaagggacatgctgcatgttcttcagctgcacgatcttttccgaagtaaacttcagatctaccgtgccaacaccatgaacagaagcatgtgacccattccccattaggacggtggaaccccgtgcgacctgataagaagaaaacaatgagatgtcagcacaaacatgtacattggccccagtatcaacccaccaattagtagattgattaactgaaaaaacagtaggtaaattaccatacccgcttccatctccagtgttgccaatggtcacattagcagacttagaagtctgccctgcaggtgccttcatccccttgcgctgtggacacttcctagccagatgaccaacttggccacacacaaagcaagtcctctcatcctgattaggattgttgttgttcttcttctgcttcttgaagttggtggtctgctgagctttgtatttccccttgctcttgtt

SEQ ID NO: 28365 - DNA, 12917 bp, Oryza sativa
taagaatgcatcccacaaagagagtagtggcttcctcgaattgcttctgctgttcagcagtaagaactccttcaggtttgccagtactcacccagaagcatttcatagctgtcagccacagagtgaccctgatctgccatctcttaaaatgcacaccggtgaatttatccggcctcagtgcatcggcaaaaccagccatagtaaaatcacagtgcctataataaggtttttggattgttgagattatagacatataatgatttaatctattccataaataaatcatgacattacagatgaaaactagcatgaacgcatcattagatctatacatgtaaactacacagtataacatgaacagatcaaatatgcgcaacatattgaacacgtaccgaggtgacgtaaagaccggttgcttggttgaaacttttcgcaggtgtctacgaagacacgaaacacgcgagcgaagaggaaggcgagccgtcgcgaacaaacagggagcagtcgcgcgaagcgcttcccaaaaaccttattgccgccttctcccggtgcaggacgtcgaaggcagaggttccggagacctgctctcccgatcgccggtgcacgccggcgagcgggatggagtagtctacgagcgacggcgcagtacagagtaggaggcaaaccccagattgatttcgcaagtgttgcgtgaagacggcaggtcggtttatatagagaagggtcgcttgatcagggcgcccgcacgatctctactgcgcgtaaccgaaccggataagtcgcgcgtaacttatccggactccacgccgtttgcacgcaccggatttttcggaacgtttccaaaacaaaaacgaatccgaatttgcagcaaaacaaaactgcaaaaggaggctgcatctgcgcaagggtgaggagtcaatttttcggaccattcgacgtgtacgtcgtgcacgcgcgccgcctgcccggcccagcgaggcgagcgagcgcgcgcgtgtgtttcccctcttctctccaccacacatgcttcaagtggctaggaggacatcctcccttttaaggagatccccctctcctagaataagcaaggtggtactaaactccacatgcatgccatcccatgaagtgggcttttgtgattttccaaagaattaatcttcgagtgggctaaggcccattcattaattccaacaagaggtacatcgagcactacgagaaggagatggggaagcctgtgttcgccgtcgggccggtctgcctcgtcaacggcgacggcgacgatgtcctgaagcgcggacgccgcggggaagcgggcgctggcgtggctcgatgccgtcgacgagcggcacctgctgctgcacggccgccgtcgccgcagctgttggtatcagctcggcgtcgcatgaacaccacgcgacaggaagccgtcgacctcggcggctgtcgacctcagcggccgtcgaccacgcgaggaggttgctcctagactgcagcgcggcgcggaggtcgatcccaatcccgatcccagcgccactgtgccaccgcaacgcccaccgcggcgactgacgggggagcccgcgcgctgctcctccccccgccacccgcgcgccgccatcccccgccgcccacgcgcagctcctccccccgtcgccagcgcactgtcctctgccgtccgcacgccgccccttccccgccgcctatctgcaactcctcccccgccgccgtctcgtgggactcgtgggtggtggccggcaggggagcccgcgcgccgctcctccccccaccgcccgcgcaccgtcctcaccttccctcccccaccaccacctccaagaaatgctttccccgccggatccccccgcggcgcggtggccggcgtcctcctcctcctccgccgccgcatcgacggtgtgccccactgctccctcccggccgcctccgcggtgtcgtccactcgtccctgcaagtgtgagagctgagagcgagaggaaggaaagagaaacagagaaagagaaaggggaagagagagggtgacgtgggcaccttacatgtggggcccacgtgggtctcacgctgactcagccgccacgttagataaaatcgggatcgaaaccgccgagggatctattgtaaaattttgtatagttgagggaccttgcatatcttggtttgcggtttgaggaagttttcttatctggacgacaagtcgagggacattgagtgtactttttcctttctcccttgattttgtgggccgtttgtcgttaatatggcccattatttgttggccagttcgttggctgggccttggcctgggtcataaggccagtttacctgagtgaaccgcgggcggcgcctgaagagtgaagacaatcggcagtggcgtgacacggctgaaacttcgccggtgactgtttgctttccgcatcgcgtgtagtagtaaaattttggaaagcggacagaatactggtctactgctactggagatggaaaatccgagtaataccgattctgatcagtagaagcggtcaagacacggcagagcaaggcgctagatgtgagtcatgtgacactgctgaagagttgtgatttttgaggccactgtccaggggcccaactgcccaagccggctgtactcgtcgtaggcaaaacatggccacccgctgttcgctctgagtagagaggatatcttcgattcttcattggtagtatgctatgcccaatgccctacgcacaggctcagcggtgttcatcttgtggaaagagatataacatggctgttttattcatattttgcaggtgatatgtgttccaagcaggaacaacccgcgaaactcgccgtgttcgtacaactggtgttgctgctgctatgctatggagttggcaacaatgtcgtcgtgacgtcgtccattgctcaactgtccgcgagaacaacatagatctacaatcgctgattgatttcaagaagggtatcactgaagatccaggaggagtcttgctctcttggaacactaggacccatttctgttggtggaatggtgtcatatgggtggtgtgtggtcataatagtactggacaagtagccgtatagatgaacaaagagcttaatccacataccagttaacatgggatggaacgccacggctattctacataaactccctagcacaattttaaccaaactaaaatcaatttcctaattcaaatttagaatctgaagcggctaatcacgaacgagtaaagaccgatgagatctaggaaccacggaatacctttgggaggcggatggtcgttcgctggcggcgtctcaccgtcttccctccggcgacgcgcgcccgcgcgcgcgcactggcagtggcggatccacggttggggctggttggtgccccagcctcacctctaccctgctcctaattaatcattaacaagtctagttagtcattagtgaagaaatttccagatggcaaggatgcaggctgctgcctcactgcttctactgcccaaactgataaaacaaaacatactccgagtatacataacaacataatcacagatagagaaagtattgggaatattttaatatagccaccaatcaaaatagagaaagttcttttgatcgtggttttcattggaaaatactttagttgatatatctttatttgttttaatcatattatattttttttacactagtaccccacaatttaaatctggattcgccactgctcactgcggaacatcgcgcggcagtgcggataacaggagaagctccagttattcgtgggaagtggccagtggtggcgacgcgtgggcgtggcagactgtgacattatgggcctgtggccttccaatggacctgttcgtgtggtctggttgctgtccttatttgggccatcagctgcaacaggcctcctgagtcctgacggcaaccaaatgtctggactgaattatacctgcatgtttttttttttttgaaaactattacttgcacgttctagttcgacatcaatcgtgacagaagaatgcagagtctagacaggaggaatacgattgctcggacggaaacggcatctagagcgagtagatcacgaccaacaaaattgatctttgtcgttgtagagccgtctcgactttggcctgttctgtattgcggtcaagctacggcaaacgttaagcatatgtcggacaagggaattggataacgaatttacaaccacacgctcagattctaaatctaaacaatctagctttgtacaaaattgcatgaaaaatcagctgaactaatacggccattgcaactgccgttaattgtaggggcgaaaacagtgaccgagccactgtccgactagaccgggcagccatctaggttcgtcggtgaaaactccattaaattttaatattaactaaaaaaacacacatgcgttgcaaacttgcaatatgtgaaagattttttttttacaaaatcatatgctgtaattaggagtacgattgtctcaagttagcatgtaaatttgtttaaagagatttcttatacaactctttctgtatttctaaaagcgtacgaatttaaaaaccgaatcaaatatggatatgtatttccaaaagaaaatagacttcaaaaccaactcaaacacggatgacatactaaagtactgataaaatattttcagtttttataatagtaaagatgagtaaatttatgatgaaatttttataataaataataattatattgaagtttgactgaactcaaaaattttctagctctaccaatgagcacaaagacaaaatatacacttcctttcttatctttcttatgtcactcatcaggatagcattagcataccacccaccctgtttcctgggtgatgtcggtgatctatctcggtatgattcccagtgaccactggccagtagcccagtagtagttggcaagaccccctttcgtgctccgcataaccgagctgtacttctggatgttctccagcacgggaacgcacggtcaccgaccaccattattggcgaacaacctctcgttgcagtttgagcctcctgtacgtacgtgtggctgtgcccattccgaaacactcggggaggtctccaaactgatcacggccaaaatgatctccctcgcgcaacatgggcatccgcacatgcggacggcgagcgccggtttgcgcccgccatgcgtacaatgattgggaacgtacgttcgttgctccccttgccgccggagcaccgcccgacccgtgaatccgtgtcgcgacgagtcgcgaccaactggcgtctgtcgcgtagtgctctcccgtgtacgtacgagtatagtgggccgaatcggcactgtgccgcggtacgcgtaagttgtttattctggtttctccaagattgggattctagcagctttggggtgggtacaacagtgttctgcacttgttctctcgtatattcctacagtacatattctgttctccggtacaatatgtgattcaattgtggggctacttgcacgcggtacacaaaaataataccctgaacaagctgctggggaaatccagagtttggacaatatgttttaggccctgtttaatttcccaaaaaaaaattacaccttgtcagatcgaacggttaaacacctacatgaagtattaaatataggctaaaaaataatttattgcacagattgcgactaatttgcgaggcaaatcttctaaacttaattgttccatgatttgacaatatggtgctacagtaaacatttgctaataatggattaattatgcttaataaattcgtctcacggtttactgatggattatgtaattagttttttttttattagtgtcaaaacaccctatgcaacactttatataatatccgatgtgacacgccaaaattttacaccctaaatctaaacacccccttattcataggtacacctggcataacatgcatacccactagggtactaggtgttcctttttaatgacgatttaatggatcatggacatgtattatgaagctaaaaattatggttgatggattatgtgtgtgttattggtgccacaatttcaaaatcaagatttttatgcgcatgattaaacataagaccttaaaattaaaaccacacataataaaatgtcactacactatcaggtgtgtatcggaagctcagagaccatatccttaattccatttattgatctccagtctccacctaagcctctctaaattcttcattgttgtatacctcgacaggcacatcacgttgaaattgctaatgcgcggctagtcgcgcgcgccctcccgcgcggcgaggcacgtggcgcgcgccgagagggccacggcggcagcgcgtgcgtagggtggggcccgcacgattttcttttttttttccttgttcggtttctcctttccggttttctttccttttttttctttcccttttttccttttcggttttttacatatacgtatacaaactttttatatatatgtatacaaagcttgtatacgtgtatataaagtttgtatacgtatgtataaatcctttgtatacgtcatatataaagtttgtatatgtgtatagaaactttatatacacgttcgtatctaaggtttgtatacttgtatacgtatacacatgatgtgttttttttattatttttaatacgtacatctacaaagtttgcatatttcatatacaaagtttgcacacatcatatacaaagtttatacacattgtatacaaagtttatatatgtgtatatttttttatacataaaaatatatatttgttagtagtagtagtatagtagtcctagtagtaatagtagtatagtagtactactactagtagtaaatactagtagtactagtagtactagtgtactatactagtaacagtagtagggcgacgcgcgcctaccccacgcgcggtcagtcgcgcattaggcgcccgtagggtaatcctaatgggcggtgatcgctcactcccctccccagtgatcacgtgcccctccacctgtactactttacctcccctttttctcttactactacaccataaaaatttaaattaaattcaaatttgaaacgggtatgtaaactttttacttataaactttgggtctataaactaatatttgaatttaaatcaaactttagctgtataaactttagatgtataaaaatactatatatagaaaatatttatatttgaattcaaattcaaatttgaatcggatataattcaaatttaaatttgaatcgggtatgtaaacttttgacttataaactttatgtgtataaactttagatgtatagaaatactgtatataaaaaatatttgaattcaaattcaaatttgaatcggatatacaaacttttgacttactataaactttgggtctctgaactttagatgtgtaaacttgaggtgtataaactttagatgcataaatttactaaaataggaaagtaatgcggtgccaaaaaagaaaaccaggtggagggagggaaggggagggggggaaacgaattgatcgctatccccgtcgccaggcgagcgatcgcccattagccgtttcgcattacgtagacaccaatctattaagtttggcccaaaataattttatctggccttgtgcaaattaaactatgtatggaagtctaatgacattctttgccttctaacatttttttaatcaagtttatgccttaattaccactaccaataaaataaacagttacacatattcatcaattgaattttttccgttactttttctttcatctccccttctgatgtcctcaattcatcgtgaaacccgtttctagccaggcaggcagcaatgcaaatcatcgtggaactagttaatagctggtgacctcaatttgttttcgcgcgcgaggcagaggcattattctttctactgaagttaccatcacgggctgtcaccgatggttttcttgatctttcgctagctaccgtgtttgctcctcatatggtgcgtaaataactccttccctaggcttattagtccattccaataagttttaattttactcatgaataaatactcatatgctactattttgtcccctcttcatgtgttctttgtttctctggtcttctaactataatctgacacacttcaatttttgcctatatcataaacatatatatatatatcttgctgatttttttatcaatgttcctacggagtaggagtactaccttaatcactgcaaccaataaaatatttttttcagttaattctcgagtaatatatcttgctattttttttatagaaggcctgaaaagcctaatttataagcatggaagtgatgaatgtcatcaatctttctttctaatgacctggctcaaaccaagagcacttggaaacacattacccaatccaaccagcaattagaatttttcaaagttatagaaaaaagttgaaagatatatttaaatcacagctattagttgcacctaatgttcaagtgatgtacaaatttagaacaatatatacgtgtatatagtacaagcagttagatgcatgttacacctaacgtattctatctatcatacagaagtctcgcagcaacacgcgtgatctctcactagttatcctatacaatccattgcaccaaggtatgacaaaactactccctccgttttagactataagtcgttttgactttggttaaagtcaaacaactctaaatttgactaaatttgcaggaaaaagtagtaacatttttaacccaagacaaatatattataaaaatatacccaattatagatttaatgaaactaattaggtattgtacaatattacttccaaacttgataaaacttagagtgtttgactttgaccagagtcaaaacgacttataatctgaaacagagggagtacataggtaaagattttgtattgtaactcacggtgaatcttatactccctctgtcccaaaatataaccatttttagcatagtgtcaagtcaactatttttaactttgactattaataaaaaaaataaaaaaatatcaatcatgtgaaattgatgttactagatttatcattaattaaactataataatataccattctttttatttaaaacaccttatttttatagatattattggttaaaatagcatctcgaaaactgtgtcgagtctaaaaatacttatattttgggacggagagagtaagttttttatttcatctttttttctaaagaaaacaaacccatgatcctcctacggctgccaagttcattgcggtggcaaaagcactccttatggtgcccggccacgttatgttgcagcgatggcatatggcacgatggtagtgttcgagcacatcatgaacgttgctttgggggaatggtctacttggtggatttcagtttcaatgcgtgcttaagcgtggtttgcgccaatacgataacacatattttgtgctatgctttgttttatttcgtcaaggaacgagatgatgcattggatcggagatgaaataggatggggttgaacaactttcattctgatgtttaatttatagttcggtttagcctttttttgctaactggtttttctcaatttagaaataagttacaataacctatcacttcataagatattttataaaactgcattaatagcaaacaattttatcagaaagcttatactagtaactagtgtatatatccctgtatatatgtgtatatgacacatgtgcctaacttgcagaagcatgcatgaatattgcatatgtaacatgtaggtccaaacttgtaaaaagaagatgtggtcctatgataaatactgttgcttgtttgaaatgtcttgcaacaaattgatagttttgatgaaatagttgtagttttctaaaattttgacctaaatttcctctgtagtgaatggttttggcatggcagaagctaactaaaatttgcatatttggacacatattatttgatattttagattaatataataaacattgaatccatgaggatggtggggtggacaccagcatacctaagaaaataaaaaagaagttatggtataaactatgtatcaatggcccaaaagatttgatgggatactgcacaaactgaactacaagaggcacgaaccagctttgtgggcataatagcaagaagaaaaataaatattaggcaaaatataaaaagaaaaatattaggcagatttcacgagaaaaaaagcaaaaatattcggccttaaattttcgaattaacttggtctaattttttttttgctaccattatatatggcttatgatggtttaaaaaaacgtgaatattaaggaaagacctaatatcaaataaatataagaggtgatgtttcgaatctataccaactagtccactaccttgtgaagctagccagaagatctctgggcgtttctctgtcttacgatggttaacacatcgtcgtcatggcaccaaaattagctagacaatgtttgctctagtcactcgaaattattatcctaatagagaaaaaaaagaaagcattatatcgtgtgatataaatagttcatattacaatctggttgatcgatttatataattgtatataagatgtgattgtacttaatttagttagcataatttacatgatactatctactacctaaaatagatcttaacacgcatttgcacatgccacgctgctagttaaagtgatacaataacaaaaatatttcttgtagtgtaacacttaattgaattcaatctccaacttgattgtgaagtacaaaaccataggtccagagtagtgaaagcaatataagggacttggaaaaaaaaaaccaccctcgaaaacgtttgctctagtcactcaaaattattatgttaatagagcaaaaaagaaagcattatatcgtgtgatataaataattcatattacaatctgatagatcaatctatatataattgtatataagatatgattgtacttaatttagttagcataatttgcatgatactacctactacctaaaatagatcttaccacgcatttgcacaggccacgctgctagttaaactgatacaataacaaaggtatttcttgtagtgtaacacttatttgaattcaatctccaacttgactgtgaagtacaaaaccagagatccagagtagggagagcaatataagggacttggaaaaaaaaaccattctctcgccttttcttctcctgtcattaatatgaacttgatttttataaatgtgatgaactacgccaagactatgcacgcaactatttccagacatctggtattgatttcatattcaaaccaacgtgctttcgacctgttcattgggttggtggtcacggctgatatttcaccacttcctgagatattcatataatcagtatggtgacatagccgtggatgacacggcattcgtatgtagcactgctatccaaatcgaatacatacaagtttgctagacccgctgctctgtcaacgaacgaatcctgaccgcagaaacaaattctggaagaaccaaaatgaatttgtggaacgagaatcttgaaaggtaaaccgttcatgtgctcaaagcttatctgcatacaagccttcgagaccggtcgcggctgtcgcatatcagcgcagaatttctctgtccggttccggctgaaaagtagggggatagatgaatagtacggccatcggattcgaggttcgagctggacatgccgcaacaaccttgtccagatcaaacagggacagcagcgtttggtgatgagccgacgaggtgaaaagttgcagtaactggcaggtttgacggactccaggtcttgcctctagtggcggtcaagctgagataaggagtgacaattaagtgagtggatgcgacaatgctgtaaaaccgtttttaaacccccgggacctgggagggctgctgagcaaagttcagagttcacaaaccaccacacccagcggcaccatagacaccaagcagaacaggctgctgagctccggccgaccgaaggtgctccattctctctcctcatcattattgatatttgcaggatcgatcacttgaggtaaatcatagaagctcaaagtgaagtgcgaatatttttgaaaaattgagttttgttctgcttttaagctttgaaaagtcagatgtgttcgtggatgatcacataagcgaccatttgcctcgatcggttagcataggcagcatgccataatgttcatggttgtatatttttgcaggtaacatgggcctcacgtgtgatacacaaactgcaaaactggccattatactactagcattcatactgctatgtcatgggattggcaacgtcgattgccgtgggaacagagccgatcagctctcactgcttgatttcaagaagggcatcaccaacgatccatatggagccttggccacttggaacaccagcacacatttctgtaggtggcaaggtgtcaagtgcacctccactgggccatggcgcgtcatggcgctcaatctctccagccaaagtttgacaggccaaataaggtcctctctcggaaacctatccttccttaatatacttgacctcggcgataataacttacttggctccttacctcgccttggcaatcttaagcaacttcaggcactctatctgtataaaaacaatttgacagggataattcctgatgaactcacaaattgttccagcttaacgtacatagacctctcaggaaatgccctaactggtgcacttcctccaaatttaggctctctgtccaatctagcttatctttatctttctgcgaacaagctaactggaaccatcccgcaggcccttggcaacatcaccaccttggtagaaatctatcttgatacaaatcgattcgaagggggcattccaga

SEQ ID NO: 28366 - DNA, 58767 bp, Oryza sativa
  unsure (1)..(58767): unsure at all n locations
tggattgaataggttaaccagagatttttatcatcaggggtgcttgtggtgtggccttgacaagaacacctgaacaaccagagattccagtactgttccactagataatgataacaatgctgcagctgttaatgtgtgctaccgctagctcttcccccctttttttttgcaggcctgcagttttaagtctctattgctcactgacaaacactcacttagaacaaatgtctgatgatggggatattcttgttgtataaagtctggtgaggatttgtaggacagaggtgagaaataaaaagtgacctttaaaactaagtataccagcacacattcatgctctttttgtcatctcatttgctgttttctgaattttgaagtacatcgcccttcttttcctcgtcagcttaagctttttcggagcgatctggctggtgtacgcaactcgatattgaaatcagtaccgtgagtcaactaagtatacctgcacacattcatgctctttttgtcatctcagttgctgttttctgaattttgaagtacatcgcgcttcttttcctcatcagcttaagctttttcggagcgaactggttggtgtacgcaactcaatattgaaatcagtatcgcgagtcgtgagacctcacccttggtgtgccgcatttggcatcagcacaggtgagactgacatcatggtacggtggattcctacaactgcaagttgggcaccatggattttattttctgaagcttcctctccttagatgcaacggcagcgtcattgtgcggccggcaagtggtcagtccatgtccatattgttcggtgctcttcaagttcaggaaatggccatgaagttacagaaaatcatatacaaatataactactaattatgccaggggacagcaaaaaacccaattggctttaggtgcaacaaatgcatgaagaaagatttctccttgcatgatcaaaaatcagcacatgacaaatgtgccaactgatcggagcacctgcttgaaagagagctctgataatgtgcatggggcaacaaacaggtttagttcagactgattatcatagacagagaccatcagttcgcctgttacaaccaataggaattcaagaggaaaaaaggaagggcacgtgtcgaacgcagaagctcaaattctaattctgaatttagcaaatgctcataaaacatagctgtttaagccactgtagccagacatttcaactcatggttgcattgaagcttctgatttcaggtggcgcggcagctcgaaagcaatcaaatgctatccatgactggtcagaatcatgtactatttgaagaaggagatgattagaagttctttttttttaagtaaatttcacaaaattacaggtattttgactaaattgtcacaaaactatatatttaaggcgttgtatcacaaaactacagatttagtaccaatgtatcataaaactacagatttaaggttaagtatcataaaaatgcatatttaatattgaagttatcacaaaactacaacttttggagtttaaatccatggcaccattgttacgttggagctatatacattattgctttgtgactaaattggttctaaaccagtagttttgtgacagtttagttactaaacatgtagttttgtgacacttcatcttaaatgtgtagttttgtgataaatttagtgttaaatgtgtagttttgtgataatttgatcatagtatttgtagttttgtgaaatttatgcttttttttccttaaacacacaggagatccctgcatcatcattatattaaggaggacaaggatgattcagaagctcactatcttgattggaatccatgcaatggggcaagagcatattgtgcaaggctgcaagcataaattgtgtggatatatcatcatcgtcatgatcatctgattgctttaaggctggagaaccttaaaggctctgaaagcacttgaattggaagaattgccattttgcactccagcatcaacttctgaacttgaccctgactgaataaacataacaatttcttcttgtcaatatgtacatctgatgcaagaaatcagaaaaaaaaaatcatgccactcttttcacttcacaaaagactcttttattgacaatggcatctcagtttttcagtggggccttctttgcatgtttatgaactggagttataagtaccttgttaagggataatccatgctaattaaaatcacctgaaactgtgcatcagcaggtgacagaaactgaaagcaggaaaaaaatgcagaggccatcatcaatcacggtgtcacatattgcaggggaaagttgacacattaacacccaaaattgttgaagagatgctatgccatctgcaatcatccacatggtaatagagcgctgaaatcgactccacattgtacaagctttagcatgcaggaattctgttcccagacatgacggcttcatagagcaatagtctctgtctgactagaaagtttctgaactttgaaaaggcgaaaatatataagctactactaccagggaggaacacctttcatgttagaaaatgaaggaatatcttcaccatcttccatcattcttcacttctatatgttgcttaggatgctacctgctgcttgcgtactgattcttgttcttttcgttttcatttttatttggttttctaaagcgggttctttttttttaagaactcatgccttttattaaaccaagagattataaacagacataagcggatctaggggtggtcccggtaccactcaaaaaatctagcccaatgcatatatacctatgtgtaaagattttatttaccaaaatacatatcttattaatatattatgatgcatatttgatcaatttatacttctaaccttattatatttgcacacaagcttcctgtgcacactccgtgcacaccaactagcaaatgtcataaaaaattgtaaaaaaaaaattggacatttactcataatagtatttcacatatctaaaaagtctcatattcaaattcattatattttaaccgtaacaaaaaagtgaaaaaaaattgataattttaagggtaaaaatctgtcagaaatgtttctttttggtatggctaaaatataatgaatttgaagataagatttcatacgtaggtgtaatactgttggaagtatgtgcccaattttttctagaatttctatgacatttgctagtttatgtgcacggagtatgcacgggaagcttgtgtgcataggatatattctcatttaaaaaaggtatataagttggaccacatatataaacattctagatacgtcactggaaactgagtacatgagttatgcttgcctattcaagatacaggtttgctagagcacaaacagtttatatcggtatcttttaggtgacaactgtgcattctagaaatcttataggtgcataaattgtgcttcattatcttaaaaaaaaaagatgctacctgctgacataatatatcctggtcatcatcctgtcacgacgttttatcagtaacagtgcacattatctatgctcagctaaaatgcacaaaaatatatgaatttatcgaatttatggatttgccgctgatttctgtttctttgaacgtatgttagggagtcgcattcacgggtctgtgcatgtgcagtggtgtacgagcatatgcgtattgcatggtaactaaatccctgtctagtaaggcctataaagttttggcgtgcaaaaaaatctaataatccaaaaaatatttgtctttcactttgacatttgatcagccagatgctcctatgaaaccatagggatcatttttttttcccttagtaccttagagaaatttacgagtatctgataaacttgaattttgagttggtgggctggcatggcctaataggccctctatgtacagcccggcccaatacattgcagtctttgagataacaacgttttacatttaatatgcaaaacctaagtaagcagccaggctcaaactaagagcatatctaacagagttgttacttttaactctccaaatacttatttgaccaatttgtaaaaaaaaaaataagtggcaaatttacctatcactctagtagactcgccacatcccactctatataccgacggccatacatagaacccacctatcattctcctgccccttctttcttcttcctctcactttctctccaattcactaccatgcggagctccctgccatcagccgctatcccgtcaatccgtgcgccttcagctggccacctccctcatcaagctcctagcggggttcgactctatgacacgcaagcttgatgacagcctccccgttgtcgttgccgagatgcttctcattttcgccggttgtccaccatcgcgggtcacatcctcgctgatttgaaggttgcggggtggcggcccctccatttaattcttatccatgatttgggagatggcggtgtgatgaccagtgacagtggtatgagaagtggcggcgtgatgaccaatgacaggtccaaattcttctgtgttataggaggcggtgatgcaggaggtggtgacacaacagctagcggtaaccggtgacggtggtgggctcacacgggaggcgtcgatgctgttcgagagagggatggggagaggagagagaaggggggtggtgggacccaccatttggccaacgattttggcttgctaaatttggcgagcgaggtgggaaattcggccaacgatttggcttggccagtcacatggaaaatctataagtaaattcctcgtgtatccctaaaaactcactcaatccctttcatacctctaaaatttacctgatcccgtctatacccctgaaatttcaacttatcccttccatgtccctaccgttacatttccttcatttcactattacgtttggttgcaaatgtattttttttgcccttggtactttatgtttgaatataaacttgaaaaagattgaaaattttgtttgagtgtacagtatgtgcgttgtatgaaactaatgagactaaataattagagcagaaaattttgacataaattttgaaaataaaaaaatgcaatgaattaaaatttttatttgaaattttaataggacaatgaatttttttatagggagcattcataaaaaaaatattgtgagcattagtagtcctattttttatgaatgcccctcgttttttatgactttttaaaaaataaatacatattttttatttcattatccaaaaataatttttttataaataatgcattgcacaacaaactcataattataatagtctcatgcgacaaacttttacatttttaataatgtaattcataaatttttatgttcatctaaaggataaaacgatcatttttatagaaattagacggtcaactgacgtgaggggtatggaagggatcaaaatcaaatttttgaggtatataaggaagtaagcaaaattcagggacatagaagggattagctaaattttcagaggtatataagagattttctcaaagtctattggtctacagatacatgaagaaggaaaaacgaagctataaaaatgacctgggttacgaagatagccggaagacctcagggtggagacctctgcattacgaatctgcacaaacaaaaatataaaaacattaacactagtccctctccagaaaaacgacaccaacaacattagcatatgctctgcaatacacgtactactagatttgacatttgcaggagcaaactgaagcaagctgctatgccatcactcactgctgcttgctccgggacaaaggaggccgggaggctgaggaccatctgcaagcatgatgcagatgggtggacgcacagagagattatttcacgaatctgccgttgaatatttgacagcgtacgtttgtactctaatccctgaacattatattagttgtacaggatattttagatttggggctctaacctccgaagaatttggcccggtttagatttcaactttttcgtcacattgaactttcctacacacataagcttctaactttttcgtcacatcgttctaatttttttaaatttctaattttagcgtgaaactaaacacagcctttgaaggagagtgagtgacatgtcgaatgtcaagagatgattctgcgtggtaacagaggactcaactcaactcctcactggtgtccatttacaatttccgtggtcattttttatatcgaatatttctgttcacccatagaaatacttttttttgacgataaaatgtatttttacgacggtttagcacctagctaggcttattccgatgtctgatagtgcctctgcaataggaatcactaacgtgtggacccttaagtaagttgggcccatatgctagctagtcatagtactgcagaggatattgttccataacaaagggaaagaaccacattagtgcatgcctctttgccaaatggtttggtccaattacacgcatatgtgagagaaaattccttctatacccctgaaattttagctaatcttttatatgcctctgaattttgcttacttctttgtatatccccaaatttgattttgatctcttccatatccctcccgtcagttgaccgtctaatttctataaaaataatcattttaccctttggatgaacatagaaattcataaattacattattaaaaaatgtaaaagtttgtcacataagactattatagttatgagtttgttgtacgatacattatttatcacaaaatttatttttagataaataaataaaaaatatgtatttatttgtcaaaagaaagtcataaaaatgaggagcatttgtacaaatataggactaccaatgctcacaataattttttttgagtgaattacactttgggccatgttttattattaaactttcactttggaccacccaatacataatcttttcgctttagattaggtaactttacctttgttgcacaatagactaccctaactcttttcgcttgtgatgtctagcgtctcttttgacaaaagtatgtcatgcatataggtatgaaagtttgctggcatgccgttaacaatttgctcgaagtcatcgaagaaatgaaaatgtgttttggggtggtccattgtgcaacaaaggtaaagttacctagtccaaagtgaaaaaattagataaagggcggtccaaagtgaaactttggcaataaaacatggcccaaagtgaaattaactcctatttttatgaatgctcccgatcaaaaatatccgttgtcctattaaaatttcaaataaaaaatttaatttattgcatttattttattttcaaaatttatgtaaaatttttttgcactaattatttaagtctcattagtttcataaaatgcacatactgtacactcaaacaaaattttcaatcgtttttcaagcttatattcaaacctaaagcatcaagggcaaaaaaaaaaaaggcatttgcaaccaaacgtaatagtgaaatgaaggaaaatataacggtagagatatgaaagagatcaagttgaaattttaaggtatagaagggattggataaattttaaagatatgaaagagattaagtgagtttttaaatgtacacacggaatttactccatatgtaacgacgaccaacttcacgaaatacctagttactggtcgagacatataggatcgataatgacaccatcgtacgtaccgaaaacactggcatttggtgaccttgaaacatggcattaagcatataacctctagtttatccaaatcctgcgtatccatagctcggattaaatatatgtccttcgactatcttaagtcattttggatatccatatggtccaaccatcatcctctctacgctatattatcatcactatggttacactagtgattccttcaccatgaatcattcattgatataaaactgtgttttgagtctggcactaactactcatccggtcctgtcaatttagtggcccggagcaaagagaaagatgggtcctttaatacacctctgataatataatataatgatgtttcaaacaaatataatacataaaaaaatattcttatatcaaataagttgtatatcttcctctcctgaactttctaaatctaaattcctatactctatgggctcctatatccatatcatatacatatgagattgggtcccttggctttaagagccgagccaggtgcggttgcacagctcgacccccccccccccccccagggccgagcctgataactcgacccatgtcgctgttacacatagatttacagctccaaagtcacctgcagtaacgacgacgcctattccgatataatctccatgcgcgatgtggacaaggaatgaaaaccaaacactgtgcctgccagcatcctgcagccgatggcgtcaggatccacgacgcatctttccccttgcttttcgatcggcttaaagctatgctaccacacacagcgatatattcagatatgaaacgaacggtccaagcaagcaagcacagagacatacacacattgagatcgacagggagacgagggtggtgagtcccacgcggtctgcattgcagcaacgacatgccctacaaccaaaggatgtcggtatatatctccatctgtatagtagtatcttgcgatcctataccaagccgaaacaatatcgatcccatatagcatcttaattttcttagtttctcgatcccactatccgttaccacacgatcttacaaaatcttagatattatcctgattctacggttctacaaaatattatttaaaataagatggtttaaaaacaaagtaaataagtatgctgcacaggtttatataaaaatcagttaaatataacaaaactaatatggtttttcttgataaaatatctctatttgcatgacatatattattactataaatttttatatagaatggctatatgtaattaatacaaatattaattaaacttaaaaaaattaatagtatcctaatactgtgatacgatactattttgaacaaaacgatactacctacgatcctgatcctaataaccctgtggtcctcgcctacaactgcacactatagtgcattgcagatgagcagagacgacatttgccatcgccatgctgtgcgtcgacagtgtgcgagtactgtgtgagggagtgcaaattctgcagagatgatgcagcctttggccgtgtcgcctttagcagctagctagtgcccatatattcttcttctacctcgctcatcatcatgcagacaacccagaccaacccaagctaatgaagatatatatattgtgtgtgtgtggactgtggagatgaatatatatatacatggaggcatggtatgattgtactgcgtcaggatctcaatcagtgggcgtaaagtgaataggcaatttggatatttttgtatgcaacccctgatggtgctgatgctactggtaaaagtaaaattttagtcaagatgaatataaggttataatgaggaaagtctttgaaataagttatcatgagaaagacagtaaggttaaacttaagctctgcatatatcatgcatgggaaagtagctgagagtgtcgctgattctaactgaaggtcttatttatttgtgttttctgaaaaaaaagtgtttgagaatgtaaaatattttagttatctgaaaagatatactaatgctaaaaaaatgtggaattgctaaccttcattttacattatttttttagtatttacgggagggaatggggagagatttttggaccatcagattcgagttaagattcttacctggctctttgtcatccagctccgacgagcttctcgtttttttcggtaccagcgacaccccaacttcagtagaggtgatgaagggaaagacgatgcgccggacagggcacatcactgccatctatcttgggtaggaggctggtcgggacggtctcgtcggtgctggtagcatgggggctggttgctctagcgtatcgattatgagtgaggagaaggtgagggagaagataaacgaaggcagtatagctgcacgaatctcaaaatgatctggactgttcaaaaagtgaccgagatgcgcgagggtttttttttcaaatataacataagcactcccttaaaattgttagagacgctaaagtattctcattgtattgacatattcatagaattagtacattagtagatatagctagtgatatgtcgatttgaacttaatttggtgaactctatgcactacacctgcacctttagctcacacaggttagctttccagccaccatattatacatagttttaaatctccgggtatagctgtttgagaagtgtcctaggtatttgctctaatgtacaaattagtcattatagtttcatttagcccgttgtagctgtttgagaaggtgaaccgctaaatgtcttaacatgctatttacaaccataattatatctggtcaacaatcttatatttagcattaacagctaattatacattgacaatacaatggtcatgaaggcaaagcgtagtgcttttcgttggatgaacaattattgaagtcatatattataccatctgtttggacagacagttatcccaactagataaaatatcccgtgtattatagcaataattcgtataaataatttaagcatatatgtcacctatctggttttccctgccatccatgcatcctcccccacctagtagtggttctggtgtccgacgtcaccgaatctagcctggtagtctcttcttccttaacatccatgatgctcaatctagcacatattttatatgggcaaagtgataaggtatagtatatttctcctgtttcttctctccatatatcgcatattctctcttcaaggctgatactacctttcttccaaatgtttgatgttggtcagttcaattttaagctaacaaataaaaaagagtaaattacactcgtagtgtatcaacatgacagataggtgtaatttggtgaaagaacttaaggaatgagtatcctagtacaacaacttgataaatggatgcaatttagtgtaacactttataagtgaatgtatgagtataataacttgcaaggtagatacgattttggtacaataaattaagaagtgattcaataacttaattagttcaagaattttttggtatacatatttaatatttattttaacaatatactaacatggattagtgtaggcatatttaaattttcattccaataactgaaagttaattaaactttatttttcagaaaaatattatatttcgatttagattcgagaagataaaaaaatccataccggtaggcaaattggaagcacaatgtaattcttaaaaattaaattctaatatcggtaggattcctatgtgctgacatattaacatggagaaaaaaaactcacctagcactcgttaaccaagacaacacatgcttagccaagttgctacaccaaaatactaaattgtcaatttcttatattagaatgtacctaactgttatatcgcacccatgtgccaagttatttaaccgtagatacaattgacttaaaaaaataaaaaaattatgccatgtactcctacaaaacacaccgaaacatttttgtccgccctattttcttcttctctcttgttcaccatggctcagtttcaacggagccaccagccaagatggagcgttgtaaaaataactctaacacaccccaaggtcaaaaaggcaaaaaaaacgaccattttgcccccatacaattttacatcatgaaactacgcctttaaacctttttaccctgtataatccccaaaaaaaaaatccctcatctcaatactgacacgataagtggaaggttagcttgagcgacaatactgcctgcaaatcgatcaattactgttccgagtttcgactgtcaatctgacgacgatcaacgatagctcttctttttttcctcaccgtcgtcagaaaaaaggagaggacggggtgtgggcccggccggccggtcacatgtggccatcagatccaataataactttggaatgtattacacctcctctctcatgaaattactaaggccaccactaacaaagcacacgaacatgtgtacggctgacactacggattcaactaatcaaaccgttcaaccgtagtatggattaagaaaatctacatatatttttcagctttgtaaggtgtactagatggccgtgacaacgtgcgagttaaaggcagaaatggtacagcagttaattttgtgacgtgcattcgacccgtagcggatctagaaatattttggaccatgagtagacttcattatagctaatatttactgtagaaattttatttttatttttttctaattatattggattttagtggattagccgccgacgagcccgggcggctgcccggggtcaccgggtggtagatctgcccttgcatttatctgctccctccgtgcaaagacgtagtatttttagttagtttttacacacaaatataagtcatatttaatacctcaaatacaaattaaatgtgtattgctccttttatttgtgccatatggctaaatatttaagttttagtgcttctttgaaacacaagtgttaaagttggtgtcaaatacatgtacaaaatcggttatagtttaggacttggatttgtgcttggtattgtgatagaattataatcggtctatatccgctccatcttaaataaagaggatgcagttcatggctgttttagaaattccaaaattttcacatgaattggttcacattccaaaggagttcctaaaaaaaacctctgaaattccttcattccaaaaatatctcccctttgggctgctgcaatgcaaaataccagcatatagacgccctgcatttgtgggtggaggaagttagaaagtaaaatttagcatttggccacttcattcctaggatgtccgtaaaatagagttgcattatgtcctaaccattttgcctatcatcatagtaccactggtataaagcgatcacttgaaattgaaggcttcaaaatttattgccacttgttggaaaactgaaagttagtaatgacaacaattggatgcacatgtgagtgattgttggatatatggtaactgaaatcaaaacatcaaacacatgatccattctaactttaacttgtgcccctgctctattcccctgtttcatgccaaaagaaaaaaaaatgaaactgaaatgctgcctacaaaaactgaaatatgcaagtaattaaacttatgatataatttgaggtgctactgaacatcaaaatgagcacttacatatgcacaccaaaaaatgaaattaaaacaatgacatgtgcagcactatgatgtgtaccaccataaataaacacaactcaaaaatctatgtatacataaaaacaataagataaattcaggctttgaaatacaaatgactattcatacaatgcattgttttattcatcatttgtatatcaaattttgaggtgttctttttttggtaacacatacaaatacaattatgtgttgcgagacttaaactcaacctaacctaggttgatataggtagtgcacattccattttctctcccattgtctaatggaaaagaaccagtttctcagcttaaagtagctttccacaccacaacatctacaaggcaaagcgatttccccaatggaaaactggtacacaagcatggcacacacactcaactaagcttgtctcttgcaccccccccccccctaaactcctattttaaacaaaacaaacccaaaatcatctggataaacaaaagatcacaaataattaaacaaacacccaaatctaactttacaccatcttttgcctaccttttacctttacctttgcgaaatcatcatcagaacccaaccaaatggagctaagctctgctctcacttgaacacctggtcccatggattgcctatagctgattaattgattataacccataataataaattatagataaatttttcacatatatgctctcggcgacttaaaagttaatattaaaaagaatatatcaaaatctatcaacttcaaaattaaaatttaaaatttgacatcagcttataaatatagggcaaaagatgagagatcgcttatgcttatgcttatcagtcaaaatttaaatttttaacttatatttggagctgattttagggtttttcagtgaagtttatttttcagcatttgtttttagatcgctaagaagaactatataaatttttttcacaaattatgaataagtgaaacgttggggctatgtttgacaaataggatagggaaataattttccacccatcaaaagatatctttaaatcctaaccatttattctcccccttcatttaatcctaacccttcgttcattttactggggcacgaggcctgggattaccctgtccaacctatttattgccacctatccttatctcacctcgctgcattcgctcactcacactcacactcactctctctctctctctctctctctctcgacatgagaggcgccattgctgcggcggtgtgcgccgtgctgctgctgctggtcggcggcaatggcggcgggtggtcggcaatggcggcggccaccatggaggaggacaggatcgtggcgctgcctgggcagccgaacgtgagcttcgcgcagtactccggctacgtcacggtggacgccgccaggaggcgggagctcttctactacttcgccgaggccgagctggatccggccaccaagcccctcgtcctctggctcaatggaggtaaaattaaattaagctaataaatttatgtactgtacatttgtgcagtgtgcatgtagctgcattattggggggaggtgagattgctcgagcattcgagcaagaactgtgcaaggttgataatgtaatgtgggggaaaaaatgtgaaatcgagaaatgatagggagattagtttctgtgtgaatgagcctagagcaaaacatgtttaactttagttaattgagttaaaggaaagattttcttggtttgctgcaaaaatggggggagagagctttgtttttttttttgaattgtatttggtaattaagcttgtcaaatgaggaattctgtaaccagattctcattcaaagggagaattcgttcacaccggaattattggtggttaagattaactttttggtgcccatatgcaatgtgtagggcctggctgttcatcagtgggagtgggagcattctcagagaatgggccattcaggcctagtggcaatgtgctggtgaggaatgagtatagctggaacaaaggtgagaacttgtatgttgtaaaccacaatagagcaaactttttttcttttgtgccctcttttgctttctattgttcctttttttcgccgcgaaaagattgcgaggaacgaagaaaatttgaggcatctgttggatggtttttcagaggccaacatgctgtatttggagagccctgcaggagtgggcttctcctactccactgacccttccttctatggtggtgttggtgatagcaggacaggtgagttctatatatgcatttgccaaattatggctcaattttgcgcagagttagatttaacatttttgaggggcttttgaatttcttaagctagggacaacttgagattcttgcaaggctggtttgccaagtttccgcagtacaagggcagggacctgtacattacaggagagagctatgctggtaatttaaggccactccactgtattgtcttgttgctttgatcaattgtgaattttgttaattcattccctaacttgcactgtaagtgtttttcaggccactatgttccgcaattagcgcagcgcatggtcgaattcaacaagaaggagaagctgttcaatctgaaaggcattgctgtaagcaaatcaccacccccaccaagctacatttcactcaaaactcatgagatctgtcttggaattcctaattacaagatgttgtcatttggttcatcctgatcagctgggcaacccggtcctcgagttcgccaccgacttcaactcgagggccgagttcttctggtcgcacggcctcatctccgactcgacctaccactccttcacgacggtgtgcaactactcgcgctatgtgagcgagtactaccatggctcgcttagctcggcctgtgacactgtgatgacccaggtggccagggagactagccggtttgtcgacaagtacgacgtcaccctggacgtttgcgtctcgtcggtcttgatgcaatccaaatccctcgcccctcaggtgagagtacatggcatgcattttaattactgtgcaaaccgatgagttgcatgcgccaaccagttcagccaagagtttaagctgacaaggaaaagagaggcagttaaggcttgttgttttacatgttttttttttgtttttttggcgttgtaaggttgtcaaaatcgtgatcctgaatcagcaatcatagaatcgtttacatgaaaatcgtaaaattgttgattctacctatatagaatcgtggaatcaggcaccttaactaggatcgtaaagtcgtaaaatcgtatgacggaatcgagattctgacaacctattgtgcgtgttgcgcatttgcttttgcagcgagggagcagggagctggacgtgtgcgtggaggacgagacgatggggtacctgaaccggaaggacgtgcaggaggcgatgcacgcccgcctcgaaggcggcgtgcccaagtggacggtctgcagcaggtgcatttttcctcaaacttttatcagtaatccgcaatatgccgcattgctgctgctgctgctgctgcacttcagcaagctcactcagtagtcagtactgtgttgcattgcaagagaaattaagctaacattcagctctgcaatctgcatttgcctctgcttcagcaagctcactcagtactattgcattgctagagaaagctactccctctgttacaggttataagatcaaactgcttcaagtttgactaagcttataaacaaatatagtaatatttacatcatcaaattagtttttattaaattaataattagatatttattatttttccttattaatgtttttttttccttgaacaacaatgcacgtacatcgatgcagtgttctggagtacaagcagctggacctgcagatcccgaccatcaacatcgtcggcggcctcgtcaagtcgggcgtcccggtgctggtgtacagcggcgaccaggactcggtgatcccgctgacggggagcaggacggtggtgcagcggctggcggggtggctgcggctggggacgacggcggcggggtacagggtgtggttcgaagggcggcaggtgggcgggtggacgcagtcgttcggcggcggcgcgctgtcgttcgccacggtgaggggggcgtcgcacgaggcccccttctcccagcccgagcgctcgctcgtcctcttcgccgccttcctcgccggccgcccccttcccgactccttccagtgacgtcgtcccgaacgacgatgatcacgtctcatgtcaagcgcggaggtgcattgttgttgcgttgcaaatgcgtacgagcgatttcgtgtgcgccaccgctatatatagtactccgtattgttgctgggaatcgaattgtttctcggagaaaatctcatctggaaaatgctgatgtggggtggggaagatgactccatgccgggtttaccttgctctttagttcaaaatagaagtaactaacgtttgttacggagagtactccctccgtccaataaaaaaccaacctagcactagatgtgatgtattctagtactacaaatctagatatatctctgtacatattcattgtactagaatatgtcacatcgaatcctgattcgtttttttatttggacggagagagtatgctataagctcttgcagtttgggaagtgtgtgtttggcgaatgagggaaatttctcccagtctgcatccgctgaacacagcctgagcaggaattctaattttatccttttttttttctctttataatgaaaatcaatccccagcctcggcgtccagtacgtgtattctatatcatatactccctccctccatattttttatgacgtttcggacatcttggtgaaaattaaggaagcagtgatgttaccgttttacccttcccttccatcgctgcttttttcacgccgctgccgcttttcatccctacctctcgctcaggccgccgaggccctgcacggcacaacgctccctcaacgccggcttgctcgtcatctccccctcaccactgcatcggatgaccccggtcgacggtcgtggaagcggggcgaccatggaggacggcagggtgggcaagcgtagaaaagtttgtcactctatggaagaaggctgcacagagtggcggaggtagcggcggatggtcatctgatgcagcggcgccgttcccacaactgcctcggatgagcccccagttgtcttctctgtccccgaggttagtctttctctatcccacatgggcctcagttgaaatgcgatgaatttgaaatcttggtctaagatggtgtttgttggagtagataatgagcagatgacctcttcttttgaatctttcacaatgtcagcaccattagagtcgaatttttctttcgagaaatgttgtcaaatgacaactaagttcgtcaaagaacgtggttcacacttggttgaaagtaaaaacaaagcgtattaatattggatttttttagatccccattacatgctccttagggacaatttatagtattggtagtggtacaagctcatgcatcctaggattaataaatacagggaaatttacatggatacctttatgatagggacattttataaggacaactaaagtctatttggccacgggacccttagtgggccctaacatgagccttacttggtgaacatgcccttttaggctctctgtcctttgattccgatggcgaagatgccctggcttggtggcgaatccctcgtgcttcgcctagcggcttcgcccagggtaatcgccctggtcaccaatcagcacttcgcccccggcgtggttgtttcggcagtctcggtcgaaggctctcgtggcatgcctccaacagaaccactttgacaaaataaggattcacatgtgtttagattccctaatactgctgcttggtgttgctgctatctgctactaaatgatgttcctagctgctggaaaagctgctaattgatgttgtttgctgctgctatatgtgcctgctaaatgctttcatatttgcatttgttttcatatatgcatgatatgattcaaaattcagaagcaatatatttactccctgtttgtaggttagttattgttcacatttattttactcttttatgcaacataaatcttctagaatcctaaatattgttgctcctgcaggattactatctgttagagaattttatactatgtgccacctatactctccttccatcccttgcaattagatagctttttgcatgcaagttctagttgatgtgttcattttcagattaggaattcgttacacctgattccatttaattcacactttgaaattgccatagtttagtctaaggttgcttacagttaaatgatgtataaattggcaaggaattaactaactggttgagatggacagatggtctttatatgtggaggttctcaggtgcattttatttgcatatttgctcattaatagcgtgaatttctgcattttcagggtttctttatgcttctgaaattgaagacaatcgaaagttttgagaaactcccatataacaaaaaattggagtactccctggagtacttctcaaaactgactaaatgttgttgacacacaaattaaagtcagcatttcgctatcgccctggaaatttggaaaccgaatcccttggtcagctccagagagctgaaactgaaatggattctgatgacacccctgaataatcttccttgccaacctactccaagttacaaaaagttactatcaccgacataattccaagttacaaactcacttttcatgtccatggctctcaatccgtcactgttaccccaatcaacaccacgagacagtatcacaacctgaagcttcctaaattgaaacccaaccttgcatgattatgaatctctagcctctgaaaatgctattataattccgaagtccaattcctggaagaaaaaaaaaagaacttctagccgcgctcttcggttcaagttcccaacctcactctctcgtttaccgcgcacacgcttcccaaactgctaaacggtgcgtggtttgtaaaaagtttctatagaaaatttgatttaaaaaaatcatattaatctattttcgaagttttttaagctaataattaattgatcacgtactaatccatcgctccgttttccgtatcagaggtgtcacctaagaacacagccttaagggcctgttttgcacagctccagctccagctctaggagccaaacagtttcagctccatcaaaaaaaaagggagcgaagttggatggagctctctcatgttctgattctacacagtgatttgctctagctctagacggtgtccctgcagctgcaggttcaggtgaggcaaaccgtggaacgacttggagaggccgatcctgacggcccaggacggctggaccagggcccagcgtgaccggcccagcccatctcccctctttgactcctcttctccttctccactccatctttctctcttcggtatcctccacacctcgtcgccgatctcccaccccgcgcggcgccggcgcccgtccgtcctctcctctcctgcctccgccgcatcctcgcctcgcctcgccggtgaggaacccgtcgccgcacatccctctctctctctgtctctctctctctcgtctctctacctgcccggacctgtggaagattttttttcttttctctttggcgttaaacccctcctagatctggagcacttgagagttcctgctgtttcttggatccgtggaggccactactcctcctctcccgccttagcttttgtctcgtggatctgggatgggatgggggtggcttcttcacagccgagatccgtgtgccggatacgacggtgatcgaccgggacggtcagattgcatggttcttgggttcagtttctgtaaccaaatttgcgtggttctcgaaccaaagcttgtcgcggggggattcgcttcccgttcccacagagcgccaatcaaaaccgacgggatttattttaagcttttcccgattccggcttcgcccccgagttgtctcttgctcgcgtggtgttgtactacctccgcatagatgttaatgaatctaggcacacatatatgtctagattcattaacatatatatgaatgtgggtaatgttagaaagtcttataatatgaaacggaagaagtactaaatagcagtctgtttccaagacaatttgtgagtaaatttgcatttcaagtttttgcgccagtgtccggcagatcaggagctgtgtaaatttgcatcctcgcggctcttcaatccggtagctgccagcatttttcatgcgcctatacttgctgtaattctgaatgctagaggagcctcacttgttattgttatagtgttgaattctgaatgctagggcctcattatgtttttattgtagtgctgaaaaaggatctgattttgatacctagctactgaagatgtagtaaactttactggttacatgaagcacagattcagattaatcataagtaaagcaccagacctgttttaagagaatcgttggtaatcgtatttttgaactgctccatgtagaacacacaagattttgaggatgccgagggccacgagcgatgcgaagcttctaattcagtccctgggcaaggcttatgctgccacaccaacaaatctcaaggtattagttggctttttttttatctataagctgtcatcttaaactattggctaattactgatcatatttctgcagatcattgacctctatgtggtctttgcagtcgccactgcccttattcaggtaactcaatcaattaccaggacaccttgaaacatatattatctgcaaaatattttcatgctttcatgttggggatttttttctttgcaaaagcaaacatgagataaaaattaagtaggcaaccaaatgatagcttaacacgagggcggtacacagcagatgggcacgattaccctggaaatttgatgctttcctaatgctatataccgttttgtttgatggaaaacattcctatttgttggtgatagtgatatcgtatcacttattgttgacaaggatgatttgtcaacacagaaatttcttccacttttttatgcagagaaatatgttctagttcatcatctagcttacattttttttcatatatatatgcagctgttatggattactgttgtttgggttgatagacaagcacatgacctgtatttttttaatatgatgttactgtgtaatagagggtcagtcaatattcttaaagcttggtgcaattttttattaagctcctaatttactgagtgaacataagtttctgttcagttcacaagtcccttcttccatcactgttgcaaactagttggtatcagccttgttatgcttacagttccatttgcaaactattgaaatgctctcctctgacaaaacaggttgtttacatgggaatagtggggtcatttcctttcaactctttcctttctggcgtcctctcatgcataggaactgcagtcctcgctggtagggatttcttaaccccttctcaattccggttaccctttttcggttgtacgatacataactgtcaatgtttcgtgcagtttgccttcgtattcaagttaacaaagataacaaggaattcaaggtaactctactttcaccttagtctgttggggccattaattcttgagattctggcgtaacgtcgcatgccaaaacactatctgcaggatcttcctcctgaaagggcgtttgcagatttcgttctgtgcaatctggtgctccacttggtgatcatgaacttccttggttgatgtcctgcccctacaactgatcaaggttttgtagccccagtttatggtcactggtcagaacaccctgatgtttgggagtgtcatagtatgagatattcatatgatctttcacacttcaccgatgtaattcgacaatttttcgagaaactataagttctctacctgccgttcgctgcggcttatctttatatctgtgtatttagtgtttaacaatcttagaacatgtgatcctgttttcttcaagtgaccgaaggttggcaacatgctattcgaccatgctgttaactgttgtttgtcctttgttccaacgttgcctacgcatggattttacaggattttaaaatccctccattccaaaggaagaaatttgattgcactactgcaattcaaaacatttcttgcacttgcgcaatcccagtgacccacatgtaatcagaagaagtggagtatgcattgttctggttgtactcaacgagtgtttgccatccaaattatgtcgctagtattagtagtagcatatgtcgtgcacgctaggcagaaaactgaatactaccatgtgctgccttggtgagtttataaaaatcaccatttcatccaagaacacaaagctatcgtttccctcgcaaaaccaaaacgaagaaaaaaaaaacagaaaacctgaaatatctggcaggaccgactgccaggccaccatgccttcaaatggtaaacgaaatcgaaatgacaaacgagaacagtcattaaaaaacattccaattttccacccttggttgatctggcaacagtcactagtaaagttgcaactgacaattgacaaaccaaacaaaaatcactcttatttcagatcattatatattaatgctgctgggtggccaggatgccgtagcatttacctacacttcaaagtaagttacagccatgtgtaaaaagtattggaagccatctggtgcgaagtaatgtacaggtacaacagtgcagcgtttatcttactgctaccaaaagaataaatacacgtacttgaaggagtaaagcttctgacatccttttaaaaataaaagcaactcaagatctagcatacagtttgtttgctaaatgcatctctgttgattcatttccataacattcctactgcctctgttggaaaaaaagaggaaaagtgaaagcacctaaatgaagggagaatttatgccatctagttttaccatcatgagcgccccagctgagagaagagaaaaggccataattccagaacgacgatattatccttcaattagacactcagagcaggtgccagtggttccggaacaccactaccaccgttaagaactatcaccttgccctctgaatccacatcaacaatagcagagtcaccttccttgacctcgccagccaacatcttctccgccaagctgtcctccagaagcctcataatagcacgccgcagaggcctggcaccatagcttgggttgtaaccttcgtcgacaactctatcccggaacttctctgtcacctggaggtcgatgtcctttgccttgagcctgtcaaacacttctttgagcataatatcagcaatctccttaacctccagcttggtaagctgccggaacacaatcatctcgtccaatctgtttaagaactcaggtcggaagtactgcttcagctcttcagtcaccaagctcttaatcctattgtagctggtgtctttctcatcatagtcaaggtcaaatccaatcttccgtcctcccttctcaatgacactgcttccaacatttgatgtcatgatcaacagtgtgttcttgaaatcaacagtccgacccttgctgtcagttagtcttccatcttctaagatctgaagcatcatgttgaagacatcaggatgtgccttttcaatctcatcgaagagaacaacagtgtatggtcggcggcgaactgcttctgtcagttgaccaccctcagtgtaaccaacataacctggaggtgatccaatgagcttggagactgtatgcctctccatgaactcactcatgtctagtctgatcatggcctcttctgagccaaagtagtaggctgcaagagcctttgctaactctgatttaccgacaccagttggtccagagaagatgaagctagcaataggccgatttgggttcttgaggccaacacgagcacggcggatggcacggctaatagctttgacagcctcatcctgaccaatgatacgcgtatggagtgtctcctccatcttaaggagacggtcagactcatcagatgagactttctccacaggtattccagtccaagaggacacgatatgctgaatatctgcctcagtaacaaggggaccgacttcaccggattcagtctctgctttaaccatttccttgctcttgtcaataatggctgtaatttgggccttcaattccatttcccgatctcttaattccccagcctgtcaagatataacaatgatgagatagcatgaaacaaaatttggaagcaatagagttgattcaaaattgatgctaagtacctacattctagttgcacaagaatgaaggaataaaaggatggcttatagctatgatttagagtcactgggcaactttacaacacaaagtgcaaaaagccaaatcaactcaataggtttacaagtaaatagcagtgccagtaatatttactataaaagatcatttaagaactttatatgatttctgcaagaagtctatataccttttcaaaatcttggccacgtacagcctcgttcttgtctttggttacctgtcgaagctctttgtccagctccttggcttcatcagggagctgcaacataaaggaatcatgtctttagacagaaataatacagtgaatgagactgcaacatagaataatacaatgtagtacctgtgcatgcctgagcctaacacgagatcctgcttcatcaatcaagtcaatagccttatcaggcaggaagcgatcactgaagaaagaaagtaaaataagtttattagattgaaaatcaaatgattatatgtcaactgctgagaatttaaatcccatccaaaagttctgcaaaattaggggcatgtttggtgcacaccctaacattgccacacatgcgtgccaaaggtgtggctaacaaatcaatggcaacaattaggcaaggttttgcaaaaaaagagaaaaaaaaggagtgcatgatatttggatcctagggttaaaaaattgtggcatagcgcaaatgtggcaatgaaacaaacaatagcctcatgatagtttggcaaagtgtggtagtgaaccaaacacccactagatatttttatttgcaaacttataaccatatatcctttctagtccagaaatctgaaatggatccaagtcaatctttatgttgttcagcttcaaatagatcactgatatttaatttgcttccaggaagggatcctaaacagcatcatgcacagaatataaaatatattttatcttccaaggcattttgacagtctaacagataaagggtgaaagtcagtaagtactatcgtagtactcaagagttcacaggacactactcctggaccattaaacaatgcgcttacctgtgcaagcacctagttaccatttcagaaataagtatatgcttctcttcagaaaaaaaaaacagatatgtaaaagactaaacatccctatgcacaagagaaatatagtacggttaaaaatgatgccaattaacaagaataggtatgaattgatatagccacagtaaaggccaaaaattaataaagatgaaacatattagctaagaatgtgctgcatagcaaacctgatatactggtatgacaattgtgctgcagcaattaaagaatcatctgtgtatcgcagcttatgatgcagttcatatcgctcacgaagtcctcttaagatttgtattgtttcatcaacagttggctctggaaccttaactggttgaaaccgtcgctctaaagctggatctttctcaatatgtttcctgtactcatcaagtgttgtggcaccaatgcactgaagacagaagcataagaaatgtggtgaattaggggcaaaaacaggtaacaatcatatattgttcatggataacatgcaaagtggacaaattagtctctggagtcaagaggctttgaggcattctccggattaaaactataaatatgataaaaacataatcatggaagcaacagattcaaaattaggcacatatacctgcagttcacctctagcaagagctggtttcaagatgttggcagcatcaattgcaccttcagcagcacctgctccaattagcgtgtgcacttcatcaataaagagaataatgtcatcattttgtttgatttcctccataagtttcttcagtctttcttcgaactctccacggtacttggtaccagcaacaaggagccccatgtcaagagtaataacctaaccgagtaaaataccaatcagtattctgaaacaatactatgataattagaaagagaagcttcacaccactcaaaatcttataaattgtgcaagtctcattcaaatcagacgatagccttgagtcctcactggtcaggacacaataccaatgcaacaacattagttgcatcagtacacgatatcgagtgaaaagttgaattcacaattacatctggacaatgtactagagaaagctatccagaaagctagtattattcgtaaatgcaaacttatactataattacttgtctagttaatgaaattagcgagtttacccaaaagggtgataaaccctggaaaaagtgtcagcatgatggtactcatttgcatgcatatatgcaaaacaatggtgatgcacaggtgacaggatggtctaagctaaccttctttccttcaattgtttctggaacgtcaccattggaaatacgttgtgcaagcccctcagcaatagcagtctttccaacaccaggttctccaattaggcaagggttgttctttgtccgccttcccaaaatttgagttacacgctcaatttgatcctgcctgccaacaactgggtctagtttaccctgcagatgaaaatgattagtttcttgtctttgcttatttatctacgcaatagagaatgcacaaacaagtctgataaaatacctcttctgccagcttagtcaaattagtgccatactcttcgagtgtaggcatcttctggccactgcttccgccaccaactccagcaccaacagcttctgtgctttcaccaaccattcttatgacctgaacatcatatcaaatgtcattccctgcataattttaactgaaagtagattggctaagatttaaggaacataatagtaaagctatttacctgggtacgaatgttgtttggatcagcaccaagactttccagtacccgtgctgctacaccttcaccctcacgaagtagccccagaagtaagtgctcagatcctatatagttatgccctgaacaataaaaaatgatgaatattagacaaaagaccatgcatatttttctaaataactagtctcacaaggcatagattcaaaactcaaatgtgaatactttcttgaccttagcatcaagtcaacaacaatgccattgttaccttttcactttttttggcatacttgttgtacagtataagtgtaataatatgcatattaataatttagtaaacagtgccagatctgatgcatattaataagacctctagcatcattctaaaccagtaattattcataggagaaagaaagcatatttgtacatgattagcgattaacccaccacatgcagattctcaaccaatttagcactattattttgcatacttaatgtgaagtacgaaaattgagagcaggataatagcaatatgaaaccaaagcacatgctggtttgattggaaactagaggtatgtaagcaatatttcaggacaaaaaatgctataaggaaagaattaaagtgtccaattataaccaaatgaaactagctgaatctttgaacaaagagaggttatacctagctggcgagcttcttcaagtgacagttccaagacacgctttgcacgaggcgtgaatgggatctcaacagccacaaacccgctaccacgtccaatgatcttctcaacttccacacgggcatccttaaggttgatacccatagacttgagaacctttgccgcgattcctgtgccctcaccgataaggcccagtagaatttgctccgtcccaacaaagttgtggcccaggcgcctcgcttcttcctgtgcaagcatgatcaccttgattgccttctccgtgaagcgctcaaacatggcgcggaccacccctcttgaccccaaccctcgggggcgtgaaatctggctcgcgacaatagagccgaagtcacgcttaatcaccgacctcgagtccaggaaattcgtctgccgcaggccctggaaaccccccagggtgagggtccgtgttggcatggtacgcatcatcgtggccctcgcgcgcacgcggaaccgcgcggtgccgctcctcctgtatatggtcggagcaatcgcggactggactagcgacccctccataccgacctaccccaaaaggaaaaccccgagccacctgcccaccaatccaatccctgcaaaatcaccaaaatcgatcaaggtcaaacacataaccaaaatgaaactaagagaacaacactttctcccacggcctacatggcggtgagaatgattcacaagccatccgcgcatcgccgcaacgagaaaacctaacgttcccttccccccacaacggaagaagacctcacgtccaaaactccaaatcattatatacataataagaaaaaacaaaaatcggagcacacgtcgcctcgaaatggctccgctgccatttctccgacgagaccacagctctccccctccgcatcacgcgcggattcgattcgaggcacctcccatccacccggccgtccgggccggcggacgcctcccgttacccacccccctacatcgaccacgcgcccgcggcggccaccccatcccacatgctcgccggagtcaacccgagaaaccacccacccccaccccacccaaacagataaggccggcacccacaagcccggaccgcggccggaggaagagagagagagagagagagaacgcgagggctcacctggccggacctcaaccgcggcggcgacgagggggcggccaccaaccctagcagcgcggggggagggggggacggggacgcggaggcggcggaggaggaggaggaggagatgggagaggaggaaggggagacgcacccacgcgaggggaggagataagaagaggagagagaggagaggagagagccgcctcgactgacctgacccctccccacctctgcacgttatctccaaatataccggctttcccttttttttttcttttcctccttttatctttaccttttattttttacttttacttttgtttttttttctttactctatgcgggcctacgaccaaggcccgttggcccgttcatttgtgcggtgggccggcccacctcgtcaactaactatttcaacaaggaataagttcaccggaggtccctcaacttaacagcgagatttttttgagatcccttaaccacaaaaccagaaatcttcacccctaaactatacaagactgttcactcaaggtccctaggcagtatatatgggcggtttcgctgacgtggcaacctagtcagcaaaaaaaaattaaaaagtacgtgggacccacatgttagctgtacctttttttttcttctcttttcttctccttctcttctcttttctatcttctctccttctcttattcagtgagggaggccggcggcaggcggagcagcgcgcagatgcgggtggcgcagcagagggcgagcgcggtagcggagcggcgggtgtgagcgcgagcgcggcgacgggcgagagcggccgcgggcagagaagcagagggcgagtgcggcagcgaagaggcgatgggcgagcgcggcgacgggtggagcagcagagcggtggtgggcgagcacggaggcgcatccaccccaccccagccaaccaaagcacgccctttgccctcggccgtaagcctcaccgccaagtcgctgtcctccccgtcgccatcgaccggcaacgacgacttcgcggcgctcctcgacacggagctcgagctcacctccgtcgctgactcggcctccgccagagacccctccgccactagcgacgactacaaggaagacccctcccagccttccctccttcctcctcgagctccctcgcgccggcgccaccgccagggacgggaagccgacagtgatggccgtcgtagtcagctcgcttgccgcggcaacgctggtcccggcgctaaccggctgatgcgtctgcggatcgatgccctggctcaagagcttgcgcttgatgtgcgtgttccacctgcagaaccaatcaatcagcaccaagaacacaagaagagctaaccggagcagatgacaacacgttgaaatttgttttgcttacttgttgccaagaagggcgtggagcttgatggtgagctcgtcgtcgtcgtcggtgaagttgccgcgcttgaggtcggggctgaggtagttcatccagtggaggcagcagctctttcggcagcggagcagccccaccgccttggggagggagagagggtcgatggggagagcgcgccgcttgtcggcaggcggcggcggggcccgtggtcgagcacccggcgcgttagaacatctccaccaccgagctcgccgtcgcgccggccgccacctctcctcctctcccgccgccgctatcacgtcgaccgtctctctctccctctcccgctgccggccacctctctccccctctgtcactgcgcctactcaagacttgagagaactcggagagaagagaagagaaaaagaaaaaaaaaagaaatgcggaacccacaccattgtctcacttacatgtagaccccacatatttattttattttattttattgctgactatgatgccacgttagcaaaaccacccatatatactacctagggaccttgagtgaacggtttcgtataatttaggggtggagatttctggttttgtggttaagggacctcaaaaaatctcgatgtaaagttgagggacagccggtgaacttattcctttcaacaaaactgtacaatcctgtccagcaatgtgtcatatccaatcacaatccctcatattttaagataaaataattacttctataaattaaagttattattatagagaactgcaactgataatccctccgtttcatatcgtttcatattgtaagactttctagcattgtctatattcatataaatgttaatgaatctcgacaatatctatatgatatatgaatgtgaataatgctagaaagtcttatattctgaaatggagaaagtattatcggaatattgcaagctttggttgtcttgtaaaattaggcctaacatgtactacatatatttgtagtactcatggtttgtcaagttggacccacatgtcatatgtacatagcgcataaaaagttacagttttctgataaatgttttttttctattgttgcaattttgtgaaaaatataaagttaacgttgtggttaagtgatagttttgtttaaataattgcagttttctctgaaatttactgttgcttgttttaactccatgcgggcctaggaccaaagcccatggcccattcaattgtgcggtgggccggccatatcgtcaccgactcggaggcccactccgagcgcgaggcgaaccgcctccaacctgcgcggctcaaataccgaccatctcccaacccaacccaaacccttgtacaaatccaaacgaggcgaggcgaaccttcgagaagcttcgagaaggttgtggttgaggtcgaggaggggaggggggggagatggcggcgggaggtggtgggggaggaggaggaggaggaggggaggggttcgaggagcgggtgaagcggctgttcgggtcgaggctgttcgacgacgtgccggggtcgtccttcccggcggcgtcgtggtcggtggcggccggggacgtggagcggcggcggtgggcgaagccgtcggaggcccgcgacgaggaggaggcgagggagggggccgacgccgccgaccgcggggacacgccctgcgcctccgcgttctacgacgacaacgggtgcctccgcgcggggacgcggcggcggcggcggagtaagcaggaggagttcgagggcgacctcgatgaagaagacgaggaggaggaggaggaggagaaggagaggggtggcggcggcggcaagcagcagcaggaggaggacgaggaggagggggttagggtttccatcggcctcgacccgactctggatcgagaggtgagagggttaaaaatcactttggctcttcttgtttatttgtttattttattcattaatccacacgattagtagttcaactttaccatttcattagtctagactagattagggcgtggattaggaggggatcaactgcttgttttgttatgttcatatagtctatgagttcacacaattgaaacatttcaactgtaggtttgttcatcggttctcttagccacgttcatttctaatggagaattagagatgattgggggggtattgtagccatggcctgatcttttattcatgctaaattttgcctgtgctgttgttgcgctggggttgtgtcaagtgaaactctgcagctgaatctgatataacaaataatatagtcgtcgtttcaaagggaacacctttttattttcttcactacttaagttctaatatgagctgtaaagaaagttactacatccatacatttagtcagtatgtggcctgacttaatggagcgctaaattgctcaaaccagattctggatgagaattttctttttgccggttacagtttgttattgtggagtgttatatctaacaagatttttatccttcaggaagaagaggacaagtatgacagagaggcatttggtagagaggatgcttttgaccgtgtatacatgaatgaaatcatggatgatggcattaacatgagcatcaacactgtggtgcctgacatccttgatgattccgttgaggagatccaccgcttctcaagggatcccagagcagatatgggtgcggcatccgcaagactcaaggagtacgatagttcagctaaaggtggcacgtgttctctagctcagccaaatgaattcccaagtggcaggatacaagcaatgaaaaccgatgatgctaacgtgaaacctatactgaagcggaaggaggagcaaggcgattcaaagccaaggaaacgtgtcaagtttgctgctgatgttaaggaccaatcggcagagctgcctgaacaggatgaagattctcccatggttcctcaatccatggatttggtcatagggaaggactcatccactccatctgagtctcctggggttcctgactatgttaagaaccctgcaaagtatacacgttacactctggacactccagaatgtaacgatgaaactaacaggagagcttttgccgacctgcatgatatattaaggagaatggaaccagagcctgaggcaccaccagttgagatacctacttcagttacgttcatcccacggaagaagacaatcgatgcaatgacagtagatgagggtcccaaatccaatgatgcaaactcatctctcattggtctggcggcaggtgcctctgatgaaactgagcaatgcgaaatggatgaagatgatcctaaagcattgttaccgccacaggtccaaaccaacacgaagatgaactcccgtcgttacagatcaagtagaactgatgatgagtaaaattgacggtacccttgtctcttcagtttaatgttgtaatacaatctacaaatttgaggttccaatgttggagtagttgctatgcaagttgaggagatatgttgatgtacttttgctttgatcttctgatctgagctaaccagttataattctactgtggtacttattgtttaattaatcttgtactgggagctactgtggtcctgtggatgttgatgtaaacttttactggtaagctgactttactgaatcatctctttctttctcatgtcaaaaatagtggtttctatcgctatcagttcttcactatacattcagaaaacaactttaacagttacagagaaacctaatgagactgcaggtatgcacttgcaggtgacctcacttcctcagaaccaagatccatcttaaaacacaatgttaggtcatcgtatgtacagataaaaaagatcgtttaaatgctgttggctcatacatctcccaagagaaaaaaacagctcattttcttcttcagaaccaatggcaagagagagaaactgaattgcaaaagaaccctatatcaatctgtacattctgaatataaccccatgcattttccttctttttcttctttcagggagtaatgaattatttaccgagctcaagacatctacagtggcggctacatcttatcagcgattctgtatagggcatcagccaccttgccaagcacaccaagtaggctgctcacttggtccttcctctgctccctgtccagttggcagttgatgttctgcgcctccagctgggctgcaaccatccggctgctccggtctaggatttcgatcagctgcccctgcagatcaggagcttctcctgaggcgtcgtcgctgcgctgcctcttgtgcgcgccctgagctggtgagtcctcgacaatttgttccggttgcttggctctggacgtccccgctgtcaagaaatttagatggttagataaatgcagtttttctgactttgttgcatgaatgtgcaaagttctagcatcaaaggggctttcaatgtttcaattcaagataaacacaatttccctttttataaaagaaaaaaaaaggctactataacttttgtttcttctcatgaggtgatcctgaagtttaatactcctgctgtgtatcctactgctgttgatttatgtttttgttgcatattagactatacaagtatctctgaaacacacaagtaaaaactagcgaggaacaggtcgctgatcatgtttattcagtactgtatcaagtagggaagatagcataatgtaatatggaaaggtgaagtgaacaggataaatgcagtgaaataattatacttcttccattcatttctttatcacaatacttgaaaagaagctttccaccttgctgggcaaaagttaatgatggaatatccactgccctcatacaatttctgaaaaaagggtcactatgcgctgaatgatacaatcagttcgctggtactaataacaaaaggctcctagtctgcatcttttgcattttgggcatttattctgaaccagcactgcgtgaaactgagtgtttctcggaatgtcgcaaacctgctaaaatttgatgcttcacatgtatgttaataaattcaacagacaaactttacgatcgaatctgttgactgccaatttattcattttgttgtcaaatgaagacaagccacaattgctgcctgtgattaattagtagaaatatgtttgtgctttcacccaaggtccttgggtcctagattgcttcatatattcgggactgtattgtaagcaaagtcagatacagttctctcatagaacaatttgacaagggcacaacacacgcgtttaaggtataatttgatttgatcttttagggatgataattaccattgagttctctttttgtgttcaggctccctacaattctgttattagttaatttctattttcatatctaaactatacgcagtgacacaatgtttaaatattgctgccaagaattatctgatcaaagcaatggaacagtaaaaaattgtggaagatcaggggatgctgaagcacatgcaaaacgtgagcggggaaaaaaaaggggagaactgcaaggtagaaatccggttatttatcagtaccttgctctgaggcatcttgcctaggtggatcactcttcttctctgcaaccaacaaaccacaggagcaaaaacagtaatcagccaaccaaaaacaaacctttgccaggtgaaaataaacatattgatcactttttttttaaaaaaaaacagaagaaacagaatatccattaggttagcaacaaagaccaaaaacacaactacttgcaaattccaactcttcagagttcagaccaccacaaagaactgaacaagaaattttctgaaaaaggaagatgggcatcaagccatcaagtgattgaactcacagggaaattcgatgcataacatgaactgttaccataaaaaaaagaacagttgttttgcaatcgaaacgtcaatttttataggcaactaacccacccatcacacaccccaaattcagttctttgaagtacacaaattcgcagccttcttcttcttctttttgtcaaccaagaacacaggaaagcctcaatttttacgtgcaagaatggagcagccgcgctcaccggatgtcaggacgggcaccgccggcgccggagccggaggtggggccggggcagcggccggggtggtcgccggcggggtcgcctcgtcgtcgtcctcctcttcctccgacgacgagaagagcccatcatccccgccgccgccgccgccgccggccgcggcgcggccgctgtcgaacaccgccgccttctcctcctccccctccttccccgccgccgccgccgccgacgcattaccgccgccgcggccctcgaggatgtcgtacacctcccggtcgaagaaccccggcagccgccgctcccgccgcgcgtcgttgcgcatcgcccagaacgacaccttcttccccatccccgccgccgccgacgacgacgacggcgacgacagcgagcgctcccactccctgatcttcttgtagtcgccggcgaggttgctccaccgcttccggcactgcacggggccccgctccagcccgtgccgccggcagtacttcgccaccgacggccacttggtcggctccgcggcggcgccgncgncgncgncgncccgnccnctnccccctccctcgcccctccaccacccgcttcccctctatcagcaccagtatctcctgcctcgtccacctcggcagccgcggcgccctccccgacacctcgccgccgccagacatcgcgccgccgggagacctcgtcgaggagagagaggaaggaggggaggggcaggaagcaacagggataggaagaagaagaagaagaagaagaagaagaggaggaagaaagggtgtggcttaacacattaggagggagtggccttaattatgactagaacaacacaagattatgcctttagttaagccttaattaagaggattagtgggtggtctctctctctctttctctctacttgtctttctcctcttcccaaagagggaggaaaaggaaagagtggttgagggaggattaacaaggggaggcttaattagtcactagggtgtgtgtgtgtgattagaggaggactaaactagtttaggagagagtattaactaactattaatattaagtagtgggtgtggatgggggagggggctccaatgagagtagccacctactgttttcagttctcagcaagagggaagaagatagagcactgttgtgatatgatatgcatcactttttctacccccttgatgtgcttgttaattctaaataaggaggggaataggaatattggcatttggtgtggactaggaaaaaactttagtggtgagcaagagcaagcacagtttgacacttttttggtgctttctgtccatgatatctttgcaaggaaaatccttttcttttcaagaaagaaataaaaaaatcttttacatgcaaaaggagaagaaaaaaacactggagaatagcacagctgaatcatctttctgtttattttcttctggaaattcacattggcttttgcttgctgtgtgacagggacctattaagggcaggcactggagcagaaaggagggatctttggtcggcaatggccgtatgggcatggtgtttgagacgcggaaggcactactgtgtatgaaggcaactggccatgtagagtttcagttaaggcacttcgtttcttgcacaactggggattgtggccaaccaggtatgtgtgcattgccgctcctgggtcgcattcctgtccaggtctgtgtcagccaccccatccaggtcccaaccatgaattggattaaccggataaggcctctttgaaacgcgggatctttttctatgtttctatgaaattcatgcacgtgttgcaaattaggtcctaaaatgttgtaattatcgcaccacacggtttagagtctagtttttttttttggaaaaaacataatgatcattttgccaagttcttttgtaggatatttcccgtattctatatcattttacactcagactatattggtgagaaatctagaaagacatgtctccctaaattatcattatttgtttcatgtgagaaaaatatcttctttttctacactaacatcaagatgtccaacttggttcatggtttttgccaaccttccaccattgagagtacatgcatgtaaatttgatgaatgacacatgaaaaacttaggtagtcacagactcacagttgttgcatggtggagcatgataactgataagaccctatttaggattatttatcttcaccaccgaggattgtataattcgaccttcattgcaaaacatttaagtctaggaaatcttcaatacaaagtatttctagtgaaaaggttatgataatagaattcacgctttcgcttttcttgtgaagaacttctaatatcttgtgcttatgctcgatgggaaaatagaaatcatatcgtatgagaatcatgaagggaactactatgatatattgttcaaacttagatcggacgaataggtttttatgcacacgcaggatcatttctttttttcttttttttttcaatcagggacctgccaatatgaactgacaccgaaaggcttaagggcaaggaaatgctcaactggaggagattattgttgctaactagtcatcgttcgaacttaaacagaataatgataacacaagcataattatcagtagatgatggtatcgcatcattggatatgaacaacggggaggggagttttaatttctttttgtgtgttcctatcaaaaaaattggttttgctgagctctcttgcttcgattttgccccatcaaatcgatttcaagccaggccccggtttttgcaggcaagattgtgtgaaggacactctctcaaaaaagcaatgatttaatgaggatgggacggaggggcaagaaacgtctatttccaccttttggccctccaatatatatttcaacaaatatatcctttgcttaaggtacttttgacaattttttttagtgattggtcttataaattttgcatgtctttttagtttttagtggttggttgtaggtcaagatgtgctacagtgatgtaagatactccctctcttattaatttgatgttgttttatttttagatccttgagttggcattgataattcactcaagtaatttcacatcacttgaatttatagcacccatagattttgataagtcatccatattcgactttcatagtttaggatattgtttcaccatacaaactctaaaatgtcaaatagtagaaaagaagtccccatgtggattgcttgctggtacaacacaaggttcaccatatttaatttggttgcaaatattctctaaaaaggaccatgaagttgatatattgtcccatataaatttacctacatgtcctattagataggatggattgagatcagacgggagggaggaacgtggtgcgcggtatctagatgatataggtctgactagcatgaggactcccaacatttgttacttcttctagtgtaactttcatgtcaacctctctgttgggaccctaacttctcctttgtgatggccaaaggggtcactgccctttcagccacaagaagagattgcaacccctgtggtgtggataggtggatggatgcttacatttcccattggaaggaccatgactggtgactggatagatggggttgagattggcctctcatgcaatgccctataggattctggtagggcctcaatctttgagaggatatgttgttgattggtggtgcctccctactctcctagtgtttttttttggcgctgctatatattttgataattcgctgatgggtaaggttttttcaaagttgtggataggccaatgactttctagttaggaggttgtttaacctcccttccctactcatggctacttcaaccactgtttgatggatgctagagatcttagcaattttcagaatatattagaaagtgttaaagtcaagcctacatatttatttatcaaattttatataataggtgtcatacatacatagatatgttttagccacattggataacattgggtagtcttcattttccccttatgtattagcaggaaaaaaatattttagcgtttggtacaatctccaatatgacccatcactccatcaccttctgttgttgtggatgtgtagctgtgtaaaaaaaagtataaattattaagtattaaaaaatattttatgacaaatctagctataccatttccaggagaccaaatctaaacatacaccctgcatcaaaggggctttccttgatatgtgtacttgttcttgtattgtcatgatgtggtgaactgtcatttctctacaatttcttcttattcccttaggcatggctagcatttactaaaggctagctagttgtaacacagaaaattgtattacctgaagaaagcaatatcacacaaaaggttttgtaggaaataaaaacagttgggtgtgttagtgcgtactgtggtgtgtccactgtggaggcatttgattcctagctctcctccataattaggatataaatcctaggtcatggggggatcaccctctctgtaccccacaaccccacaacaaaagtgccttgcattaccatagtcatcgacaacatcagggagatttggcatatcaattgtagggtcaacttacacaatcttctttcaatatgttctctcgaattttgtacaaaattgtcaattaggaattttgcagataagaagggatgacggtgggtgaggacgtgtctaaagagcaattgtagccccctttcgaaaagctaaattattttgtggttcctaagaaaattttattggagaacgaatttggaaacacaaaccaaacaagccaggtatatgaaaaatatttgttttcacagaaatatatgcagaactattacttcctccacttctggtcataaaaacatatcgtggtggacatcaatgtttatgtaaaatggttcattgacaactaatttatgtagtactaatatatatatttgtaaaaacccaacaatactacaaaagtagctttcgagacatatatatgcatatattctttatatttctgatccaaaaatatatttcaaaacaattaattctcatatgccaaacataactagtacatgttttgtgacataggaatccctagtacatatttttgtgacacaggaatccctagtacagatgtggccacatgacacagatagcacataacttttagtatgtgtcccaacaactaccagagatgcatgctctgcccatcaccgtggaaatgacaatcaaaatcctaataccacactaacacatacttatgttttccattgcaattggtgcacaactcccttttctctaggccaaagagaaagaagaaacagcataggccaactaaacaataacagtatcccttcgtctttttcttcctttcatggatgggtatattgttgcctccctttcaaagtgcaggaaagcaatcctatccatttgcactcatatgtgaaattaaaatagaaattggcaccactgctgtggtgcaagaaaaagccatataccggctctctgacgacgacatgacactgcccttgtgtaaggctgatggcttgctgatggtcatattgctagtgtcctaataacaatgattatatgtgtgaagttgttaaccagttattagtactaaaacttgcaaaagaagctgggtgtacatgatacaaaattcagatggggctcacatgatcaaagacagacagctagggaggaaaggattagagaaggtcttgcactctaggggcaatcaggctgaaataataatatgatgttgatgatgataggtacacctgaggcctacagttaaagggcttaaatgaaatatatgcttatgggtgtgcccttatttcttttccatgattctttccgagtggctttcggttgcaatgatcccttcttttcttatatatgtcttaaagaattgtgttattctctacccataaaaggaaatttccttgggggttattttgactgatcttgaaaaaaaaagttcatttatacataaatctgcaaagcgacaagtggatttattgggaacaaagtgtagcaaccagggtttaccaaccccaaaaccggcgatccaaaaccagcggtcggcagtttccatccggtaaaatctggtcaaatttcataaaaagattaatttcagtttgatcttttctcaatttgattgaagaaccgagtgggttgtattattaagccagtctgggaaatcgattttgcgaagatggaactggtttttgtcggttttgtaaaccctggtaacgactaataacaccatgttcggcttataatcatcccttaattccccaccacttaatatgagccctcaaaaaacattctggggcacttagaacaaactttggacattcacttatgacaagaacacttatcattaggtttttcttttttcttccactgactgaagctaagaacaaaatctaagcacacatggacaagcagcgaccaaagttctgcacgttgtgacagggcttcactttgttatactctatgcttttaaccagagcatgctacaatcgcagtgtgctttcttgttcgatcgttaatttcctgatgcagatttgcagagttcttgctggtctcaccgtctcgtttctggcttcttttcaccattccctgttcatcttcatcttcaggaatcaggacagacagctaactacaaaaacttctgcagtgcttgaagttgatgttttttttagctttaccagattgtttttcaggtaatcatagatacatgaactaaattaagtaagcgtcagctgatcagcttatggcctcgtggagaaggctatgtttctttcagcttgggattattataatctagattattaaatcagattactataagctagattgttataatctatagtagaataagcggttagttgtttctttcctagattattagagcatagattattgggtttgtaagtctaaagagggagtggggtggcatgatgggtaatttttcatccaataatctggaaaaagctcacctaaggccctgtttgattcagcttaagattactgtaatttagattatagaactacattactataagctggattataataagccgacatagaataaaatgctagctatttgtttctctagattatcatctgtttgttagttgttagccacccaataatctaaaaaagcacctttagagtggcttatcagattatagtaatctggcttatagattataataatctatgacaataagctatttgtttgtttcagcttactcctaataatccagattgtaataatcccaagctgaatcaaatagggtctaaatgagcttatcagattataataagctgggctctagattataataagctaattcaataagttgtttgtttctttcagctttaccagattgtttttcaggtaatcatagatacataaactaaattaagtaagcgtcagctgatccagaagtagagaagatttagctgagtaacagagcaagatactggagtgataccagattcagaaccgaaactctacaccactaaaaagcaaaggatttttttttttaaaaaaagaaggaacaactaagtgccaaagtgatgatggttaactcaagtactccctccatactcacaaagaaagtcgtttaagatagcgatacggtcttcaaaacacaaatttgacttcttgtttctataaaaatatttattgaaaagtgatatatgtatacttttatgaaagtattttttaagacaaatctatacatataatttttatattttcaaactcaacaacttgagagttatttataatttatattctcaaggtttgacttaaacattatcctaaacgactttctttatgagtacggagggagtaccagcaaactgtcagttcaaagcacaagtagcaacagtattgaagctctggaattcaaagtttgttgctagctgcgagctgtaactttcgaccagatcactgttgccaagccatgcatggacccacatatctattatacattaattttgataatttgatcctttgcaaaaactaattttacaaataaaccaccgccaaaacttatttcaaaagtgatattttttttcagcgccaaatcgtgtggcgctgaatttagacacctcagcgccacgtcacctggcactgaatgccgtgccaccgtggatggaaagctgagtcaacgtgacaacgtacattcagcgccacgctatttagcgctgaggtgtctaagtttagcgccatacaatttaatgctgaacaaaagggtcatttttaaaataagttttggcggcggtttatttgtaaaattagtttttgcaaagggtcaaattgtcaaaattaatgtctattataacgattgcagggtgctgatcctaacatgttattgggccacgtggcttcctataaatgaagcttcacctctctgtaaatctgccgcatgtctccttgctctcctcctgctacacctcccgcatcatttcatcgagaacctacgcgcaaatgctgattagcacccgttatcctcacggttgtagagtttttatgaggtcgggttcacttttaggaaactgtgagattagcttttccacggggtgaggcccacgtctcttggacgatgcatgatgcatgatttaaaataatgttaaaaaaacaaatactcaatgactcaattggtacaaccacggtgcacatacatttccgtacgcctttttcacagaagttaaaaaatgataatgtggaagtgaaatacatttccatgcacaatactccctccatacccataaagaaagttgtttagcacaatgcttaagtcaaaccttggaaatataaatcattaataactcaagttgttgagtttgaaaatgtaaaaattatatgtatagatttgtcttgaaaaatactttcataaaagtatacatatatcactttttaataaatatttttatagaaacaagaagttaaaatctgtgttttggagactgtgtcactgtcctaaacgacttcctttatgagtttggatggagtatatattatactgataccaaatgaactctcagataaatttatatcaccaaaaaaataatcatttaaacatatagtagtgcatacaaacattcagaaatgtaatacaaatatgatcttcaagataagtacattcaaattccagagtattgcatagaaatgatttcttcaagaaaaaaaatggtgtacttcgagttttgaaattcgttgtaccacgagtactagttgcttgggttcaaatttagatttaaattgcaacacttatgaattgctcaaaaggcaaatatatgtacgacgttgccagaaaacacagaatacatttatctctacagcatcatacatagatgcattaagtgtgttctatgtacattttgcacaaggaaaaaatgttgaatgcacagtagtatacacgtgcattcaaaatgtaatgcgttatttctcacaagaaagaaatgctactacaaaaattcatttgaactgcaccatagtatacacctgcattaaaaattagtacattattttcttatagaagaaaaaaaatgccctcataatacatttgaactgcacaacatttatagacagatacatttgaattgtgttattaaaaaaatggattttatcatttttatagacatacggaggaagggcagagccaccgcctgactagcccaagtggccgcggaggctcactgacaaaaactccattaaatttataagttattgaatgaattgatgatgaaatttatataacaaatactagaagcgaagtttgctcgggctcaaaaatatttctcgctccgccattgtgaggagagataaaatgggaatactagtttcattactttggttcattggaatttgtgcgtatatattcgacttccaacttatgtccatgaattcaatgttttgccgctttgaataaatatatgaataaaagggtaaagtttcacaatttcaggcattaaatagataaaaaaaataggtttacttatcagatcatatcatttactccctacattccatattaattattatataaatttttcaccaagaccaagaaaaggtattaactttcctatatttcatttagtgtgagtatgtggtagggaaaaatcaagaaacatgcacactttgggcttgtttagatctcctggcaaaagttttcaccctgttacatcgaatgtttggacacatacatggagtgtttaatataaacgaaaaaaataactaattacatagattgcatgtaaattgcgagacgaatcttttaagcctaattgctccatgatttgacaatatggtgctacaataaacatttgctaatgacggattaattaggcttaataaatttgtctcgcagtttatagccgcaatctgtaatttgttttgttattagtctacgtttaatacttcaaatatgtatccgtatatctgatgtgacacgccaaaactttacacccatggatctaaacaccccctttaactcctgctgggccccatacataagaaattttcatgcttaaatgcaataatattacaagtcaaacgaaggggctatgattaaatgtaataatattacatgtcaaacgaaggagctatagttacatgatggtcaatttgtaaattttaatttgtgttaagtgatgatcaatatgaaacggatggagtatttcatactggctggtctattttctagtgtaaatgaatgtatgagatttatccacgtcaccgtaagtaaaacatctattttattttgtacggtagttttcatttttcactacatgaagttgtggacggacataattccttcgtggaaagtttgctcttttaagaacgctagctaagtagtactagtttctcttcaaatagaggaattcggctcgatttgaagatccagttttgcaatgccatcgagtggtttttcccaaaaggtgcaaggaacagccactgcttcacattttgtcagaaactggtcttggtttatgaactcaaaagggtcttgagcgaccaaaaccagcgagatgctcatgaagaaaagccactgctttcatcgaaagaagtctgagcacacaagttttcagcattacagtgttttgaacaaactagcagagccaatcccaaccagagaaaaaaattcttcagaaacgggaagtagacctctggactttattcaagattcgtccaaattgaccgactcatcgcatattgtaagtgattcggtgatctaataaccccttaattagcatcaaaatcatgagtttaatactcttactatggacatggaagtagtcactgagccccagagtagaagctaaggccctgatcgaaagtgctggctgcagcagctgcagccagtcagccccaatccaaaccaaagagcggcagctgtgaatggcttgcagcagccagcacaaccgatcaagccctaaatgttatgtttgggaagcttctagattcttccagaagctccaactccctccaaacactattgcaccttcttccagaaacgctcgagctctcctatccagaatgaactaaaagctaagagctgggtttcttcttcatattcttagaagttgactaccaaccaactgtttctcagaattgctccccaaacagaatcaaaacagaatcaaaggcttgtagcgtggagcgaaattcgaaggtggaaaaaaaaatcagtgtaaaatcctctcagggctaatcactatgagcgtcattcggtttgtaggatagaagtataggaaaggatagaagtataggaaaaattaaaggaaagttttctttcctacaagatgtatagaagaaacataagaatttttgtcatctactcaaacctcctggaaaaatttctatggattgatgtgtgcaaacatttatattcctctacttttcctattcatatggattcaaattcctccgaaccgaataataagtcattattatgcttggcgcctctgtttcgcgcagaaaaaaaaaaaaggaaaaatccaattcgtcgtgggccagttgagccgggcccggcccgttaaggcctcgcggttcggaagcccatcatctcatccggttcgttatttttatttttctcagggaaaaaaaatccgaaagaagagaaaaaaaaatcccatctcagtccgccatggacgcggagatggacctcctcgccgacgacgacggcggcgaggccgagaggctggaggccgcggaggcgcaggccgacctcctccgcgatcgcctccgcctcgccgtcatcagcatcgccacctccgaaggttaggcccgctttctttggttcttgggaatgagggggggggggggggattggggagggaggatcttcgcgaatgcttcaactgaatgaaaccatggcgccgccgtgcgatttcttgccaggaaagaaggcggggatggaggtctccgaccccgtcgtcgcctgcatcgccgatctggcctacaagaccgtaggtacgtataaatatgagtaaatatctcccaaaaccctagactttttcttgtgttcggcggcttgttcgtgccaactgtatcctgtttcatgatttgttttcactctaaattgttttgtatgtgtgtctgtactccatcttcaatgatctgcattcatgtccatgtgcataggtttgctcagatgtctcctgtaaaccattccaattctatcaactacagtgcttaggctgtgttcgtttgtgtgagatagggtgagaaaacaccacgttttccgcgcgcacgcttcccaaactactaaacaatgcattttttgcaaaatttttctatagtaaagttgctttaaaaaatcatattaatccatttttgaaatttaaaatagtttatactcaattaatcatgtgctaatggctcatctcgttttgcgtatcttcccaatcttctccatcccctatctctcaaactcaccgtgtagagagttattggtttttaacattttcagcttgttctctttaacagtagtatcagtttcttttgttcttgatagttgcgacagtggagctttgttaaataggagtaggtgctcgttgccgaaatgcatgtgcagagaagatgaaattagggtgaaatggtgaaatttatgcgtgatttgctctgaatgactggaaatctggatctccatagctaaagacctttattagggcatcttcatcaataaccaaaagggaattccattgcttctgttgtcttatcattcacctgcttctggacatattctacattctaaacaactcctaattcgagtaacctagaatgtattcatagtattttctctttgaatatggggaagttaggtattagttcaatgcatccggagtcaaatgtggtttatatagatccagctatttgagatatattctggatatgtgagatatgaataaattgaggaggccctttcctgcttggagattgtttcctgtcaccgtacgggggtatattttctgggcctaatatacttgccagcattaactttaccgaaaagacctaaaagctctgaaactcaaggaaataaagtgaactctttaaagaaactctgcaatatgtcgatgaatgcgctatattcagttgaagcagaataaaacagattgtcctgttgacatccatggcttttaatcaggtagttccaaactgttggcaacatacataacaggtaactcagttgcagcaagtttcattaaagatcaaccccatcctgtccataaacatcagaatcacatctttttagtgacaccacatgaagatagaattatagaaagcaatggttaaccacccaatcttgtaccccaggcctcttcagaaaagtacatttcttgccagttgccagaaaagagtgattttgtgatgacagtaaagcaggggcagcaggttaatgaagcagtagattcaaaagtaacatctctgaaaataaagcacatataagctctactgaacttctagatgatatagatggttatgggtcttgttagatctttgattttttttaatcatggtaattctaattaacatctcttccgcaatgtgcagagcagctggctaaggatgttgagttgtttgcacagcatgctggtcgtaaatccatcaagatggaagatgttatactcacaggtacattacgataccgtgctcttctgatcccaaaagaaaacatttttattttgcttcgtaaaatacttgtttgcatcttacttgctgtgattgttgcgacgtaattccagcacatagaaatgagcatctgatgggcctcctgcggacattttctcaagaactgaagggtaaggagccttccagcgagaggaagagaaagaaatcttcgaagaaggacgacaacgtgatgcaaatctgatttaagtcatgagataaatcttcttcccatagaacaaagtggtaggttcaagcaggaaactctgcaagtaactcaggctacccactgatcctgtatttcacacatttagatgtggtatgacacaatgttgtctgtggaaagtggagatccttcacacctgtaaattcactgaggctgttgtgtcaagtagtaaatggcaaaattcagagtttggttcttacacgggatcatgtgctgtcacactttctgataatcctatgcctcctgctgatgtttgctcaactgaaatgtgcacagaaaagaaaggataaataacaaaaaacttccgtgtaagtttagaactagtcactaatcagttctgtgacaatttgtgatgtttggttaaccagggaaaagaaaaaactgatggccttgaagctgtataagatgaacctgtcaaactttgatgcggtaaaactctcactgaagggattctacagatatcgtggtattatgtcagaataagttcacttaaggtcccttaacttgtcaccgaatctgaaattcatccctgaaccgcaataccagatataacacttccctcaactctcaaaaccagtgcaaataaggtcccaaggcagttttccaggtgatgtcgtcggcactccgtgatgactaagtcgttcaggctatccgggcgggccgagcagtggttctaggagagcgtcccctccccatcgccgccgctgttcgccgatggcctcgaccccatgttcgtcaccacatacgtcgtgcacctagacagccgcaccgtcttcatgctggaggcaggagcggcgtgcgacgaggagaggggcggatgccgccggcagtaggcccgtgggggtgggagtagaggaggccgtgccatccttatctccgccgacgagaggaggaaggagaggggagagagatgaagacgggagatggggagaggaaggggttgagaatgacagctggggcccacgtgggccccaccatcaattattattattattatcgaattgccacataagcgccacgtcagttaaaggccaagccaaattagccagtaggtgccacgtcagctaaaaccgccatctaaatcaccataggacctatattgcactggtttgataattgagggacccattgtatcttgttttttagttaaaggatgaaaatcggattcgttgacaagttaagggaccttatatgaacttattcctattgtgtctgaacctgaacagatggcccattgtgaaaccaacacattgggtctaaaggccaacatggagcccataagcagccatcaagcagggcccataagcccatgacactgctcactttgagcccatatcaggcccatttctatcatatctttctgactgtcttcagagttcagaattcctcaagctgcagcaacaaatgggcgcgctaccaggttccaaccagtcaaaataacccttttttttctctgcaaacttcagaattagtataagcatgcagtgtgccggtcttctctatctatattaatataaaagatggtatcaccaccaccatccaactaccatgcggaacccatgaactgaggtgcttgtcttgtttcttactttccacatgccatagatcccgtcgaaagaaaaacatgataatagaatattatgaacatttttatctttatggaatgacaataaaattagcataaatgtattagacaattgggaaaaagaaccgttgcaactcacgagtattatgctagaataattataagggaaattcagactgatattttccagggagggtttcatttgagcaagcgttcttggtaagttatacagagaactaattccagcaatgcaaatttcagaacaaagtttgtttgaatactgcacacattattggacaaaaaaaatgcaaagtcaggttgaccatttgaaattcgcacaatttttttttgtgaggaatcttgtactagtacaaattattgggatgcaaactgcaaagtcaggttgtccctttgaatagtgtacacatcaatccctttcaaaataaataaattttttatatattaatctgaatggaggttatgtctagactcgtgtataaaccttaatttattttgaaacatagggagtacacatactggataattctgagagcaccaacatacacgaatttgtgcctgtaacgtctctctgcagcggcaaacagcaaactactctactcaattctggtcaaagattctgagtctttgatctgccaacctctccaaccacacacataaatactctatgattaaattaggctttgtgtcactgttaacaagatatctggtcgtctgacccaacttgctaatcaggttgattttgtctgttttttcaagtcttagccacagtcagatggagagttgtcatcgtgccatcggttgattatttcattggtctcttctgtgttgttggaggaacgtgatgaaaagaaaagaaaccccaaattaatattatgtttgaccaacacggtccccatatttaaattttagacgatccattcgaatttgataatgttttaagcgatgttgtgtagaaggcgacgaccgaatcgggtgtcacgtaattttcatcctaattaatttagattcatttgaatcgaacagatagactaatgacaaagctctcattattgttgcccctccctccaaagtttgtaaaatatgtgtaaatatatgatagagttagagttaaattctgtcctaagctctcttaaatagggaggcagacctgttgtaactgcgtgacaactaacataggtgagcgggaacggctaccggtgacattcgaccgaagattgttgtatagctctgataccacttgttgtaaaacgagctccgaaattgacaatggtagctaaatgcggaatagctgatttaaaatcccgagcaacaacaggtcaaattcgttgatggattcaatgagttgtttggcagtacaaggtatatctaggatatgcgggttggcatgatgggatataaggaaatttgcgtcactgaagaggaagagcaaacattattatggtaattttttcaggtgattcgaggcgatggtgattttctaatattatcatggattcggtctaaagaagctggaagcacggatgttgaatttgttagctcggttcataagacgaaaggaagaaaatgttctctttgtgtccggtgagtttaatttatttatttggtgatgacattagttatttggctatggattaggtcaagttaaattaaaaatggaagataaaggttaacatgatattcaatagtctgggatgtaccagctaggaaggaatcaattttgctttgtaagatgtttgcgatgatagaagagaaggtagagcactttgcaggtagagtcgagagaaaaaggtcatggggatagtggagactcttgattacggtgagcatagtgaaggcttgtcgtgagcaatagaaagaaactaacgcaagtccagatacacggtggttcgtcaaggaacaaatcatgttgccatggcatattcgtcaagatgaagattgttagaatttatgttgaacatgtatacaaagtcggctgcagtttagatattggagttgtaataggcgtaggagagagttggagttatactttgtcttaagcactctcttaaatagagagacagacatgttgtaatcgtatgacgacttagcataagtgagagaaaatggctgccgacaacatccaactaagggtcgttataactatgatgcgctgtaattatgttggatcaggagaagtattcataataagtgctccaaagatgtaaattatgactgaactccattattaaatatcatgtctcgatgttgtcgttagttttgtatatgctatgatgttcttctgagtttagccaccgatgtaagttgtgaagctggttttataacatatacaactcgtctactcctttggattactatatacttgtcgctgttaaccagccttgactgttaaccagccttgatttaattataatcactataaacttttaaattatcgaatttttgttgagcaaaagttgtatggttatatttaacatatatatgtacaacctacttcaacgatattcatactttgcaagcacttacaaacttatgaaaaataagaacagtcaaagtgaacatatataatagtctctgatgacaaatactccctccgtttcacaatgtaagtcattttagcattttccacatttatattgatgttaatggatctagacatatatatatatatatatatatatatatatatatatatatatatatatatatatatatatatatattcattaacatttatatgaatgtgagaaatgttagaatgatttatattgtaaaacggaggaagtatttaagaacgagggaactaatatagcacaggagatcaagacgaactccgcatcttgcaccacaaagaagggaataacaatgcaattaatcatacaaatctttgttgctttcatcgtcacacacatgctgacatgccatcggccttgcactacgacagatgagctgagaggttgtttgattggcatattcatattgctaaagctgatcatacttctattagctaccatgcctaacattaagtggtcaacaaaattaaaaccacatgaaggagcaagcttgtcacgcttttgtatgccaacaggatggatctacagtgtaaataccgtgtcagttgacattgatgactttgataaaatctacggttaaattgtttgtctatatattataacactacgatctaagtataactaggtgaaaccccgcgcattgctgcgaaaattcagtatgataacaataaaaagaaaacgtgtaagatagctagataatatcagattaagtaaattaatgtggtttatgataatttaaatttaaatagtatgtagaatagtgattcaaacacaaaaagtaaggtggtatgactttatggaagaagaaaagtagggagatagtttggaccgtagattaatcatctaaaggctaaaaacaattaatgtgatatgacttaattagagggaaaaaaaggagaaatataatttggaccataaattaatcatttaagcactaactaagtgaggatgaactatataagtatataggatatcataaaacataataaagatatacattgaaacattatgtgaattatgttggatgataatttaacatgtttgtatttgaaaagctcttgaattataaaaactataaagatatagcatgtttgcataatgtttaaatgtgatgattgttagtggatgatgatgtggcatcttgttagtgaatgataatgtggcatctttgcatgttaagcttaaggagttagtgggggataactttatagtaagataggattagcatattatgatatcgataggcacgttatgacaccaacgaaccaattttttttttatccgccactgtgcaaataacaaacacctaatttgcataaaacctgtttaacttaagttatgacatggttaggtaaattgcaaaaagtgaaccacacaatttcaagcttgctgaatgatgagtgcatgcatacacatagcatgtatgcgaatgacacgtgggccacccttcgccaggaaaaccacccaatcacagagcaacacgtacccctgctgattcctagtacctgcataacctctgtagagagagagagagagagagagagagaggacaaaagatgagaaggcaagtcataaaaagcaacgacgagctcctgctatacttctcagctgcctctgccttgtgctgtgtgcatcgtgcagctaagcacaagaagcaaacaagcagctagcacaaagtgtgattgatcttttgcagtttgctacgctacgtaacgtaccgagtagatcaaggagaaagaaagaaagaaaagcttctttaatttggtcgtggatcccagtaaagttcagtagatcgagaggtctggataaggatgtcggaaaagataagagatgaactactcctatatacaactaccaagtgtcactggttaattgtatactccctccgtcttgaaatatagctatttttagcacagtgttttgtcccaaaataaaactatttcttcacataccttatcctctcaaccaatcacaatcacaaccaagctggcagtagattgcattgcattggctgcaatctccaggtcagccagagcatgcatatctctctcaagattgaatagccagcaattagtccacgctctaatttgcataaatcactactataaaagtgatttttctatacgagaccccttaattcttacaaacggactataactagtggcatctgcaaaaatcgagggtcatttttgcatgcggcccgcgcatagaaaaatcgattttcccatacgggcctctttaagacggcccatgcggctcacttaagcgcccgtatgaaaaaatcgatttttccatacaggccacttaaggaggtgtatgcaaaaataaaatttgaaaaatttgaaactagtgtatctcactcatatgaactacaaattagatgattcttttttctaaatgtttctaaaatcatgctctatcattgtgttctt

SEQ ID NO: 28367 - DNA, 18870 bp, Oryza sativa
ttagttccaaagtttttttttccaaacttcctactttccatcacatcaaacctttcatacacacaacttttcagtcacatcgtctcctatttcaatcaaattctaaactttgggccgaactaaacacaaccttagttccaaactttttattcaaacttccaactttttttatcacatcaaaacttttatacacacataaacttccaacttttccgtcacatcgttctaatttcaaccaaactttcaattctggtgtgaactaaacgtaccctttatgtgtgtaagaatgttttgatgtgatggaaaagttaaaagtttgaagaaaaatttagtatctacaccaggcctacctaaatagtggccatcattcagtacatcgccgtctacacgtctagttgcattgtgatcaagtcaactaactctgtcccatattacttgtcttatatgatactaactctgtcccatattacttgtctttttgagttttttttatcaatgtttgatcattcgtctcattcaaaaaattttggaattattatttattttgtttgtcatttgctttattatcaaaagtactttacatatgacttatctttttttatatttgtactaatttttcaaataaaatgaatggtcaaacattacaaataaaaagtcgaaaaggtcatctattatgagacggagggagtacaagagcttctacgaaagcagtaagctaggtattattataggctaatagctgtggataacccttacggcggcgtgcaaagtaaggtggtcaggtcaagcttctcgcctggtcaggtctccatgcatgcatgcctgacgtacaaaatacaccatgtgtactatcctagtcatgtctatgtcgtatttatacgtatgtgttcatttcagtatatatatccaaaactagctagctagttgtgtgtatatatatcgatcagcttccaacaaaggcctacatgatgatacgatgcctcttccggtcataaattcaagtatgtttacagcaagatttaatcatatactccctccgtccctaaatatttaacgccattgactttttaaaatatgtttgaccgttcatcttattaaaaaatttaagtaattattaattcttttcctatcatttgattcattattaaatatacttttatgtatatatagttttacatatttcacaaaagttcttgaataagacgaacggtcaaacatatttaaaaaagtcaacggcgtcaaatatttagggaatgagggagtacacttttgatattttgatccggcattaacttcttaaatgcttgcgcatatattttctttaaaagtgttatcatagcatcataaatttaatatatagaatttttaacttatatcaaatatataatgttgatggttaaacttttaaaagtttaactaattaagtcttgtcttaaacatcgaatatttgtgattagagggagcacatatttgggagcaaatgtgtctactccaagtaatgtttttacaaaagaaaattagcaagatagctgcctatgcgatcaaaatgagaatacaaactccacattaattgtctatgtctatctataagataattttaccatccttaaaaagataaaagatacctagaggtttcatatttttttagtgtaaaatttagtacctctaggtactaagtaccttaagttacttaaaaagtttggtgtaaaatttagatatctgatagtattttttaaggactataaaattcctcctatctatatataaacttacacacatgtccacagttgttcgatgatgtaaacttgcatgtatcctaaataagccctgtgttttttatctctattaagctaaattaagccacacaatacaattaaattatctctctgctaaactgacaatcaagttggttgttcagtacctagcttgtcgcttaggagaccgattgatctgaatatatcgaacaaattaagctacagtcagtcagtcgacaggttcttgtcgttccaagtcatgatcgatcagttgctagcttttggcgagtctgaaagaaataaatcctggtcttctggttgtactacaaactttgacactgcaaactctgatgcgtacagctaactaatgctatctatatagagagctaatttagtctatttactccgattaatgctaatatgccgtgtcaacaaaacaagagatactacctcccattcaaaacaagcccgtacttatataaagctttcaggtgcaataatgtcgattagttcaatatcttacgaaatttcagcgattcagagtggttgatgtctcgccggtcaagatgcttttgcgtacataatatgctgatctagatcagttacgttagtcaatttggcatcagctttgaaaagaaattaaacatgtagtttcatgacttgagtaagctagcattcatttatttattattatactatagttatgtaaggagaagccacaaaatttaatgtgcaagtcattgcaaccacagagtcgtccaaaaaccatcagatgttggtcacagtaaataacttgtggtaccaatattgggtgcttttgattcaaaggattagaattgacaaaccatggcaattggcaaacaaataccactaaggtgattttcatgaacactctttctagatatatacggttttggttctgttgtagcaggaggtatactccaatgaccactttgcaggagatctagatatgtgcaaattgaaatttgtcatttctttaactttttaggaatctgttgttttatttatctctcagctccattattgcgaaacatgatttttttttacgaacgtgcaaaaaaaattacatgtcaatatattagaagaagaaagcaaagtttagttacacaatgcaaaaggttatgaggacgtagccaggggacaaggaaaaaaaacccaaaaaagtgcaaacaaaaaggttagctattgagaaggaaaaaacttctattgcgagggagggtgaggttggggaaacctcaatgccagcagtgctagcagcagataatcgcagacggtctttttggaggatggactcaagaactactaaccgaagagcatggaacatgtataataatgtacctttgatccaacggccggtttatccattatctgaaaaataccgctaaaagaggccaatacgaacaggtaacctgataacggtgctccataaatcaactagcttttgagtcatagaaagccactagaaatagtggcgcgctacgctgcgccggtcgataatgtcattgaacaattaatatataattgctctaaggtccaagagaactacaaactaaacattgaattaagcataacagccacaacacgtcacagaggcttactaattaccatcaacctgtatacaaaacaaaaggttgtaaatttgttttattagttacgaaataatttcagcacattttacactggtacactccagcaatgaaatgcactcacccaacatctaaactactcttccccactgatggaaagtatattagatatactttgtgttgcatatattactgctgaaaactccctcccaagtagtcctacaacagtaaaagaaagaagattagtctatgcttgctgatgacaatggtttgaaggttgacaaattaagcaatgaattttacaatcccataggaaagtatactacagttatcctacattcagtcaaaattacaacaccttttgggagctctgttatctctctgtcatatcaagttatcaatagtagggtgaaaggaacaaccacgcagttgcgatgccaaaataacttttcttgctcaaattttgaggtgctagtgctagtaaaagtgttttccgcatttaagagaagaaaatggataggcatatggttggattggaaaactttagctatggggtaatttactctacatatttgagaaaactaattaagtaacaaatttttatttcgatgctgaatttgaaaaatagaacatatcagtcggctagttcgtacaattgcttccatgtaggaaaatacaatatgtcaaacaatagtgaagtattatcaaaacagctttaagttcagttaaccaataaatttgaaagtagcaacagtaccaaaacacatatgtcctgacagtataagttggcgatctgccttagtatggatttgtgccctcacacgtgctctttgcaaacacctagaacattgtccctctttaaaaagcacattatgcatatcctccttgcagccaagtttagaaaataaattgctgattcaatattaagatgcaaaattgggatcaggggatattcatagattgatccagatttttatttaatgatggataaagatggtaccagtcagtagctgcatgatgtaggagacggtgatggccccagcagctgagttgatgaactcggcagactgtttgtcgaagtaatgaatgacgacttgaactatgtaactgaacaaaatggtattcatgcaaatggggaatgatggagtgagggtgaagtagaagaaacggggttggaagggaagagtgggcataggtgttcaccttgaaaggagagacggtagatcagcttgtctaaacaacagcaacgcctgatgatggagacggatacgccttggatggttcaggagttgggatccggaaggctcaaatgattcacatgagatggggaaacaccacatctcaagctcaagctcgcagaccgtcgagatgatgctatgtactccctccgtttcacatctatctagattcattaacattaatatgaatgtgggaaatgctagaatgacttacattgtgaaacggaggaagtattgatgatgcccctatggcaatcgatgtgggacgaactgccatcgatgggccgacgacgatggaggaaaaaacctgcgagggcgcgagaagagtgggaagaagagaaggggagggaaagaaaggggcacgcacgccatgccctcactccgttgcgcgaggcggagagccggcagcgtgcgccgatgcgtcgctgtctgcccacgagagggctacggcagcgtggcggcggatgaggccatatgcgagcgggccgcgagcgctgctagggttttggctgtgtggggatatgttgggaagatcttgaccgtctgttgtcctctcgtcgatctgatggtggtggaagagccggcaccgtaggccaggtggacgactggatcgatcccaatgcggcatcgaacagcgccatggtaggtgaaactcgaacgtgattaaccgaaagaacggggttcgaacgcgattaaccggaacaaccgggtgtttttttggaaaaaaaccgatgacgtggcgccctaattttccagcactcccacgacgtttagagagattaatatgtgttaggctctgtttggatattttggcttattgataaattattttcttaacgttgcaaatgataatatcgttgtgttctaaaactctggaataattagtacatgaacgatagtcatataaaattatatgatatataatgatataatccttttttatttttaaattgtgttggcacacatcaaaacctcttagattttagcaatgacctccatgaaagctatcacactctggatgtgtttagttcacgctaaaattgaaagtttagttaaaattggaacgatgtgacagaaaagttgaaagtttatgtgtgtagaaaaattttgatgtgatgtaaaagttaaaagtttgaagaaaaagtttgaaactaaagacctctgtacgtagcatatctagcaagaaagagtatgttggtgctagcagtcaatgctagagctagcaaggcccaattatcgtttgaaacacacacgaataatcttgacccaatgaacacgctgcgttaatgatccacacggaacgatcgcaatcggggtttaaagggacgcaatgtatatagtacgtttgactagaaaaaatatgctactccctcagtttcataatataaggggagtttttgtttacattgtttgaccattcgttttattaaaaaaaattaaaattattatttatttttttgacttattttattatccaaagtattttaagcacaattttttgttttttatatttgcacaaatttttttgaataagacaagttatcaaacagtataaataaaaattcaaaattcctcgtattatgagatggagggagtactactcctgtacgttcacgagaggttaacacacatgctccctcgaatcgaagctagtaataacccagcagagaaagtgattgtgattgacggcgatgcttgatttctgctgaccttgtagctgatcgatcagcctctaaatttgaccggccgccggcgtgcacacggtgatgtgcctgtcgccggcggcgtctgatatgcgtttgttttcctgtgtctgtctgtggccgagtttagttttaattttttttaaacttttaacttttttatcatatcaaaacttttctatacacataaactttcaatttttctattatatcattttaatttcaaccaaacttctaattttagactgttgacacgcaaaaactgagctataccaacactgggcagttcaactgctcactaattcctctgcatttatttttttttttgggggggggggtgtggggggtaggacgagtacagggcaaattaaacagagtgcatggggtcataagtccataactttttcctagcagatgtcactacagttcacattggagtacagagctcttctatcataataaaagaaaatggagaaatacgaatgcatttacacattaatcgatagagtttttctccaagagatttgaaggcttgtccggatcgaagggtttacgtgaattttttctacgactcatgattcctttggattatctattgttcatgagtttggtttgtaggaatcacccaaaaggaattttcaaggaatattgtagcattctaataaaaacacaggagtttcaaagaattccaaacatccactctaaccactttttttttcattattagctgccacaggatggaatcatatattctaatcctctattttctattcttgcgtcttaatatccaatcctaaaaaaaatcctctgttttctaattctcatttctcacgtgcaaccctatcatgtttctacttttttttcttttctgttcctgtgttttttctaacatgtgttctgaatgagccctgagtggacaagtaattttctttgttttctcttcacaacttgtatgaaaggaaatttttctttaggtttcctgtaccttattcttacaaattgaatgacacttataagaattaatccttataaatccaaatcatttgcttttcccttagaccgaagaagctccaagttgtgagttgcagaggaggatagcttagaaagaaggtggcttgggttatttgccaactgagtgtactaaattatttctgttttgccattttaactagccaagtcagcaatatggatgagaaatgatctttctgttctcatcttgccctgttcttttctccaacaaaagttggataaacttttggatactcatagcacgctttttaaactactaaatagtgcgttttgtgcgaaaactttctatgtgaaagttgttctaaaatatacaattaatcgatttttcaagtttataataattaaaactcaattaatcacacgttattaccacctcgttttgcgtaaaatatttaatcttcatattcaggagattcaaacaccaccacgtttagtgcataattaattaagtattagttaaaataatttttaaagtaactttaatataattttttttataaaaaatgcaccgtttagcagtttaaaaagcgtgccgtggaaaatgtttaacactgttgttgacttttttaaatatttttgaccgttcgtcttatttaaaaacttttatgaaatgtgtaaaactatatgtatacataaaaatatatttaacaataaatcaaatgatacgaaaagaattaataattacttaaatttttgaataagacgaacggtcaaacaatttaaaaaaagtcaatgacgtcaaatattttgggatggagggagtatattggtaccggataggagacaactatatatacgctgtgagggacacatatatgcggtttacctccatctccggcggcgtctcgatcatcgaccaccggcgggatggatggaatcgacagagagatcgacccggtttttcaacggcgaatacggccgacgacgacttgttcccatccatccatcgggatacggcggacgcgttgaattccggggccgattgtttgaccctcaaactcgatcgcccccacacacaccacatgcacactctcgtcttaggtagtgtttgaatccagggacttactatcttcgtcctaaaataagtgtagccgtgaatatccgtgcccaacatttgaccgtccgtcttatttgaaaaatttatgaaaaatttaaaaatatttagtcacacatgaagtactattcatgttttatcatctaatagcaataaaaatactaatcataaaaaattttcaagtaagacgaacgatcaaacgttgaacgtgaatagtgtaaaactgcacttattttgagacggagggagtaactttagtatatgtatttagacactaatttagaatattaaatataaattgcttacaaaactaattacataaatgaaagctaatttgcgagataatttttttaagcctaattaatccataaatagagaatgtttactgtagtatcacataggctaatcataaattaattagactcaatagattcatctcacgaattagtctaagattatggatgggttttattaatagtttacgtttaatatttataattagtgtcaaatatccgatgcgatagggacttaaaaataaattttagtcctatctaaacaggatcttagttctttcagcttaattaattactggtttggactttctctgcgagcttgattaattagtgtgtccgtggacatcgatcatatgtgagttaaaattaacttggtcgtcgtactttggatcaaagatgatcggggataattacggtccaatcaacgcgtgtttctttcgtttatttaacgttgggttacgtaccatggaggagatcacgtcagtaaattgatatactacttatcatgcatggtctggatgtggttaattattcaaaccacttttaacttatcctcttgatgaaactctaggtagctagcactagctacgatgcttaattaatcccatcctctctcactagcttggcgaacatttgagataaaggagggtgagatgtggacacatgcacgcaacaaaatacttacggcatccgtctcaaaataaatacaattatacatttaaattttagagtaaattacatcgtcggtacacaaacttatcaggtgggtgcaatctagtgcacaaacttataaaatactcgttttggtgcacaaacttgtgtggtgcgtgcaggggaagtcaaaaagacactatatgactaatcctattgatttaggggctgattaggatgctatgtaaacacacacacacacacacacatatatatatatatatatatatatatatatatatatatatgagaaggttaccactagacatacacatattcaataaaatatagaatataatttagtgatagtagaaaaacattaaaaatatcaagcactgatataagggttagaaacatataaaattcatcatctcaatgatgaaggataaagtagagactaaatttataaatattgcatgtcttatgcatactcgctacaggtatacacgtcgcatcctaatcaacatcaacttcataaaattgacattgccaagttattttgatcctcgttcgcacgaactagacaagttcatgtactgaaacaagcattttttacaagtttatatactaaattacacccacctaacaagcttgtatactatcaatgcaattttatctcatcaataacatctgagtcctcatattactctcaatcaaccttataacttcctaccatcctcatttaatatgggacacctaagctgtaactatttttctctcccactcctaaaattgcacttatattgcaattttttttactaacagttttttttaaaaagttaataagcttagtactagctagcttacacagagttaagctttactatatcatgaactacatatctatataccatatatatgcccctacaaagagaccatagaaaagtaaacaaaatcgatcaaaaaccgatggccggccggcaagcacgtcagggtatattaggaccatgcatgcttcgtacgtacgtatagtacatgcctacatggtagtaatatatatgcacgatccactggtggagaaaccatttatacttccagttggtaacttcttttagtcccggtttttcaacccggactacgaatccgggactaaagaccggttgaaataaccgggactaaagatctatctttagtcccggttggtgccgggactaaaggtctcttttttttcattattttttagctagagtttaatccctatattttctcccaaatcaagtgggatacatatccccaaatcaaacctcaaatcaaaataacatcccaaaacattcacatcacaaatcttaagttacttatacacacaaatcaaatacatcacaaatcttaaaaaaattacacacaaaccaaatacatcacagattatacatctcagatcatgcaacaaatcacaaaattatacatcttagtgaatcacaaattgtaaaaaaaaaaagatgccggcagcggctgccgcctgccgctgctcgccactgggcccgtgcgcggcccagccagccgcctgctgcgtgggaagggaggagggggaggaggaggaggagggagatcgatctgagagggaagaggggaggaggagagggagatcgatctgagcggatgggaagggaggacggggggaggagagggctggggatgggaggaggcggagggggaggaggagagggagatcgatctgagaagataagtgcgaggcggttgtggaggagaggatagggaagaaggattatatattaagcgttgaattttagtcccggttggtgttatcaaccgggactaaagatctagaagttgataacaccaaccgggagtaaagttaggatcttaaccaatcgggactaaagatcccggaggacctgacaaggcctgacagatttagaaccaaccgggactcaagatcaaatatgcccactgtagccaccaacctcatctttagtcccggtttttagtggaaccgggactattgtggatttcggccaactgaccaaagatggtttctccaccagtgatccatcgatatatacaaattttcggctaccgatcgagacggaacaaattaagagtataaatcccataacagctatttgaattacttctttcattttaaaatatagcaacggcccagtgacagagaaaaaaatatgaatttctctaatttccacctgattgtattgatctctaaatcctactatatattgttcttaattacaatctagggagagagtatagtgttttgagagaaggggccttaattatatccagtttggctagctggttacattggctcatggaatcttgtgtgtatggcatatatttttcatgtttggcagtgatcattcacactccaatataggttcacctggacgccacaagattttgtactactctatcactattacatactatagaaaggtccctatagattgcagatggaccaaactaatcatgcctgaaaaaaatcgaccttgatttttgtacgcaactctttgagaggcctgcatgcaaaaatctattttcacatgagaacctcttaaaaagcaacagtatgcaaaaataaatatattttctaatatagatctcttaaaagtctgtctagaattctgacttacctcatcttttttccaactcatcatccttatctcctctcctcctctctcacctcctctcatattaattcttcctctcctccactcctctctctctctctctcaatggtcggcggcgggtggctacagcgaactcgagtagtagcggctagtggcggcgcccggccaccctgggagacagcggtagtggcgaggctgtcccctacccggatccacgcggatccatcagcggcggtgagaggagcccaacggtggactggatttttatttttacgtgcggacgacatatgcatttgcacgcgtatgcaagtacgtcacccgtatggaaagatagatatttttgcagatattttcggacagacagacggctcaaccgcacaaaaaatagtttttagccgtttggaaaaatgcttttttaagtagtgtgtacttcaatatatattttaatatggtaggatatctagtccaataataatatattacaagaaaaattatagtcaaattttaattcaaaagaacatgacaaagtcaaacactgtatacataaaaataggcaaggaaatatatatttcccacccaataaaaaccaaacaatccaatccataacaaccgctgcgtttttagacttaagcacgctccctgaaatgctagcctgctaattcttgtaaggaagaaaaaaggcacgcagatgttgaagctaagctatagctatagcctgttaatcataattaaacttgagttgctatcctccgaaaaaaaatattagagttgctgaatgcctctagcatagttaagaatatatagtggcctaaattaatggttggagtgtccaacttgaactgtttgatacctgagccgaaaaactatagctctttccatattaggcacatgcttagttaaagccttcgagttgtgtgcattacgtcacatgcaaacaatgcaggccaattaattgcacgtgaaaattcgaccgaatgaatcgtgcaacgttgaaatcctattctcaagcatacacaaaagaacttcaatctctacgaaccgacgatactttagttgataaggtttcttggcagaatttgttcattggcagctcaagttctagagtgagtacaagtactcatatttatgattatttatttttttttagtaatgagcgatgtactaatcagctacaagacacaagtaattttatcaattttaagttatatcaattatttgtataagtacatgtaagcccctactcatgagccaaatgatgatcagtggtttgcaggtcacctcgggctcggttcgtttcacaaacgagctacgaaagaggcttgagcttagctcatttggctttcaagctgagctgagccgagttggtcaaacgggcctaagctttttatccacctatgttcgtgtgtaacttttagtactagtatatttatgttaccgctattcattccaccacagatctaatggttgaaaatggttacaccacatgtcaagtcacaagtagggagataaaacattttgggtagtaaaataggatcccatctcgctcatgacgattagtccttttacttagtcatatagcccattgccccacatgtccttggttttgctctcgcggggatgagaagacattgaattaggttaggcggtgaagaaaatctatggaaggagactcctaccaagaaatctccttgctggtagtctcaagaggtgaacacggagcttaaaaaaaacattgctaaaggcattataagagagatgatggttcttagagttgaagaatcaaggaaagaaacgagatataggaaaaggctaaccaatggagaaagatgatatagagttagcgatagagaaggctatgaaagggaggcaccgatacaccagccactagaaacgaacaaggaaagggaagagtattggagaaggtgttatcacaaaagtagaattgagatccctctaccttctgtctttaaacgcactgtgttttaatcactgacatatgggtcagtgatttattaggcttacacgtcagtgacaaaattaaagtcgcgtgacttcaaaactagaggagcttgatcctcatagagtgataccttggaaatacccagagctacctcctccaaaagcaaaaccccaaaaacatttttttaaaaaaacacgtatacagccaaaatacgttacacggtggcctagccagtatataagttgaattgaagccttgaaggtatataggcaactggttagacttttttttccctttgcccataataaagccatctctcataaagccatcgacctcatctcctcctcctcctctctctgtctctctctggctgttcttatcagtttacgttgtcctcatcgtcgccggcgccgccctccaaagcttcatagatagctcgatcgatcgatcccgtcgtcgtcgatcgtcgtcgacgcagcagcctcgccggcggccggagactggggagatcgatcgagagggagggaggttgagtaaggtggatccacgggtcaggcatggcaagaggcccctaccggccggcgaggaggaggaagaagaccagccaccgccttcgacaccaccagcaaagcaggagcagcaggacgaggaggagctcgccgcggtcgtcatcagcggcggcggagcaggagcagctccggcgccggagacgtacgcgcagtactactacgcggcgcgcgccgaccacgacgcctccgccatggtcaccgcgctagcccacgtcatccgcgccgcccccgacctgcacctcccccaccacccatcctcctccgcctccgccgccgcccacccgcagcaggcttcttccttctacccgaccgccgccgccgccgcctcctcgccgtccgaccagctcgccgccgccgccgctgccgaagagcaaggtaccagctgatccattcaccgcacaagtaaattcctctctctcaccgcgccgcgtgccacgccccgattgcgaaagcatggcacgcgcgagcgcgccataatttggaagcttcgcatccgccaacgccaacgcccacgccgccgtcttcctcgtcctacgttaatccccatggctctagctagctaattaccgggttaagtagcttcgaagcttgcaatgcatgcttaattagcggtaattgatccataattaattaattagttgaaccaaacgagggttaataagttaattaactcccaaatcgttgcctatttcgtgccggaagatacgctaaattaatagcgccatgtgagtattttatgcacacaccgtattacgttatccctgacgatcgaagggggagtccgaattagtcacggattaattagcaagttgcagtattattattattattatgggattaattagtgggaattaattagcttagtgtgttttggtgggtgcagggaggaggcggcactacagaggtgttcgacagcggccatgggggaagtgggcggcggagataagggacccgaagaaggcggcgagggtgtggctggggacgttcgacacggcggaggacgccgccatcgcctacgacgaggcggcgctccggttcaaggggaccaaggccaagctcaacttccccgagcgcgtccagggccgcaccgacctcggcttcctcgtcacccgtggcatcccccccgccgccacccacggtggcggctactacccctcgtcgtcgccggcggcgggggcatgccccccgccgcggcagcagcagacggtcgtgccgtacccggacctcatgcggtacgcgcagctgctgcagggcggcgtcggcggcagttacatgccgttcggcggcgccgcgacgatgtcgtcgtcgacggtgtcgtcctcgtcggcgccgcagatactcgacttctcgacgcagcagctcatccgggccggcccgccgtcaccaatgccatcgtcgggctccggctcggcgaccgcggcggcgtcgtccacgacgtcggcgtcgtcgcccggtgcatggccgtacggcggctcggagcgcaagaagaaggattcgtcgtcgtgacgtcactggatggatcgatcgatgcatgaatatgccatgcatttgagaggaagaggtcaagtttttttttaagcaatggaaatggattacatcttcggcctcggcacgtggacagaaagagatcaagtgatatggatcgagaagaatgtttagctgatctgctctttactctgcacgatcgaggagatgaaaatgcatgcaatatgcatggaggggtaagtgttaagtggttaattggtgatttttgcgggttaattaattacatggacattaatttttcttttgatcaccttttgtttattttttctctgaaaactatcttcttttgttcatttttattttcttggaggtacttaattaattagctaggttaattagctggtgatttttagtttgttgtttccctccttttgttcaagtgtgaactaattgtgcaaaattagtccaagtaaagcaaagagagaggattcttatttaattattggttaaacattacccttttttaagatgaaacatgatgtctttttttaaaaaaaaaatctgaatgattaccacctctttgtctacatctttggattgtagtggaagcttcttcttcactggtgatctctttggcagacattggaaatgtccaaaggataccataaatggatttcagtatacctttaggaataacattttgttgtttggtagcatgcatgatgggtatcaatcaaatttaacaacctttggaaaaaaataagggggaatcttctccatcagcttctcttattaaaagatttgacttttttgtttagatacttttatcatggttgcaatattggcatctgttctatcgatttatcatctacttaatcctccaatctcattctccgctgtaatgatatttaagcatgtgtcatagtggtatggatgcctttaatgcatgtagcatatttcaaactcagaacaagatgtacttttagaaaaattaaagttggaaccgtaacaagaatctagagaaaaccagaaaaacgctgcagtttggtgaggacattttacttttgcaatgatgctttgaggtgatgaagattatccacatacctaataattattcagttgtaagaaattaaaatagcatgaagtcatccatttctttttttttcaaacgcttttgtacataagcaacatacatattccatccccaaagcactatagccacatatatatatatctacatatgtcttatatcataaaaatgcttatagctagcttcaggtttttaatgacatgaacatgcatatgccacgtagatcttgagttaattatagtcagaggtgtggcgtaatgatctcaaagtttctagtgtaaatcataaaatatgtagatttgtgatttggtgccatgtgtcgagatttattcgatcaacttgccggcatgtgatgatacgaaataaggagagaacctctatcatgcaagtatcatccccatcccgtgcatctagaagctaatatatatgggcgatgcatgcaccaattcaatgccaaatcaaatgcattcaactgcatttttttgtatttacgcatttttatataccagtacatctgtccacccatctatccagctacatatatgagtgacaaaaattacaaccacactagcatttgtagatacatgtgtgtctttttctctatagctagcttgtgatgagaaccaaagagacagatccatgtacaagtgtcttgatgtaacagagatcatcattatacatgatttgtttccattaggtacgtatctctttcttaattttctctactattggttgcatgaaacttattatatatataactattccaattaactaggtttatttaatttatacctgtcttttagtttgttcacactgggtgtgattgatggtgctgtggtgtgtttgccctttttctctcctttactttcatgatgggaacaagtatcaaaatttgacacgcacattttttttttctttttgccaaatgctactgctacctggcagctagcggccgatcgaactcgagcagaaagtgccagcagcaagcaagctagctttcgtgttaggcatgactcatgcctgttttgattttcaacacatatcatttatcgaaacagagaaaaaaaaattaaagaaaacgagtaccatgcatgcctaattatctctagtactagctttttaggcgcactattgtatattgtgtactatgaaagtatcgtgttgttgagatggatggtcttacacgtgtgcgccatgcttgattacttgtgtgtgattggcacctaacttgtgtgtgatcgatcgtgtcatcgtcctttgatagagaggataagacgcttctctcatcatcatctcagctggtctagctctctgcctaactagccaagagtacctaacttaattggagaatgttctctcttaattgtattggcatgtttcaaagtcacttgagaattaggttagagtgattttcaagtgaaatttagaaacatatcgaagtatatatgtatgcaacattagttaatataagaagtttcaagtgtaatttaattggatacaatttagtgctcccttcactttaaatttatgatgctcttaattttttaaccatacattttatcatttatcatttattttgatataaagcataaccatatttttatatttatatacaacttttcttttaaaataaaacgaatggcgaaatatatgtaaaaagtaacaatgttatatatttaaaagtaggggtaatatatgtacataacgttccgggtcagaataatatgaagtttttgggtgctctaggcacaaattttgacaatttgaccctttg

SEQ ID NO: 28368 - DNA, 13879 bp, Oryza sativa
aggcctctcgtttcatacaagctaaatgagattgcaattcaatatatgggtttgcagccatgcacaactcagtaactgatctttaacggataactcatttattctagtatttttagagtttgctattttactactcacattcttataattacatattagaggcaaacgatcgcgagtacactcacgtacacatttacccatggatatatatatgtcctatataaattatacacacacacacacacacaaaatcttcaccaccaaatccactcacctgatatgtaccacatcatatggatttaaattatttaattataagataaatttaaatatccatgctaagcctgtgactgtgtgactcaactacaatgaacggattttaccacaaacaactcaaaaggacgaagctattatcctcgattaactttggtgctaactgctaattaacgttagttctgatcaagcacgtacgccaaatattaattggcagaaatatatgcatgtgtttgatttaatagacacggtatatatacaactgtcacttttttcgtcctgtcattttctttcgaggaaccacatattttgacctctaccgatcttttttcccttggcatgcatgtgtcgatctcgcttcgcttttttgacagaatatgcatatatgcatagaattttaataggagagatatctcgtctcgctttgccactacacctttttctttttttcattattgtccgatccgtgtgcctcttaatttctgatcttttttttcctcgaaatgcagtacatacacagatactagtataaacgtgtgcatccttatttatatgaacacacatacatcctacctctgtacgaacgtagatatctactcgcatgaaaaataattacaagggctactatgtgtatcgcgtaaaattatatatctagtattgaagaaattaatattatacttctagagttctactatacttccttcgttcaaaaaaaaaaaaaaaaggtcaaactagaaagggacgtgaaaaaccattgagacggagggagtatgcatgtacggggaaaaaagatatacacgtacttatggagtttgtaatcggtgaccggtaattagatcaagatttctttcatttctttaattaatttccaggaacacacatgcaggctgcgtagacgtacactacttttccttgagagtatagatacgttagcttctccagtagtggaatatatttgtactaacgtataacactactatacgtaaccattagtgctagtaatacgtagtactcccttccctccgtttttagatatttaacatcattgatcttttaacacatgttttaaatacttttgtaaaatatgtaaaactacatgtatacatataagtatatttaataataaatcaaatgataaaaaaagaattaataattacttaaaatttttaaataaaataaacggttaaatatttaaaaaaattaacggcataaaatatttagaaacgagggagtattaattatacttgtatgtatacgcaggaattgtatacagtgtggacgcatgcagccgactactactacatacgtatccgagcgagtgacagacggacacctagcttcgaggtgggccaagctatatgcacgggcccaccggccaagcaggcctgcggatacgtggggcccgtttatcctcacaggtgggcccggagtgacaggcacgtgaagccgtgtgccgccccacgtgcgcgtgcggccggaaacgcgtacacgacatgacgcgtgttgcagtgcagtgcgcgccacagcggatttcttcgatttttcttcctctcttttctatttttattgaaaggccgatgggtttaaaacatggccccattcatcctataatataaaggattattctcttttagaaaagattaaggataaaaagaaaagactacaatacccctattgaatgtgattttgattgtagtgagtgggtagttgaaggttaaaataggtataaatttgaattagaattgatggatgtgacaagaagtatagcaaaatctcttatattataggactagtagtaaagataaaatcccttatattataggatgaaggaagtagttgaactttgcatgccgatgtttgacgatgtgcatgatggacagtgcacagtacttcagtggagaactcatgtaagttatttattttactttttcaactttatctttctctttttaccttcctaaactgctaaatgtgttttttaaaaagattcctatagaaaaggtttttcaaaaattatattaacccattttcttatttttattgagctaatacttcattaatcatgtattaatgcatacattgttttccgtgccagaaaagaggagttcccaaccccttctcccaaatacaaccttattgtactgaataacattctgttaaaggtattattagctcacattattagcgtgatatacagtagtgtatcgggttgtattgtaaagatattagtattattgtggacatatatttcgatggtttaaaggaggttggttacgaaagagttttgtgttttagcccttgcttttttttaatcttgtccttaaattttaatattcatttttacagaccaaatatgcaattcaaatcctatatccataaagcaattcataaacatgtttctggctggtccatcgaacaaaatatgcatttatttttttcccctattcttcactctttcttctccttttctacccataaaatctctgatcccttttcctagctaagtcgcgggctgcatacgagtatggcaacaaactatttgttacttgtaacgaccaggcacatctccctttcttacacaccaacgacatcctactctctcctgaacagccaacatgggacgacctcaacatgcacatgttgcctctccatcacgaatcattgccaccttagtcaagctcgctagatttggcaaaattgtcgctctagtcatcgaccttttacccatgtggtcttgatcgatgtcattgttctcctatctagtggttgtggcggtggtcatggaactctattggtcattgatagtagtgtctcgccaaccgttctattttttcttgtgcggacgaatagttgcatacaacctcttcttcgcctttcactatcttgactggttgatttttttttcttccaacttaattaataattggacctagaagtcacaacgacacagctgatccacactttcttccctcaggttgtctaaacctatgtgataggcaatgacacttgtggccccatcgtttgtctttttccctaataagccaaaacggcttattagggaataaaaataaatttgtaggtaaaacttttatatatatgtttttggtgacttaaaagccaatgtaaaaaaaactatgttgaaaatatttcaaaatttagcttgtaaaacttttaaaattaagtttgtaaatttaaaatttagctttttctttggttgattaggccatccgatgggagcctccacttgttttgaaaatgctttctaaggcaccgtttggcattactatggttctggtaatcttgtttgccaggtgcatcaatttttatacatttcagcatgtatcatttatatataatcactgttggaaacgtggatattattatggcctggttaacataattaataaaataaactgcggagataataaatttaaattttcacgtacaacgacttatacaaaaacagataagcacgcacatcatgtttatcaaccataatctgaatctaaatcctatccatgagctccgatcctgtgcactagctagctagccggagtaacgtatatagacttcaattccctggttatttctgatatcaataataatcatacgcgcaaccgaaggtatatgtgtgtgtgtgtgtgtatatatatatatatatatatatatatgtatatatatatatatgtatatatatatatatatgtatatatatatatatgtatatatgtatatatatgtatatatatatatgtatatatgtatatatatatagtaaatttgtttggtgctccatggtgcccgggcaccattgttgaaattgagtatatacccaattcaaatgagcatgaaactttttcaattatttaggtattaatattaactactttactaactagttgaaagcaagtttgaactgaatttgaacttgtttttgttagattttgattctaggtatatagcatccatacatataattagttaggtatgtaatcatggattgtgaaataaagttaaatttgagttgttttgttgataggtataggtatgaatcgaattcttataactaggtatatactcacaatttgaaaattttgaaaaatttgagtgattttgtgcatttgaaaccatggtgcccgggcaccatggtgccccatatgagtgtcatatatatatatatatatatatatatatatatatatgcgcaaaatttggactgtaggctttcaattttatttcaccattttgtttgatccggtggcaaagcaaattaagcatgaccacgtggatccaacgtccgcctatagctagctctttgctttttctttacgaaccaaaatttgtacgttcgaaatgaaaggttcaccccggagcccggacggccggccggccggccggatgcagcatatggattcctggagaaaatgacctttgtggctttgccattcagaatgacacaaactagcctagctagctataaaaaaaaaacgaggtgattctttacacggaacttaggtcagatctgtgcagttatcgtagggcatgtttagattctctggcaaaatttttcaccctgtcatatcgaatatttggacacatgtctcctagcaaaatttttcaccctgtcatatcgcgtatgattttcaccctgtagtattaaacatgcatggagtgtaaattgcgagaaaaatcttttaagcatgatttcttcatgatttgacaatgtgatactatagtaaacatttgctaataatggattaattaggcttaataaattcgtctcgcggtttataggcgaaatctgtaatttgatttgttattagtctatgtttaatactttaaatgtgtgttcgtatatccgatatgacacgctaaaattttacacccctaaatctaaacacagctgtagttagggcatgctttgctgatttccggaccaattttaacatttgaggatgtttggttcatggttgaagttaattgttatattttgtcacacatgtagtaagataagtttaaccatattagatatgtttttaattagttataataggtggcaagatttttattttctttttaagtgtaggtcatggctggtttgaagtgtgctatgattttgattatatcagctttgatacacttgacaaagaaagtatggttaatataatgatataatttgggcaagctttggttcatgaaccacatgtgtttttttttctagacggctaggaatagaagtgcaaaattcttaccttaccattattcttcatcgcttcggttataagtgtatcttcgagttattacatccggtcataacgaggcttctttgctttttaaaccacaacttaggttgtgtttagttcatgttaaaattgaaagtttggttaaaattgaaacgatgtgacggaaaagttggaaatttgtgtgtgtagaaaagtttcgatgtgatgaaaaagttgaaagtttaaagaaaaactttgaaactaaacacggccttatcacagtttaccacgtctaagatagcggtctatcagtcaaatgccggcggccgcgcggtcgcctctagctgtgtagctcccttcaaagatttcggctcgtcgccggccggcggccgggggcatcatcctgtcctcatgcatctaggtagcattttcgcctttgattgattctatatattttgccaacccgttcgtttctgatgaataatttagtacatgaaacctagctataatagctacgtgtaattggattctggttcaaagcttccggctgggtgtgtgtgtggcaaaccattagtttgcgtgaaaaatggtccttgtcaacgtttgcggctgcccccatcgcccaacgattcatactcgaagagtacttcgttttgacatttgacatgacgacatttgaaacataattaaccacaatctttaattggtagtacagtactactcgttccatcctaaaatataagagattttaaaaggatgagacacatttcctagtaaaacgaatctggataaaaagtatgtctagatttatagtgttagaaaactgtttcgtccatctaaaattttttatattttgagttggaaggagtattaattagttctcctacatcgttcgatcataacgtacgtgtgcctttggtttatatgtgtgtgcgttttaattgctccataagctgaaaaaacaagaaaattccccaagtagacccggcccatatatatatataatgtcgttaaatgtaacagacacttcgttcagggtttataccaaacatctagtagaataatctcttctggcattctcgatctcctctagcacgaattttgtaaccttttctagctactccctccatttcacaatgtaagttattttagcatttatcacatttatattgatattaatgaatctagacatatatatctatctagatttattaacaataatatcaatgtgggaaatactaaaataacttacattgtgaaacggaggaaataattgctaattttagcttctcggcaatggctgaaccagattgttcgacgaaccactaagcagatactttcttcaattgacaaggatatgtcatgtgtgctttattcctccttgcctgcgtctgtctttgtctcaccaagagggacgatgtatctaactatggattttatgccagaatttccacgaatttttgcgtagagtatattttaacatagtagaattatatttgctaaatatatataatcctctcgctttctgtttctatcaaaatagccattttttgatatgactatatcagttgatagggagcgtatcctatgcacacaggccctcgcgtgtacacaccgtgtataccaactaaaaattatcataaaaaaattctaggaaaattcatacatatactttcaatagtattacatctacgtgcaaagtcgcatcttcaaattcattctacatagagaataacaaaaaagataaaattctgacaaaattgcaaccttaaaactgttaaattttttatttttttgttacggctaaaatataatgaatttgacgttaagattttaaccttaggtgtaatacaattgaaagtatgtgtatgattttttctagattttttggtgacattttttagttggtgtgcacgtgtgtacacgtgagggcctgtgtgcataggatatgttgcccagttgatatacaccattattaattattggatacatcatcatgattggcaacaaatatctcggactttttcttcgattaacgttgtataagttttaggctttagaacaatcaaagaagaagttcatgtacccgtaaacttttaaagaaagtctacctagcatcttaaaactttaaaaaacggatatctaacgacccctaaactttatcatttatataatttatctctgaagtggttttacatggtgaaaaaaagtttgatttatctccatctcaattaatcctgcaacctccaagttaacctccttgcttctttcattaatttaactagtcatcaacccgtgcgttggacgggctactaatactcatactatagatgtgaaaattttaacatttcgttaaacatgttatagttatgtttgaaaattgaaattatagccgcttgtattaaaagaagaatcatccacgtcagacaataattttgaattttagaactaaattgataaaacactaaattaagagtccaagatggtaccagtcttatatttattaattatgagcttcctaactattaaaattagagtccatgctattttcaattatgtgtgatttatttaacaccgaatctcaacacgatgtagggtaccctggtaatatgatttcattaaaccaactggcggaactttctaattaacatggaagctcctaaaaagtacccaattaattaatataggtataaataatatattgctatgtagataaaacatttggcctcgtatttgggaggccctcatcatatctaaggatatattggacgtacggcaggatttcattcctttcaatcaaaactatagtgggtaagccgaatggacattggaagaaaacctttttatgaacttgttgcacctcaaatagctggggaaaaaaatacaagacgagaaatatggctactttttcactttaccaccaccatctggtgcatccaacggtagtgcaagatgagagagacagagagagaatgagatatgtaggaacatttcgaggttcctctttgtagaactaactccacatcagccttttcaaaagatcgttcctttagttagcacagggttccttttaggattattcttgttccattcagttccaatgctgtgtgtgttgcatttctaaagctgctccatttgtttttatatacttgtgttctgtttgtttctttctttctcaaaagttataattgacatggaagggaaagcttcagtttcgttgaaattgggtgagctagtagctagtgcatcgtagtttgcaaacatgaatgagtacatattgggaatgtgtcctggtaacatttgtgctttgtttacaaattttgttgcatggtgttgaggctagtgtggatcatgcaaactagttatatactcatgttccaaattataacaatttttaagttttggacatgtgcattaaaggagagtgataaaaaggctatactataccattaatatgtcctgacattggtaaagaaaatgaagcaggggtggttaacattgcaggtgtattttgggtaccaaacaataaaattaaaggtgcacttttgaagctagaagttattatacatttggataaattttgaattctagaaattgttatatattgagacgaatgaaatagttagaatagttttcttaaagacaattattcaatttgatcttagctttactgcgagccaaaaacagctgctcaccacaatgataaaattgttaataataaacaactaccatatatctactctattcaaactctcttcgtgtgttccaactaaatccacttctataattcagcctgtcaccctcatggcggtcgagcatgataagatgcgcaacagtgatatattcttagactctcttactctaatatcaaatgcaatagttattcccgtcggtttcaaaccgtcaagaaaaatccattttctgatagtgagttatgatcgcgtttgcgtagatttaaacctgagtgggtggagacatgcataggaatcactccacatccataccaaaggtgcttctcctcctcctgctacactgcactttacccatattagcaacatgacaaggattcaaaacatattctcaataagctaaaaaaacacaaagaaccaaaggaagctagctactgatcagccaattagaatatgtctctaccttcttttgcatgagctttttttaggtaggcgccgattgggtaccaaaggcagcttaacactatagcttacacatgcatgcatgagaattgagaaactatctatctagagcacttgtcgtattagttgacatcacacatgcatctactatatatatatatctatctatctatctatctatgcatgcatgcaccttaattaaaaaacacactttgcataagcatgttaatggaatcttcttttgcttatattgcctttgcgccgcattggctcgtgtgatgagtgaatctattctctaatctgcctaagtacgtgtacgtgtccctctcggtgctcttgtgtatgcatgccaccatcattgcggctgtttgttttccatgaactgattaaaaaaataggttagcgccgatcgtccaatatttatattctttccttgtcgagtaatgttaattgattttttttaatatataacgccgttgattttttaaagaaatgttgaccattcgtcctatttattcttttaaatatgaaaaaagttgtacttaatataaagaaagataaatcaagtcacaataaagtaaatgttaattatatatatatatttaataagaaaaatgaccaaccgtttcttaaaaagtctaatggcgtcttatattgaaaaacgtagggagtatatatatatgcatagacgtagcaaaagatctacctagctttcatggaataatcaaaccacataggagataggagtagatagattggtgatagcaatggctgagggtagtggtgtgtgaagtgggacacagttatatggcaattttgagttcagtcctaaaatattaattgtccatcacatctgcatattgcttgacctagtctaaagtacaattggcaacaaattgtatatgaaaatcttatctacacatggtgtcgccaataaattggtagtcacattttagctaaattttggtaaaagaatggattcatggaatatgtgcatgctcgagggatgaaataattggtacgtgacactaacaactgcggtagtgaatcgccgcaaaacaactatcccttcttttaaaaaatataaacatagctatgtgttttataaaaaaaaataaggtttggataagaaatgataatataagactttcaaataagaaaataggtgaagaagaagttaagttactatgttataaaacaaattttaaacgccagatagtggaacggatggagtatatatctcacaaaggtaatgtgtggtaacgaacttaaaaaaccactcggaccccccaatttttttttcaggagaatgaaaaaactaaaggtaaaatttatgtaaaaaaatgaaagtaattttatttttcttattgcatatagctagaagataaatatgcacaatacaccaagtcacacatacataagtttatacatgcatatttagacagtatacccatacgcatggtgataatataagaatcgttgcctaactttgcccaagttgagagccatcggataccggcccgattgacaactcgacgtacgtcctcgaccttaatatctctctctgtgtgtgttaggtataaggatatgattacattttatacaaatattgcgtttgttaccgtgggttaggaactcattccctctgcatgaaaaaagaacggtttattagcacgtgattaattaaaaaaggatcaatatgattttttaaacaagtttcgtatagaaactttttataaaaaaaaacacaccgtttagcagtttgaaaagcgtgcgcacgtaacacaagggagaggtggaacactaaccaaagaacacagcctaatctacttatgtacttccccagtagcccacttctgtagtgttcaagcaatgtgtgctaatgggcttttatttggctacgtttatctttaatgggccaccttttctgtggaccttcctgagcaacatacatgtctacttggctgcactggagtgtgtgcaaatgtggctttaatttggtgagaaggccaaggtattttgggtgaattaaagttttgtttacaagataaaacctcccacgttgctgcgaaaaaatattgattgtagccgacgttagaaatgaattcaatatggatttgttttatagttagatgtcgtgatcttatatgctttgtataatttgtacttttatcactcatccaagaaagaatataaacaatttaaagatagattgatcattcaaaggataaaactaagatgatgtagctttacgagcgaagagaaaggaagacaatagatcatagagattaatcattcaaggattacaaataaataattaaggtggtatatatgggtagaagaaagaaagcacatgcattattgcgggaattgagacataaaaagtttgaatttgtaaagttcatcagatcccttatttatctatgatgatcactaacacgtggatcctagtcccacaagtcattgatatttgagaggatgagagacaaaaatatggtcaattttcatgggcaacacaaggattgtagaaaaaaaaactctacaaggacttttaaattaaaagggattgccataaatttagagtaggcctataagagttaatatgacatcatcttcaatcacgtggaagcaactatagctcagtatgttagaaaatggtggaaaaaacttcatctggaaacaaaatatcaatttaaacgaccatgccaggatgaagccgaggcataatttgaggattggagatgtcggtcacgagaccaatgtatagtgagaactcaattcaatggtggcttgttttgttaaacagttgtgtggatgtgtggtcggtatcatgtcaggtagtcaactgcaagagcaaacaaggagaaccccccagttgtcccttgttcacaaatcacactaatatatgtataaatttgattttttttttgggtcgcccctcgcatatttattagaattataagattatttgatgttcacactaacgtatacacaaatttgactgttaatatagtttgaagtatttcaaaacattttattgtttatatatgtttacatgagcactaatacaatataatatagaaataaccatttaaaaggtgacttaataaatactagtaatatgcccgtactaacgctacagttatattttgtaatgaaaatcaagatatactcaggcaatatcaaaaagaattattatactgttgctaattagatactaacgagaaaactcaaattgcaacttttttgcatgtttgaaaacaatctaattccttatgcgcttaggaatacaaactaaacatattgcgtagaagtaatacaaaccaaacttcatattacaagcaaaagcatttttattattttataaactatattgatcacaggagacaaatttgagctggatagaaagttacaattatgcagagtttatcttctaaagactcacaagtcattgtctaactcatctgatcataaagaacaagaaccctatctggaccagccttcatgtcttcacaaagcatgttagagagtgtaagagcaattttccccactatgcatcatgaaaattgaaatttgtcctttatagtttagacttgttaatctgtttgaccatatgaattagtttacagaacatgctgtaaatttaaactgcagatgtataggctatacagatattccaacaaatcccatatatcctgaattttttcaagtgcaatcctataaaccaaatactcagagagttgttagtctatcaaaaatgtgctactctgtttatctaaaaattccgtgtcaaacatcagcaccaccagatcaccatcgcccatgaaaaacacaacgttcatcatcagtctctcagctacactcccggtctcgaggacccacaccaacacgtacggatatccaaatacgaatctagctcatacaagtaccacccagatttagtaccaagaagctcaaacagttctcttgcatccacaattgattgccaagaagctaaacgcatactgaaatacaggtcaaataagacaatgagatagtcagaccttcttcccatggtcattagttttccaccttccactttatctccaccaatgctattggcaaggggaaatcctaaaaagagcataacattattaaatttaacattccaaggggaaaagggcaagatattttacaagcatgactgtttgcgaacacctaaacagtatgtgaatagataatggttaattactg

SEQ ID NO: 28369 - DNA, 7763 bp, Oryza sativa
atagatgaactccatgaaattgatactgtgctacagattcctaagaaaccaacaaatcaatccatctcaccaaaaaaatagccagattttcaatcgatcaatcaatttatcattcatgcatattgtgacccagggtccatcgttttcgatccaacccattcagttggaccacacctacactatcctcgcttcacacaaaaaaaaaaaccagagtcaatctcgggcattgtatccttatatgctggtgctcctcaagctagctaggcgaggtgggactaaacttgcaactgctgctgctgttcggcactgctcagtcgccatgggctaggcccaaggacagctgagctgctgctgcatgcacggtagctagcttgcctagttggctcaaggaacaaagtggcccatcttctgttatgtcatctcttttttaaaaatttttctaattaatccagcgcatcacatgtaccttgccagaatgataaccaaggaatggatgaatggtttaaacaagtagtcaagataaaaactaagtattttcttcgcttcatcactcgacaatatttaattcaaagctgaaaaaataaatagaaaagagagttaattcgatctctttcaaagctgacaataaggttttaggttgcttggagctcgacctccttggcggcaactccgtcccgcctagagcgcgcctcttaattagcaaatggattcaaaagagatagcaggttttatgcacatgggattaatgttaaaaaaaacaaaatgctaacatccatattatttgatccacttggtttgggaatattgtttatgaagatgtcctggactgatggattaatgtaaaaaaactaaaatgctaacagattactatgtggccgttctcctatattttcctttgtcacatgtatcagctatttgaaatatattgatttggaaaaaaatgactttcttaaggatttggatgtattcatggtcaattcatgtaacctatattttcctgtcactattgaaaatgctaacaattttaaatgtctattcacccttaattaaacatatgctatgtaaacaaacctgagtgaaatataaaatatatttcttcaaattgaaggaggatgcgtacctttgagcttgacttttgggggatattgtctgagaagaaggcatatcacgggctgtcagtgagcaacaagagacttgaatcaggaaattcagtccacagaaatcaatgcaacaaactctaattactttgtcaactacagtacaacagtaactacctcatcctgatgaacagatgaaggcatgagcagagaagagaatatgaatttattcagatattaaacatctgattttttttcataagttcactaattaactgaaaaagtgttcctttaggcaatacatcgataagtgcttgcacattactaatgcacgatatgtacatattcaggtgtcatgaataaaaatgtaaaccacatttgacattttaaaggaaaaaataacactgcacaaatctaacattttaaggaagttatcactgcacaaatcagaagttatcactgcacaattccagcactgaggtaaattctcattctgtatataaccttcggtacacatcacagaataatcacagaataatgtatacaactaaaagtaaaagaagctctgaatattggcatcatgattcagataattaaatgtcttcttttaacttggatgtcaattcagatggtgttctcttaaaagagcacacaacatgtctatcaatttaattggtttcctgggctatgttgctgaccaagcaatgaagttaaaaaaaattagcattgtatgagttcgatcagaattcatttgttgcagcattccaacgctgctaatttaagcgctttctctgaattttcagatataaacatcccaatcatgagagaagtaaatgatttcacaatgcagatgataatcaagttaaaccatttgcattatataaaaagatgcagatgctaatgaagtttattaaaccatgatatcgtcattgatagtttagtagtgggatatgcatacacacataagaaacatgaaagttgcattattaatcacatccactgatataatgattttgcatttctacattaaaatgcaaaatcgcgatggttacctaattactttgttggccggcaggttcgatgacctgcgatggcgaggagtcctaggggtggcgcgactgagagtggacgacaagaatcgatgactacttgacttgcgacgcggtggggtggaatccggtggcaacgtgcgagggatcaacaaactgatggcggcacggtggagagggcgccggtggcagcgcgcgagggatcgaagacgacttgactggtggcgctgtggagagggcgccggttgcggcgcaaaagagatttggtggtgaggagatcagaggaggcgaggcgagggcgatgaccccggtgtaacgttggtcaccggcgatgagttgagacgacggttgcgctccgggagagagggagtgatgggagagaaggagcggagattgcgcgtggagggatggatggggcgcacggagatgatcgatcggcggcggcaacggctgcactcgggagagagggagcgcaaattgtgcgtgaggaaacggatgggaagcagcgatttcgatcgaggggtgcgatttgggggcgtggatgacgggagattgggagaggggacgaagcggtgtgaggagatggtgggagtgatttgggacgttggattcgagcgagacaatcctgaccgatcaatgaggaatgaggatgtacatcagttggtgaattatagggtagataataaatactacattcgtttcatatcataagttgttttgacttttttctagttaaactttttaaaatttgaccaagtttataaaataaaaacaaacatattatcaaaatatatttaatgttacatttagaaaacttatttggtgttgtagatattgctaaatttttgtataaacttacagaagattgactgaaaaaaaattcaaaacgacttataatatgatatggagggaatagcatcaatttaaaattgaatgcatcgagtcattcaatatatggatgacgtacatatcgtcatgtcgtttcatcattctagccggtggattgcaaccttatttaatttcttagataaaaaaaatcagataattaaccaagctaactcattacttgatacgggaagtaacccgatcttctcgacgtaggatccagatataccgtgaaacctcacgaactgggtgaacaacacgctgcccgtgcaacacacctttaaccacgaatatgcaaaatcactagtagatgcttaataaaactatctaacccttaatcccagcggaaagcaagcatgatcttaattaggatcatcatattcccctatatgtggttgtgccaaatcataggaagaacgggtggcaagaccctcacatagttgtagctaaaagctaacttttattcataatgtcgagtcctcctctataatagatgcacacctattgcttatattgcaaccctaagacctctaaacaataaacaaactcattacatgacttggacacgaagaaagaaacttctcctgcagcaattgttgattagtttggtagattgcagataaaccacgaacaatttgaaggtgggactaaaaccttgatgcgggccaataaattagctctccaacaagtactcaattttccaaaacggagtccgtatgcgaaatccacgaccgtttttatcagattgtctaggctatccaaactgaatacaaaccttgttatcttcaaatttctcatttggaaataattcaatccatatagaggagataattgccgacttatggagaatattggaatagacgaaaaccatctaataataccatagaatccacaaactctccaaacatagcaattctcgcgcgtcacttttacagaattgataacctttagtaaaattggatgttccaatcaaaagtagtgggcctccttgggaaagtggcgtgttacgtgttgcttacaatacaatgctattcttgtccttcacgattttatggaggaggtggattcctacaccaaagaacaagtgtagctgaaccctagcaacaaaaattccatgttcttagcggtcaacaacaacttttgtggcgttggtgttggtggtggcagcggaaacacacaaggaataggtgaactgagaccacttagaagttaaaatttgtgccatagctgttgtgttccaatttaaacaccaattgactgttgtattaccaatagctagcatctattttgtcacttaactcttttttatgcgaggaactgaggctcatatttagaactagctagtggatacgttataatatggcattaaactcatttattaagaagcattgatctcattgacactttgattcaatggcttacgtagtttgatgacacaactatatacatgagagttttttttatagtaattaatttaaattagtgggatgtaactatacatgcatagatatgacacctagctaaagttccatattcccctttctctcaaaataaaaatcagtggtgtattttgatccattggaatacatacttttaaggtgaaaaaataactcaaaagttggagggatgaggttgggagcgtaatggttgactttaatacatgcttaacttagctttgagcttatatgcatttatactagtactacgttgataaagtagtttacatttgactttaagtttggtttccaaaggctcattaactgctcattaactgctagacttagagtaggtaataatatactccctccgtcctaaaataaatcaacttataggtttgaattttgtcccaaaataaaccaacttctaccttcttagctaccaccggttcacaaatcaagaatttttatcctttaaatacccctcacctacatatccatcaatacaactttcttactaattagggacattttggtcatttgcctttctccttaatttcatcttgggaagctagggtttgaaattttgtgggacggagggagtagttaactactactctcttcgcccacaagagtcagacctatttcatattttactttcaaataagttgttcctatttatagtatttatgcatacaaaacttaaatagatagataaattaaatgtttgatcaaaacccgaggagtcatattaatacttattggttgcatgtgtgcaagataaattaatttgtgcttgttctcagggataaaagtaataggtgtaacttttgtgtaaggaggtagtagtttcaaaattttacacatcatctatacccaacctaatatctcactcttacaatagttagttgtagatatgtactgtatcattaatatctaacacaagtatctctctcacatagtttattgaagttcgtagtacaactggctagaaatatgtagcccgtttttcttctctcttctccacataaatacaaatatgatgtgataatttgtatggtccgcttaaatcatctcgttgaattcgctcgctcttactccctctgtttaaaaagaatcaacctaggagcttctaggacaatgtatatacaccctatgtctagatacattattctaggaggtcacgtccccttccaagtaattcttttcgagacggatataagagtaaggctgtgtttagttcagcgtaaagtttggattttttgttgaaattggagatgatgtgactgaaaagttgtgtgtgtatgacatgttgatgtgatggaaagggactgaggtttggattcaaactttggatctaaacacagccttagggccctttgaatcgcaggattgagaaaacataggaataggaaaaacgtaggattttgattggaatgtaagtataaaacagaggattgcaaaacgcaggaaaaacacaggaatgaccgtttgattgaaccacaggaaaaacataggaattggatgagagatatagactcaaaggaaagttagcaagaggttgaagctcttgctaaatttcctccaaaatccgattgtccattccataggaattttaaaggattagataggatttaatcctttgttttaaaggacttcatagaaaatttttctataggattaaaatcctctaaaatttatgtttttcctccaaagttacaatctgttccaattcctttaaccttttctcccccagttctatagtgcccgattgtcaacccaatccgtttgtacgcacggaaccacacggcaaaaccaggaaggaaagctgcccgcgcccactgagaggtgggccccacacgtcggcgtcacgtcaccccctcgacctcgcatccccaaccccctccacatctcatgctcctctcctccgcctcacgcgcactcgccggcgcaaaaccccgctcgcctgaacccttcgccgccgccgccgcggtcttactccgccgccagctcgccgcaggcatggcggccgcgccggcgtcgtccgcgtccgcggcggggaaccgcgaggcgttccgcgtggcggtgaccaacacgctggagcgccgcctcttctacgtcccgtccttcaagatctacggcggcgtcgcgggcctctacgactacggccctcccggctgcgccgtcaaggccaacgtcctcgccttctggcgccaggttatccccccccacccccccactactacccgtgcttcttcttcttctcttcggtgtagtagtagtagtagattgggggagtggccaattttcggggtggggttcgagggggcaaaaggcgcggctgctttttcaggtttcggttcggaatcgccgcagttgagctgcgcggggagcgagcttactagagtgcttagttttggccatgctggccgtggccttcgcgagaggtcgggcctttgttttgcaacttgcgagactagtgaggtgttgtggctaagatgtgccgtgttgggattgttttttttttttttgttatagcagttttactacttgtggtgtgatgatgtgatgttggtatgtggtggttttgctaaaattagcttctactacctcttggggaaagatggccactagaagctccggagcgaagcctctccttccttgattgtgaatgggagggattagtctttttttgcttataggttaggaataattggtctggtatccttcatgtgtagatgtgtcggtcgacccggtatttggtatgcttcctcaatgtgggagattacgcggctgttgtatcttcttctttctttgttatatcgttgtaaacgattttgcgaagtatgtgggtacagtgacatatcaatagaaactagtgtaactgtaaatgttattagtggagaatggttagtgcccggtgttactcggatatatgtgaaataattcccctatcatcactgtcggtaacaggaaatttttttttagtactagattctccatagatgtacatctcagcatgtgccaaaggcatcattctagtacgtattatctttgttacattctgagaatgtagtatttatgcatacatcattgacttaccgtctactttggtaccttcttagcatttcgtgttggaggaggggatgcttgaggtggactgcccatgtgtgactcctgaagttgtcttgaaggcctctggccatgtcgacaaatttacagatctgatggttaaagatgaaaagactggcacctgctatcgtgctgatcatttgctcaaggacttctgcaaggat

SEQ ID NO: 28370 - DNA, 1953 bp, Oryza sativa
agttatcaagctagtttgcaaatgtctccgaatgaagcattatatggtcgaaagtgccgtacgccgcttctttgggatcaaaccggtgaacgtcaagtttttgggacagacatattgcgagaggcggaagaaaaagtgaagattatccaagaaaggttgcgcgttgctcagtcacgtcagaagagctatgctgacaatcgtcgcagagatttggcttttgaagaaggagattatgtataccttcgggttacgccgttacgaggagttcatcgtttccaaaccaaagggaaattggcaccgcgttttgtgggaccttttaagattgtgagtcgaagaggtgaagtagcttatcagttagagttgcctccgtcaatgacaggaatacatgacgtgttccacgtgtctcagttgaagaaatgtttacgagtacctacggaggaagcagatcctgatcgtatagagcttcaggaagatttaacttatgttgagaagccagtcagaatcctggaagtaagcgagaggaaaaccaggaatcgcgttatacggttctgcaaggttcagtggagcaatcattcagaagaagaatcaacttgggagcgagaagatgaattgaagtcagctcatcctcatctgttcgccagttcttctgaatctcgaggacgagattccgtttaaggggggtaggtttgtcacgccctaaaaatcgactaaattaaaaatgcatattttaaatcatttttagaaattgttttaaaagcctacaagctaaaccttaattttctaggaaaattttcaacataaaaatgaactagataaaattttattaaatactatgcttgctcctctattttctagaattttctaggaattatttgagcaagggaagtatttttaataattgaaacatcatttcacaaattgtttttatttaaaaagttcaaagaaacccctcctaggccgttgggccgatttcggcccaacttctctctctctccgcgcgggcgaaccggcccagccggcccagccgacgccgcccgcccctcccctctccagccgctgacatgtggggcccacatgtcagggccgtctcctacctccggccgccgtcgcgcaaccgcgcccgagccgccgttttcccccttcaaatccgctccaatccggtctcctcgagtccgattgatttaggggttttgttcctctcgttctcctctttcttttcccccaagaatcaaaacgaatcgttgagtattctctccgaatcgaattcgttttgattttatccctaaaaccgagtttgatttcttcccgaatcgattcctctcgtttggagttcgatctcttcgatccaatgccatataaagcttccccttgttctcctcttccgtttgccccctctcccgtcctctctcgtgcctcgtagcaccgccgcgacgcgcgccaagctcgccgccgccgccggccgtcttcggtcacgtcgcgccgccgtctccgccgttgccgccgcttgccgtcgccgccaagaggtgcgccgtggtgagaggaagctcggccgcccctcctctttcgccgccgaccaccggagccccttcgccgccgtcgacccgagccgccgcgccgctttttctcgtcgccggccgccgtcgtgcatcgtttgtcgtagtggtgagtaccatcgggttcgtctcgatgccctctacgcgtagatgccctccgtttccgcggccgacctccctagctccggcgagctctccaacccgagccggccgccattgccgacgtcagcatgacgtcatcaccagggctgacgtcatcattagggctgacgtcatcgtctccttttctttttctttttcccgattttctaatagattaaaacttcagaaaatcataactaaataaccgtagatccgtattaggtggtccaagtttctaaatttttttaaaatcaagatc

SEQ ID NO: 28371 - DNA, 15145 bp, Oryza sativa
tcagctaaatgccttatgtaagtttgcttatccatgcctagaaacatagctaattaaagggtttaattataaactatattatgtaattgttaattagggttatattcaatggtagctcacgatggtaaatcgtgtgatgataattaattgataattaaaacctggataaggtgggttgtgagcatatggttttgatggttgtgctcatgacaattaaggaccggttctcgcccgactgagaagtggcgagaagtccacgggggtcgctggggagtccatgccttgttttaaagggggtgattatgatccaggaaaggtgcactgtaatgggttatgttgtgcgaggggtattgtcacgactcctgtcacgcccggaaattcactagtaatttccgaacttatttgtgcataaaatcctcgtccaagaatcagccgaggtacacaaactgacaatttaatatacagattcatcaataactaaagcgaataaatacttacttaagaggcacttagtcctcatcaggaagaaaactgcagcggaaaataaaatctagcgaagctccggctccactcccacaggcagctcaactggggtataagccaaacgtcttctccttccggatcctttttcttcaactgaggttgattgattattgcaagaatgagcatatgacatactcaacaagccacacagcaaatatgcaagtgcacaaagattccaaaggatggcataatataggctcatttgcgaaagcagcatttagcaaagagttaagagtagtaaaacagtagagtaattaatcagaaattttaatcaacactgaacagcacacccatgctgtacaggcccaaccatcctgaacaaccatacccggctgaacagatctaactccaaaccaggagctaagcaaattattaccagttaatcatcaataattattgtgagaggtgtgagactaatcacgaaaaacattgctcaacccgcccataaccgcgggcacggctattcgaatagttttactctggccagaggtgtaccactgtacccacaagacacgattccacacatgtcgccatgccctgaaataccaccacggcattgcaaagggggaaatcgtgacaataccctttgcacaacacaactcaaaacagtgcaccgttcctggatcataatcacccccttataaacaaggcatggactccccagcgacccccatggacttttcgccacttctcagtctggcgcactataatgaatcacactatacaaaagataaagcccgtgcccatgctggcttgtggtgggcacggtaaatgtttcacaacagtagctcgcgaaccggtccttaattgccatgagcacgacctccaaaaccatgtgctcacaacccaccattaatcatattttaattaccagttaattatcataacacgattaaccatcgtgagctaccattaaatataaccataaataataatgtagtatatatgattcatcccattagtgagctaatgtttctaagcattgctaagcaattatatatatacttaacatttagctgaaccaaaccaatacataaggttcaagctaatcaattttattaccccaaggtatcaaggaatagggcattcaatgcaaattggccataacaaaggaataggttcacaccacccgatgacattcgaaaataaatgcacagttgaaacaaatagagaatttaaatataggatcaacatgctcaaaggattgtttgggatctgtgtgacttgccttgcaataatcgatcttcaattaatcttcttgatcacttccgacgcactcacgaaccttcgcaacgacggaaacgacaagctaacacgcaaaacgaagaaaaagactaataaaaaccaaataaacagtacataaaaagtaaacaaacatgtaaatcataattttagatgaattatgagacttgaacggcctcattcagacttcaaatgaatttattatgaattttacgagattaaatctatttaaagcccatttaaaaagaattaaataaatttaattcaatttatggacaattttaatatgtagatctttattttagaaaaatttagcaacttgaaccacctgaaacggatctacggttatttagatatgattttccgaagatttaaactattagaaaaaagggaaaaaggaaaaggaaaaagagacgatgacgtcagcatgacgtcacccacggtcggccgattagggttttcgagctcgccggcgataggggccttggccggggaaaaggagggcacctacgcgtagaggacgacgagacgaacccgatggtactcaccaaagtgccaaaagatgaccgacgacggccggcgacttggaagacggcggcggcggctcggcttgacggcgacaaaggggctccggtggtcggcggcgaagggggacgggcggccgaggttgctctccctcatgcgcatctaacggcggcgagacaaggcggcggcggcaacgcaaacggcggcgcgacgcggctggaaggtcgccggcgacggcagcggctagggcaacggcgcggcagcgctacgggcgacgagagagctcgggacttggggcaaacggtagaggacgactaggggatgctatttatagcattggattgaagagatcgaactccaaacgagagaaatcgatccaagaaaatcaaaactcggttttggagataaactcgaaaacgaatttgattcggataaaatacccaacgattcgctccgattcttgaggggaaagatagaggagaacgagaggatcaaaacccctcaaacaaacggaagaaaagaggccggattggaacggattcggaggggaaaggaggcggctcgggctcggcatgggcggcagctcggccggctggaggttagggatgaccccgacaggtgggtcccacctgtcggcggctaaggggaggagggggcgggcggcgtcgggttgggccggcttggactgggccgacttgggccggttcgcccgcggaaaagagaaagagttgggccaaaaacggcccaacaacctaaaggagggtttttaaaactttttcaattaaaataattcgtgaaatgttgtttcatttattaaaaatacttccctacctcaaataattcccaaaaaattctagaaaatagaagagcaagcatagtatttaataaaattttatctagctcaattttatattgagatttaacaaattaaaattagatcttctcttttaagcttttaaaaaattatttctaataattccttttaaacaacaatttataatttaaggattttaaacaagaaaagctcttaacaattataattagaccatttaatgattaatttaatatttaaataattgctgaacttctctttgtatgattaaaattaataattgagctccgaaaaatccgagaaaattccagagagtataattaaccatggagaatttaataaaaattaaatccatccatgctttatatttaggaaattttatttcccacatttaacttcacttgtaaattaatgaacatttaatataaattctattaataatttattaaataatttataaatcctaagacaaaaatcaggatgtgacaactcctttccgaggtaccgtggtggtattgaggcacatggtgacatgatgtggggttgtgtcttgtgggtacagtggtacacctctgatcagagtttaaactattcgaatagccgtacccgcggttatgggtgagttgagcaatgtttttcgtgattagtttcacactattcatcaatgttaataatgtggtaattaatttgactcctggtttggaatggctaattcctggtttgaaggtttaatttgttcaactggggttggttgttcaaatgtggttgggcctatgcaacacgggtgtgttgtatggtgtttatttaatattgattaattatacaactgtttaactattctctcaaatatttattaaatgctgtttctgcaaatgagctatattttgccatcctttgttatcctgtgcactggcatatttgctgtgtggcttgttgagtatgttatatgctcattcttgcaatattcattcatcagaggaggagtatctcagtgaatgtgatgatctggaggattaggcttgttcttggttaagttgcctgtggagtggagtcgccatagctgttccgtagtttgttttagttttgttttccgctgcgtagaatgttatttgttttgagaggaactatctacctctgtaataattttaatttgcgaatatttgatagttaattatttgtactctattatcaaattgtcattgtgtgcctcggttgattcctggacgagggttaacacacatgtaagcgtttggaattttggatagaaattccgggcgtgacaccgtcaacttctcctggatcgtcccgtctaatcttgtatcgtagtgctttgcaaacagggcatgcttctaggttctcatactcctcaccgtgatataggatacaatcgttcggacatgcgtgaatcttatgaacttccagtcctaacgggcagactatcttcttagcctcgtacgttgtctcgggcaatttgtttccccccggaagaatgttcttgacgagtttcaataaatcgccaaatgccttgtcactaaccccattttttgccttccattgcaacaactccagagtggtatccaactttttgtgcccctgctcgcaacctgggtacaacgaagttctgtggtcctccaacatcttgtccaatttatgggcctccttttcactttcgcagtcctccctggcgtcctgcaacatctgaccaagatcatccgcaacgtcgttaccatcagcagctatttcctcctcgcccgtttgatttccttcaaatccaacatactgagcaaagtccggaatattgtcgtcttccacttcatcttcttccatttcaacaccttgctctccgtgggatgtccaacaattatagcttggcatgaaccccgactcaaacaagtggaaatgaatagtcctggatgcagaatactccttctgattcttacacttattgcatggacaacaaataaaacccctttgcctgttagcttcggccactctcaaaaaatagtgcacgccgtcaataaactctttggaccgccggtcagcgtacatccattgccgatccatctacatgagtcaaaaaaaccgtacacaaataattattcttacaataatgacagtcatacaataattataagatatctttattcatacaaaaatcataaaatattacaccaaataattcttaaaaactatttgtaaagttttaaactaattttaatgtgttttacttcttttaattttcattttagtttgttttctattatttaagattaactttcactagagttttccttctcaactattttataaaaccatgtttagcaaatgaactaaatttctatatattctttcttccccacacacattttctctctcatcaacttacaactaaattttggagacaaaaaaagtgtgcaaaacataggtgcaaatgtagtatgacaaaaaaaacattggaggatgaagttgcaaaccttttaggcacctccgatttgtatgtaatcaccaaaataaattcaatagaaattttggcatgacctcccctcttttttgaagaaattttgaagcttgctcaggcagctggaggaggaagaagacatatatataggggtgggactttagtcccggttggtagcactaaccggggctaaagatcaccgggatctttagtcccggttggtattaccaaccgggactaaagttacgatctttagtcccggttggtgttacaaaccgggactaaagatcccgggggggcctgacagtccctgacagcattcgaaccgggactaaagatgatctttagtcccggttggtaacacaaaccgggactaaagatcaaatatgcccgctacccttttgaaccgggactaaagatcatttttagccccggtttttattgcatccgggactattgtggaaatcggccgaccgacgaaagatggtttctccaccagtgtcgtcacttcgtctcgaggccgtcgttccaccttgaggacgctgctccacctcggactcggactaaacgcggcaagatccaaccatgccagggaggatcttggtggagatcaggcggcccctaccgccgtgatcccatgcatcggtcctcctcgagctccctctcttttatgggcagcagagtcgagcggactcgctagccacctcatattgccaggcaagagaggataaaatgagagaagaaagaaaccatctccggcgcgacgagaaaggacatttatctcgtctccctgagaccctaggcacaagctgccggagaggaagctcgttggattggaggcgggcgggtgcgcacgcgctcgacggggctagccggtcgccactgtcgttgtcttcctttccgcgaatgagcgtgttggaattgctctaatctatcaaattttatcagggaggcaatctgcacagtgaacaccaaacatggatcgcacatagtaaatctttttcacggtgatgactatacttttgatttcggcgaaaatttcgattttttggcgaacgcgcaatttcgttagcaccgatagttacgaaatttcgttattttttacactttttatcaaaattatttaaaattgtaacaaattttgactgtattgaataaactttgactaaattcaacaaaatttcaagaaatcctaaaattttggtccatgtaatgacttgccggttgtccaaaatttagaaccaaaattgcaatcactggcgactgcccattttctcgcaaccgccacgaatccccgctttggactcgaattcccgcctcgtcgctctctaaatcgagcgaggggacgaaacgaacgcgatccgccacattattcccatcccctctctctttcaatttctccctcccatccatccacctccagcgctagggtttgtgcgccgccgccgccaccagagctagggtttggggatctctcgtcgtccgtccgccgccacccccgccaccatccataggggtttcgtgctccccgcgccgccatggccgccgcgcggaaccccctgcgccggtggaagcccttcctcgccgcgttcgcctccgtcgacgacgccatcgagatcgaggccgccgacctggggatctcccgcagcgagatccggcgcgcgagaggccgcatcgtggggatgctccgcggcgcggaggacgaccgggaggcggaggagctctgctcggtgctcgacgaggtgatggcggagtctctcctgacgctgcggttggtgcccgtgacgcccaggacgctggcgaccaccgatctcgccggggtggtcggcgcgctgaggaagcacgactcggagcggatccgcggcctcgccaccgacatcgtccgccggtggagggcggccgtgaagcgagaccttgtcaggatcggggtcgccatggagaagctctctcagacaccggagcgcatcgaggccgccgatcggccagtctccgatctggatgcgaaggtgaagcgcgcactaccggtggcgtcagcacggcgaaggcctcagagccatcgctgcccaagaggagtgctccggccgacatgggctcggcaacaaagccgaaggagccaacccatccgccgaagaagaagccgccggccgccgcgatggtgtcaagcccaatcacagtgacggcggcgagaagctgatgacggctgctacaaagcggaagctcgatgaggcgcagaagcggcgcaagacggccgacatggccgcagcagcaaagccagagggctctaattcgctcccgttgttgaagatggtggcgccggccgtcgttgccagccacggccgccgcgagagcatcgagctccacaacgacgaagagaagatcgccgctgcgaagcggaagctgcgtgagggctaccaagacgcagaggaggcgaagaagcggcgcaagatccatgtgatcgaggacccaaagatgctgaagcacaagcaggagaagatggatatccgatcctgagcgtgcggagccgagcaagccacgcctcctccatggccgagaagaagaagagcttcctcgtgtcgtcccttgggaggctttaggcttactagagatttacctctgaactgtaaatgaactgtgcgtccaaagatcacagtaacatcttgtattggcatgagaaactctctgaccctgtacacaacataccgtttctatgtacgtacgtatgactcgatcaatcaaatcaatcctgttagttaatgtaactggatagtatgtaagagtattaatgtattatcagtgaaatcaatggatcaatcttatgatcctcttaactttcctctgttttttttaacacatctgtagtacaaagtatataaaaaggtcagatgtgtcagttacaattctgttgagtgggtgaaatttccatacaataaattccctctgtagtgtcacaatcctgctgagtgagtgagctcattatttggttgcgtctccacgcctccagggctcaccgcccaaacttgtcgggactagctatccatcacgtgacagattttagatagttggattagactcatttgatcacttgattagaagagtctatacatgtatcaatatatattaattatatatatttcatatattttatttattagatctttgcttcgcaaaaaaaatatcaccaactcatctactaaaagttacaggtgtaactatactgtaactatagtgtaattacagtgtaactatagtgtaattacaatatacttacatgacttacaaatgtaattttagttatataggactgtaattttatattttagtttcaaactagaaaagatgcccgtgtgttgcaacgggtaaatactattttaatcttattattgttatacagtttggctatggtaaaattcactgtgggaatttgcttggatattttttctagaaaatattgagctgcaattaggagtccaaaattcataaattagcatgcaagtgtttttaaagagattttttatacgactccttttatattttcaaaatcaaacgaacttaaaatccgactcaaacatggatctgtatttccaaaagcgaatgaacttaaaaaccgacttaaacgcggatgacgtaccaaaataccggcaaaaatatttttaatttttataatagtagagaagagatagagatatatagtagagattaaaaatttaaaaaaatcaaaaaaaataaaaaaaatcttcgcaacatggtcttcggctacgacaatactggaccttgtctttgtctcccgcgttcatgggcctgcatgcttaatcaatcccgttggcaaaaagaaattgtgggtgaatcgcacacgagattgtttgcgcgggcttgctctctgtttcgctgttaaaaaaaaaacaaatcctatcattgcggcatggatcaacgatctgatgcgttagggggtaaattgatacggagtcgcgatgcaaaccaaaagggatgacgtgttggcaaaaacatctttaatttttataatagtaaagataaaaatataggtacggtataattatatgtaattacattgtaacttacacgtaattatatgctccttgtgctcagtggaggtcacgggatttcactcatttgtatctaagtagagttaacatttaggcatcgttcgtttaggggtgataggggagattggctctcgttttccgcgcgcacgcttttcaaactactaaacggtgcattttttgtaaaaaaatttctataggaaagttgctttaaaaaatcatattaatccatttttgaaatttaaaatagttaatactcaattaatcatgagctaatggctcatctcgttttgcgtatcttcccaatcttctcaatccccttctcctcaaacattccttaatcgcttttgttgtatagtaaaaacagaaaaagatgcgtgcaagacatcacttggcaacatacatgcactgcttccccgtacgtatgtatgtatcacgtacatgcatgtcacgaaccgctgccaccaacgaggatatcacgtacgaacggcgcgctgcaccgttagaaaaatcgacaaatattaagaaaaaaatttgacgacaaatttctagcaaaaccaaacttgtctcccccaaacgccaggccgagccacagcccacgtacggtgcgttcttgctgccgagaagaattagttcatttagttcccttaatttgtcgtgtagtgtaattctcatccctgaactgcaaaaattggatacaacctgtttccagcttaaaaaacagtgcaaacaagatccctcagtagtattatccctagttttggatgacgtggctcctttgactagatcttatcttacgtggcattaacgtggcggtaacatagcactttgatccaaaaaataaaacaggcaacatttaaaactaaaaaattaaaacaaaatattgggggcccataagtcagtcaaataagaagataaaaatattgggacccacctcctccacctcagcctgtctacctctgtctcctctctccgccgcgagagcatgcaaagagagacaaggcggggagggcggcgacgggtactgtggggtggtgccgctgctaacatccgaccacatggcggctccatctgaaggtagtgaccaagctggagttggggtagaggtctttgggtgccatgcctatctcttccacttagcaatccaccgccatggccaccgctgcgggctcctcttcctctattcctgcaagccagtctcaaaacccgttgccccgtgacttcctcgttcatgtcaaggcctacctctctccagccgcgacggcgtcgacaagctcctcaagatctcccgctacaccgcccactttgcccttgccgggtgctcgctgccccccgcctcctctggccgtccgcctcagcaacatgcgatgacgacttctttgtctgccatagagaacgaagaaaaaccccaatatgttagtcgccggtaactctaagtcggcaatggtagttttcgtcgggagtcaaaaaagggaacaaggtggatacaagaattcatttttgcaattcaattctcaaaatgcaaggataaagagaattctctactttcttctaccttggtctccggcagagcttcgtacctgataatgtattatacaatgcccttattcagagtagtccaacggagttgtataatcaaagataaaagtggagacacaaagtttaagggtgagactctctttcttattctaatcatcccatcaagcttgatgtacaaatgagtagccctaaatatagtgcaatcctaaatatgcaaagtttggtgatgactcaataagtatatttgggctaggcatttgtgggccaagcccaaagtttcttttaacaattaccacttcaaaatcaaactgctcccacagcgcagcacgtcagcactcaggacctagggatgaaaacagttggaaaaaccctctaccatttccattttcattttattttctcgaaaatggaattggaatagtatactcggaaacggtaacaatatcagtaatgttggtatatcgaaaacggaatcgtcggaacgggaatctaccgatgtcggtcggaagtcgaaaattcatgtcggaagtagcgaactgtggtatcaatccacatttaactatgtatgaagatgaccttataatttcacccttgcatcatcacgctgccacacaacaccattatatgatgattaataagttgacaataagattgacaaacaatataaataaagttcaactatacttcaacatcaatgtggataaagcatacaatgtggcttacatgataggattacatcataactaatattgtccgacttttttttaggatataaatttgaagtcttcgagaacaccaagctcacaagttggcatggcttcagctgatcagctccttgtcaaacatcattcatcatttcatcatcaattgacatagctacatcgtcgtcctacagactacagtggcacattgcataagaacttttatgttgacactgtatagctaccattgtaattaagttttatgctaaactagacattttggtagtttccaggtcaaggggggtcactgagtggagtcaagttggtggggcccgccagtgggtcccactgtctttctttttttcttttcttttctctctcttatccttcccttctatcggttccttctcttgctctcttgatttcttctttgttctctctcattctcttctctgccttcggctccttcacgcgcgcccgagaggagagaggtgccggagatggcggcctggcgcagggcagtggtgggggaaggagagaggagaaaggggcggcgccaatggggaagaggaggccccggtgcggcggcgctcggcatggcgtcattcggtgcttggcgtggtggcgcttggctcggcggcacggaggccggcggtggaggatgggagagggaaagagggccggctgcgatggaggttgtcggggcgaaggaggctacggccggcgtcggcgacatctactgccggcgtcggcgacatctactgctttagtctcttaatgcctaatgggctgcttctgctccggctagccaggcccagccggctttcttcttcggaattttgtcggaaatttgacggaaattaccaataaaaaacggttaccgaccaaacggtcggaaaaaaacccatatcatttccgctaccattttcgaaagagattaccatttctattttcgatactgataattaccgataccgactgaaacggtcggtgcaaaccggaaacggaagccggaattctcggagatttccgtaccgttttcacccctgtcaggacccacacagaatcgtgcgatcttcgcgtcgccatggaagccaacctgctgtcgccgcggcgcatcatcttcttcgggagcatgttggcggcggcggcccgccgccgcgacccggcctcagcggcctactccatggcgtccatgctcgtgctggtgctcttcttccgctgcatgggcgccgtcgcgcgcgctccggcggggccacggaggcagtggctcagggccgccgtcgtcgcgctctgcgtcgccctcaccggcctcgtccagctccagatctacagccccgccgtgcccctctctgtggcgctcgccatctgggccgtgtccgtcacctgcttctccgccgtcttcctggttgcctccgcacgcccgcaagtcgctcgatgaaatggcgacctcggctttgacgtttctactactggtacggtaccaccagacttgttatcactaccctccctactgctgatgagtcacttgcaggattcagacaatgtttgcatctgtaaatatcgttacaggtgttcttagacttctttataggattgaccgtgaattcgtccaaatctgacaaatgctagtttttgctgtaagtatgcatgatttccgtaaaactgggcatgtgcggtcgaaatttacttacagtaggtgccttgctgctggaattaaaatttcatgtgggcgaagaatatgtccacactgatggttggagacttggagtgtatgataatatctctcattccatgaaacattgaacaatcatgttgcttctcaagtccctacagggctacacctgttgaatacacaattgaacatatctcttctcaaagcatgaccaattctagatttttttttttcctgcacatagcatttccttatcattgttgcatgcttcgatttaccctgtccaactggctactgtatctgggcatgaatcggtaattctgttttatccagcttcgatccatgaagcatatttggttgatactatctgaatagcattgttacttgtctatttattacgttctcttagtatgatttgggaaagtactattaccttttttttcttttgctgaaactggggtacgcaatttgtcacaatctctgattaaacccagacagagttcattttagaaagaacacatggccacatggtactgtagttcaccaaagtacatgttcaggtgatcgttttggtgtaacaatatcaaaattagctcacctaacgccttctcagtcttatattggcaacatggcactgtcaatgacctcaattttctttataccatatcatcactgactccgtactatacagtacggacaaccttaataaatcatggaagaatagtcaaagacaaattaaacatgcgtatcataaattgtcaaagactgattatttttttttaaaaaaatgtctattgtgagattttggagccgcctatgccttgttcagagagtgtaagattttgagaaacggttgattgatagtcaatctctgagaatctaaaaatggctggattcccaattaattttttgaattttatagctgcatattctcaaaatctggagggagaatctgcattattttgaaaaattgaagattctgcgaaacgttataatggctagaatctgtactgtactgtttctggaacatcgtgggggtatttttcattcaaatcttgtgtgtaacaagtaacaacaagatacagaggaccatagatcacaatgtagttgccatctgaaacataactttaacaaattgagacatagatatagagaaaataaaatggtatatacgtacccgaatttttggtgatggaagtatatatcacgacctatatatatactgctactatggactatatatatagatagactctgctaatggcaggggcaaatgacatcggtgacaatgtggagggagtacatgacgacgacgaagtggacggccagcgcgacgaagccggcgatgagcgccgccatgacgtggttgcagtaggcgtgtatctgcccgcacaccggcagccacccggcgtgcgagttgccgttcttcgcgatgtccgatatggcgccggcggaggccacggcaccggcgagcaccatccccaacacctgcgtacatggacggacggagaaatattgatcgaaaactggttctacaatctttttttttaccagatgataccatgcatgcga

SEQ ID NO: 28372 - DNA, 1814 bp, Oryza sativa
atcaacaccatgagatttaggagaggacacaaagaaagaaacagtttccccattgctactggttaaagtcaccttacggttggcacagtctataactcctctgtgacgagataaccagtccatccctaagataacatctagatctttggattctagcaagataagagaggatgggaaaggaacttcttctatttctatggtagcggaaggacaatactgtgtcgagaaaacttgattgcctgggtattaactagtaaaggtctcccaagactaacaacttccatcccatgtttgcttgcaaaatttttagacaaaaaggaatgtgtagcaccggaatcaaaaagcacagttgcgggtatagagttaacaggaaacgtacccaaaaccacatctggtgcattctgagcttctgctgctgctacatgattaacacgtgccttcggtgctggaacattggagttgttcggggctggaacgttcttcacacgccgaggcttaggacacttatcagcataatgtcctggatcaccacaattaaagcatatcactggcttgcttccctgttccttcctgacaggctggttctgagctgaagttgctacaggacgagcaaccaccttgcggttgtcattgccacgattaccagtattgttgttgtagaactggcgttggggacggacaactgatgaagatcctccttgagggtacgatggaacttgaggtccagtaacgagacgcggcctctggttactgccctgttgtgccctgaattgggctgccctgcgcttcttctgctccatccggttatacttgtcttcctgacgaatcgccttgtccaccaactgctggaaatcccggaaatccgtagacatcaaagcataagacaactcatcattcagtccctctaaaaacttctcctgacgttcctcatcggtgcggacatcctctggagcatagcgagctaaacggttgaaatcatggagatactcagtgaccgaacgagatccctggttgagtgctctaaattctctcttctctagagctacaacacctgacggtatatgcgtcttcttaaaagcagccgtgaactcctgccaagtaataggttctccttcagccctgccttggcgaaaatgatcccaccattcagcagcaggtccatgcaattgatgcgaagcaaaagaaactttctcctgctcagtacactggatcaagtccaacttcttctccactgtatgcagccaatctcctgcttctacgggattggtggtgcttgaaaaggtagggggtctcacacgtaagaaatctgccagcttgttttgaggaggtgggggtggattctgattctgattgtttgcctgctgattctgtgcctgctgcactaacagattgatcagttgtgtttgttgggccagaatctgagctagcgtgggatctcctccattgttagtagctccactaccacttccacttccacttccagtgcgcgtgttcaccatctgacgataagcagagacaacaggaaagaacgacagagagacacccttagaacggagttatttaattaatttaaattctatattgctcttaactgtgtatgattatatttaagttgcattaacactatctcaccaactatcttacactctgacaagcaaaagaactagactcatgctgttacatcccaccattgatgtaagcaacaagtacaacccacacactcacaaacaaacttaaacaagcaatctaacacaacgaactacggcaacgatctaactaagcgactactcccgccttgcgtcggaacgaagcga

SEQ ID NO: 28373 - DNA, 18767 bp, Oryza sativa
catcagagtggcactctcttcaccatcaggacaggtataggttccatagtcttgaccatgaggcttgtgaggatgatactggaaagctgatgaatccaactcttcttcaaaacgttgacgcaactctccaatggccaccaaagctacttcttgacaagcatggcagtacgatcttcctccagcttcaaacttaaaagacggaaggtcttcgctatcactagccaacgtcacacgaacacgacacttctcctcgtcggggtcatgggaaatttggcgatactcaggagcaacttcatagcctacctcaaaagccatcaacctcagctccctgacgaatcctaacaccttgatcaaatttctcggtgaatggggcggcatctaaagagacatggaagagaagaattaattcatatatttctaagttagctgcaccatctagacttaactgattgttgaccaaaaaggaagaaaataaaagaaaagacacatacaaagctattttataaatattttgtagaatttaacttctctttggacagagacaaataattttttttttgacaaataactaaaataaaactaaaatacttatgatctattataagcacggtacaatgtcaccattaaaaatgatgagtagtactagtgcaaacatgattaaatcgataccataataaatgtacagtgccgactaatcaataagatttggtaaagagaaaaggaaacattttgagaagaacaactttttgcttttaaaagaaaagaatttgaattaaataaattttttgtgcataaccttgcatgtgctgccaacttaattaatttataagagaatagagaagagcagttctatttttttttcaaaatattttgaaggctacttaaggtttaccatttggcttatcctaaggtcaaggtggctctgataccaacttgtcacgcccggaatttctatccaaaattccaaacgcttacatgtgtgttaaccctcgtccaggaatcaaccgaggcacacaatgacaatattgataatagagtacaaataattaactattgaatattcgcaaattaaaattattacagaggtagatagttcctctcaaaacaaataacattctacgcagcggaaaacaaaactataacaaactacggaacagctatggcgactccactccacaggcaacttaaccaagaacaagcctaattctccagatcatcaccttcactgaagtactcctcttctgatgaatgaatattgcaagaatgagcatataacatactcaacaagccacacagcaaatatgcaagtgcacaggataacaaaggatggcaaaatatagctcatttgcagaaacaacatttaataaatatttgagagaatagtaaaacagttgtataattaatcaatattaaataaacaccatacaacacacccgtgttgcataggcccaaccacatttgaacaaccaaccccagttgaacaaattaaacctccaaaccaggaattagccattccaaaccaggagtcaaattaattaccacattattaacattgatgaatagtgtgaaactaatcacgaaaaacattgctcaactcacccataaccgcgggtacggctattcgaatagtttaaactctgatcagaggtgtaccactgtacccacaagacacaaccccacatcatgtcaccatgtgcctcaataccaccacggtacctcggaaaggagtcgtgacaatacccctcgcacaacataacccattacagtgcacctttcctggatcataatcaccccctttaaaacaaggcatggactctgtcacgtcctgataaattcatcccgaaataaaattcattttctaaaaggaataatagaattaattaaaatgcgaaaagaaattggcaaacactaaaatacgtacaagaaaaattcaaatgtggtccggagaatttttgtcaaattctccttggtctaaatggagctctcaaattttacttgaattttcagagcaccgaaaataattattaagccacaaaaacaattatcaaagtttattaaaaagaagacctaaaaataatcctcttcctcctttgggccaagcccagcccaaagtctccctctcctccctctctttctctccctcctcctccctctccctcccgggctgcctctccctcctctcctcctgggccggccgcccgggccaagccgcaccccccccctccaggccgagccgcgcctcccgcccgtgctgcgcacgtgcgcgcgctgacgacgcgcgcctgaccgcgtggggcccacgcgtcaggccgccgtcgccttcttcctccagccgccgcccggcttctctctcacccgtgaaccctactccttccctccctcaaatccgtgtgattcgctcatgggattccaaaattaaataggggaaattaatccccattgaatcctcttcaattccctccaatttcccccttgattcgtgccttcaatcgccgggaacgcccgcgtcttcctcggccgccttccattgccgccggccgtggttcccgccgccgttcccgctcctcccgtggccggctctctcccccatcctataaaatgggatcctcatcccccgttctctcgttttagccccctcccgagcctccccgtggtccctatccacctccccgtcgccctcctctctctcccacgctgccggccgcctccagccgcccctaccgccttgcccgtgcgccggccggccgcgccgtcgcctcctccagcgtcgccgccacctcctccaccccggcctgccctccgtttcccgcggagacccccggagctgcctccccgccgtcgcccttctctttcctccttgccggccacctccagccgcacctcccgcctcgcccgtgcaccctccggctgcgccgccacctctcccggcgtcgcagctgcctcctctttcccggcttcgcctccgtttcgcggggaaatcaccggagacgcgtcctcgccggcatccagtggcgtcgccaccacttctccgtctccggccggctgctgttcgtcgccggtacgccgaccgacgtcgccgtctcctccgttgacgtcgcagcgtcgtcctccaccccggctgctcctcggtttcgccggaacgccgtcgccgcgccggcctctccatcctcttcgtcgccggcgtcctttcggtcgccccttcctcctccccggctcgtcggcttgctgcaccactaccacctccggcatcgcagcggcaaggtcgtcctcggcatcgtttcccctccatccaaacccctccgcggtccatcatcgtcgtctccgatcgttctcgtcgtcgacgtcccgtcggtcgcccggctcgtcgtctcgcggcgccgcctccgtcatcgtcatcgctgcggcgtgttccacgccgtcctcgtctccgtgcagccgctgccggcagccctcgtcgcctcctcgccggctccggtcgtcgtcgtcgtcgtcctctcgtcgttcccggtttcgctcgttgtggcgttcgtccctccgtcaagccgttcttgtccgtcgtccgcgtccgtcaagtgtgtcgctgcagccccgtcctcgtcttcgtcctcggctccgcgtcgtcaagccccgtgccggccgcgtctcgccttcgtccaaggatcgccgccgaagccgtcccctcgccgttcgtctccgttgtgcccgtctgtctccgccgcgcccgttcgtcgttgtcgttcccgcgcctcgtcgcgtggtggtaaggatccctctccctcgctgccccgtcctcgtcctttcggtgtcgcccgtgctcgttgttcggtcgtcgaccccggtacccgtgtaccggtgtcggtagtcgttcacgtgtgcggatggtgaccgtgtagtgtccgtgttagtgtgcccgctcggtagccgcgtggtttccacgtgtgcaacccgtgtggtgtctagtggagtccgtttgtcggccactcgcctcggttgacacacgggatccgcttccgtcgacccgtggaccgactctgtgtactcggtctaccgcggtcctttaggttgacatgtggggtccgcatgtcaacggcgcagccttcctgtcttttccaggctagcgcttacacatgttttgtaattgcaatgcttaattataataatccgcaaatctccatataacagcattaaacctcggatgatcataccttggtcatacgaactctgaatcgacccgttcaagtctcctaatgtttgttataacctaaagaaccctgtgctttctttttatgtattgttattgcttctttataggcttgtagctttgcttgtgtgcttcgcgtagcttctgtcgttccggaggttcccgaagcgtggttcgtggtcgtcgccgaaggttcggaaggccgttctctctgagcaaggcaagtcacatcatccttgaacatattgaatcccagtttatcaaattattttgatttaaattattgcattattgctttatttaaattcccgcgttatcactgttttatttagccatgcctatttacctttgttatgaccttattattattgctattgttattattaccttgttcaccctaggataaacaaaaccccaactagtgggtactctattcgtggttccactagtataaatttaggtagatgcttcgctgattaattaggcaacattaggtggttttataactttagactttgggaattctcatatcatttggacactatggaattgttggattatggtggaattggacatacacctctcttcctctttcaaaacccctaaaacctgttttcggtggggtttgggtgcatgccagttgtgggaagtagcaccccggccactataaggattaagctcgggcctctgttgcaaagcactaccgtactaaccacatgtctaatgggtaaggcttaactcggtgctcaggctagtcctgaacaaaaggacacggatagagatggatgaagtcgttgcgacgatggatatctctgaggcaaatgaaggctacgcgagctgcggctcggtaatcgagatgtctaggcaaatgaagactacacgggtcggtgcccgttagtcgagatgccatggcactggactagtacgcgggtggtctcacccctatgtgtgtggcgcacccggtctagatcttgttgctaggggctcaaccctggcctgcctgtcccgggataccggccgtaggcagggttgggtcggtacttttgttcacggctaggatgggtgaagggttatgtcacatgtttacgacgggttccaaggccatggaatgcggagtaaagatgtgtcttgtgggtaaagatgtacacctctgatcagagtaaatctattcgaatagccgagccctcggatatgggcaagcctagcaatgtacccaagtcagtgttttaattcttaaaatttgctcaacaactaaaatgtggaatggttggcctgggttggcttgggacgagctgggacccaggtcgggttgccagttcggtctgaatcatcgtaggccttgggttaaggcaggttcgtgtgggtccacggccttgattaataatattgtgtagctctaggatcgtctttataaaatagctttgggcaactaagtgacttttaaatgctgtttactgcaaaacctaacccctattattatccccttgtacccccttgcattaatcatgcatctgccggtgtggcttgctgagtactgtggttgtactcattcttgctctatctttctccccccttcagtaagagaagctttggagaagatgtcttaggtggagtcctggcttataccccagttgagcgcctgtgaagatggagccgtaggcccgctagtccgctgctgtttatttttgtatgtcaggcctgaagtgtctttgtaataatgtaaatattatcgatataataaagatgtgtcttttatatcatgtttgtgtggtgtaccccggcttttcctgggacggggattaatacactagcgttcgggaaaaggcaattttcccggtcgcgacagactccccagcgacccccgtggacttctcgccacttctcagtcgggcgcactataatgaatcacgctatacaaaagataaagccgttgcccacgctggcttgtggttggcacgataaatgtttcacaacagtagctcgcgaaccggtccttaattgtcatgagcataaccatcaaaaccatatgctcacaacccaccttatccaggttttaattatcaattaattatcatcacacgatttaccatcgtgagctaccattgaatataaccctaattaacaattacataatatagtttataattaaaccctttaattagctatgtttctaggcatggataagcaaacttacataaggcatttagctgaaccaatccaatatataaggttcatgctaatcaaattataacccataggaaaataaagtcatctccggccattaattaactgggaaaggttcaccacccgatgacattcgaaaataatgcatagttgaaataataatagctttaaatgggttcaacatgctcaaagggttgtttgggatctgtgtgacttgccttgggcttccgcaaacgcttcggaaccttcctcaacggaaacgctctcctccggaacgtcggaaactaagcaaataaacaaaatcaacaaaacagtacaaaaacaagcataaacagtacatgtggatatttttaacatgtagatcttgattttagaagaatttagcaacttgaaccacctaaaacggatctacggttatttagttatgattttccgaagttttaatctattagaaaatcggaaaaaagaaaaagaaaagaagacgatgacgtcatgctgacgtcatgctgacgtcggcaagggccggccggctagggtttgcgagctcgccggagctaggatggtcggccgcggatttggagaccatctacgcatagaggacatcgagacgaacccgatggtactcaccacgacgacaaacgatgcacgacggcggccggcgacgagagggcaacggcggcggctcgggttagcggcgtcggaggggctccggtggtcggcggcgacgaaggggatgcggccgagcttcctcacctccgtgcgcacctaacggcgacgacggcaagcggcggagacggcggacgcggcggcgcgacacggccgaaagatggccggcggcggcggcggctaaatgcacgtggcggcggcgctacggtgcacgagaaagctcgggagagagggcaaacgaaagaggacgacgaggggaagctttataaagcattggattgaagagatcgaactccaaacgagaggaatcgattcgggaaagaaacaaactcggttttagggataaaatcaaaacgaactcgattcggatcaaatcctcaacgatcctctttgattcttgggggaaaagaaagaggagaacgagaggaacaaaacccctcaaaaacccggaggaatcggagtcggattgaggcggatttgagaggagaaaggcggcggctcgggctcggttggcggcggcggccggaggtaggggacgaccctgacatgtgggccccacatgtcagcggctggagaggggaggggcgggcggcgtcggctgggccggctgggccggttcgcccgcgcgggagagagagagaagttgggccgaaatcggcccaacggcctaggaggggtttctttgaactttttaaataaaaacaatttgtgaaatgatgtttcaattattaaaaatacttcccttgctcaaataattcccagaaaattctagaaaatagaggagcaagcatagtatttaataaaattttatctagttcatttttatgttgaaaattttcctagaaaattaaggtttagcttgtaggcttttaaaacaatttctaaaaatgatttaaaatatgcatttttaatttagtcgatttttagggcgtgacaaacctaccccccttaaacagaatctcgtcctcgagattcagaagaactggcgaacagatgaggatgagctgacttcaattcatcttctctttcccaagtagcttcttcttctgaatgattgctccactgaaccttgcagaaccgtataacgcgattcctggtattcctctcgcttacttccaagattctgaccggcttctcaatataagttaaatcttcttgaagctctatacgatcaggatctgcttcttccgtaggtactcgtaaacatttcttcaactgagacacatgaaacacatcatgtattcccgccattgacggaggcaactctaactgataagctacttcacctcttcgactcacgatcttaaaaggtcccacaaaccgcggtgccaatttccctttggtctggaaacgatgaactcctcgtaacggcgtaacccgaaggtatacataatctccttcttcgaaagccaaatctctgcgacgattgtcggcataactcttctgacgcgactgagcaacgcgcaacctttcttggataatcttcactttttcttctgcctctcgcaatatgtctgtcccaaaaacttgacgttcaccggtttgatcccaaaggagcggcgtacggcactttcgaccatataatgcttcattcggagacatttgcaaactagcttgataactattgttatatgagaattccgcgtacggcaaattcttatcccaacttccaccaaaatctagaactcaagctctcaacatatcttctaaaatttggtttactctttccgtctgaccatctgtttgagggtgataagcggtactgaaattcaaacgggtatccaattctgattgtaatttctgccaaaacttcgaagtaaactggctacctctatctgacactatcttcttaggaacaccatgcaaacataccactctggccatatataactctgcaagcttattccccgtataggttgttttgaccggtatgaagtgagcgacttttgtcaacctatcaaccactacccaaatagaatcatgtcctgccgacgttctgggtagaccggttataaaatccattcctatttcttcccacttccactctggaatcttcaacggttgtaatagaccggctggcttctgatgttctgccttgacccgctgacatacatcacatagagccacatattctgctatctcacgtcgcatactggcccaccagaattgttgctttaggtcttggtacatcttagtgcttccagggtgaatggaatacaaagtttcatgagcttctttcatgatagtatccttcaactccttattttctgggacgcaaattctttctcctaaccacacagtaccttgctcatcttctacaaaaccgatggctttacctcttctcatgttcttctttatttcttggatatcaggatcattcacttgagcttctctaacttgatcaaacagagtaggtttagcttctaaaacagccacaaaacctttgctgactattcccaagttcaacctttcaaattcttggcataactcccaaggtaaacgtcgaccttctgacatattacagtagcttttcctgctaagggcatcggctacaacatttgcttttcccgggtgatagtggatctccatatcataatctttaatcaactctaaccatcttcgctgacgcatgttcaaatcaggttgagtgaagatgtacttcaaacttttatgatccgtatatatctctgtacgattaccaaaaagataatgacgccaaatcttcaatgcatgcaccacagctgccaattctaggtcatgcgttgggtagttattctcatgaggacgtaattgcctagatgcataagcaaccacctttccttcttgcatcaacacacaacccaaaccgagtcgggatgcatcacaatacacttggaaacctttcctcgaatcaggcaaaattaataccggcgcagtcactagccttttcttcagttcttggaaactttgttcacaatcctctgtccacttgtacttcacttccttctgaagcagacgagtcattggtctggcgatctttgaaaagttctcaataaacctgcggtaataccctgcaagtccaaggaaactacgaatttctgaaaccgtcttgggttgcttccaacttaacactgactccacattgctcggatctactgccactcctccagacgagatgacctgaccaagaaacttcacttcggacaaccaaaattcacatttactgaacttggcataaagctgatgctcacgtagtttctctaaagctagacgaagatgctcttcatgttcttccttcgtcttggagtaaatgagaatgtcatcaataaacaccacgacaaacttatccaaatattccataaacaccttgttcatcagattcatgaaaaaggctagggcattagtgagtccaaatgacataacggtacattcgaacaaaccataccgagttgtgaaggcggtctttggtatatcttcctcacggattcgaagttgatgatatccagaacggagatctatctcggagaaaactgtagcaccttccagttgatcaaacaggtcatcaattctgggtagaggatacttattcttgatagtgacctcattcaacgctcgataatccacgcacattctctgagtatgatctttcttctccacaaagatgactggtgctccccatggcgaagtactgggtctgatgtatcctttctgaagcaaatcatccacctgtttcttcacctcagctaactcattagctgccattctgtatgatctcttatggaaagggttggttccagggaccaagtctatccgaaactctatctctctcttaggtggcatacctggcaaatcctcgggaaacacgtctgggtagtcttgtactataggtatctcttgtagagcaacttggtttaagatcacaccatgatatttaggagaggacacaaagaaagaaacagtttccccattgctactggttaaagtcaccttacggttggcacaatctataactcctctgtgacgagataaccagtccatccctaagataacatctagatctttgcattctaataagataagcgaggatgggaaaggaacttcttctatttctatagtaacagaaggacaatactgtgtcgaaaatacttgattgcctggggtattaactagtaaaggtctcccaagactaacaacttccatcccatgattgcttgcaaaacttttagacaaaaaggaatgtgtagcaccggaatcaaaaagcacagttgcgggtatagagttaacaggaaacgtacccaaaaccacatctggtgcattctgagcttctgctgctgcaacatgattgacacgggccttcggtgctggaacattggagttgttcggggttggagcgttcttcacacgccgaggcttaggacacttatcagcataatgtcctggatcaccacagttgaagcacacccctggcttgcttccctgttccttcctgacaggctggttctgaactgaagttgctgcaggacgagcaaccatgttgcggttgtcattgccacgattaccagtattgttgttgtagaactggcgttggggacggacaactgatgaagatcctccttgagggtacgatggagcttgaggtccagtaacgagacgcggcctctggttactgccctgttgtgccttgaattgggcagccctgcgcttcttctgttccatacggttatacttgtcttcctgacgaatcgctttgtccaccaactgctggaaatcccggaaatccgtagacatcaaagcataagacaactcatcattcagtccctctaaaaacttctcctgacgttcctcatcggtgcggacatcttccggagcatagcgagctaaacggttgaaatcatggaggtactcagtgaccgaacgagatccctggttgagtgctctaaattctctcttctttagagctacaacacccgttggtatatgcgtcttcttgaaagcagctgtgaactcctgccaagtaataggttctcctcccgccctgccttggcgaaaatgatcccaccattcagcagcgggtccatgcaactgatgcgaagcaaatgaaactttctcctgctcagtacactggatcaaatccaacttcttctccaccgcatgcagccaatctcctgcttctactggattggttgtgcttgaaaaggtagggggtctcacacgtaagaaatctgccaacttgttttggggaggaggggtggattctgattctgattgtttgcctgctgattctgtgcctgctgcactaacagattgatcaattgtgtttgttgggccaaaatctgagctagcgttgggttctcttcattgttataggctccacttccacttccacttccagtgccggtgcgcgtgttcaccatctgacgataagcagagacaagaggaaaagacgacagaaagacacccttagaacggagttatttaatgaatttaaattctatattgctcttaactgtgtatgattacatttaagttgcattaacactatctcaccaactatcttacactctgacaagcaaaagaactagactcatgctgttacatcccacccatgatgtaagcaacaactaaaacccacacactcacaagcaaacttaaacaagcaatctaacacagcgaactacggcaacgtcttaactaagcgactaatcccgccttgcgtcggaacgaagcgatggatcttcttcctctggagtagctggctctctttcttcagggtcttcctcctcttcctcatcacttatgatgtcgatgacaggttcagcacgatcgggcacagcttcacccatcacacgaatcttcgaagctaactggagacgaggtggcggacaggttctctttcttgcgacgaggcgtagcttgggtgttggtggcggcgtttctcctttaagttcagacaattccttctgtagacggtacaccttgctctccaacttgcaaatcttgcctcgattccagttttccctgtcatgagctgctttgtctcgctccacacttactgcatccatagcactaagcatatgcaccacatgcataagagtggcactctcttcaccatcaggacaggtataggttccatagtcttgaccatgaggcttgtgaggatgatactggaaagctgatgaatccaactcttcttcaaagcgttgacgcaactctccaatggccaccaaagctacttcttgacaagcatggcagtacgatcttcctccagcttcaaacttaaaagacggaaggtcttcacgatcactagccaacatcacacgaacacgacatttctcctcgtcggggtcatgggaaatctggcgatactcaggagcaacttcatagcctacctcaaaagccatcaacctcagctccctgatgaatcctaacacctcgatcaaatttctcggtgaatggggaggcatctaaagaaacatagaagagaagaattaatgcatatttttctaagttagctgcaccaactagacttaactgatttttgaccaaaaaggaataaaagaaaagacacatacaaagctattttataaatattttgtaggatttaacctttttttttgacagggacaaatattttttttttgacaaataactaaaacaaaactaaaatacttaagatctattttaagcacggtacagtgtcaccattaaaagagatgagtagtactagtgccaacatgattttatcgataccataatagatgtacagtgccgactaatcaataagatttgataaagagaaaaagaaatattttgagaaggacaactttttgcttttaaaagaaaagaaattgaattaaataaattttgtgcataaccttgcatgtgctgcgaacttaattaatttataagagaatagagaagagcagttctatttttttcaaaatattttgaaggctacttaaggtttaccatttggcttatcctaaggtcaaggtggctctgataccaacttgtcacgcccggaatttctatccaaaattccaaacgcttacatgtgtgttaaccctcgtccaggaatcaaccgaggcacacaatgacaatttgataatagagtacaaataattaactatcaaatattcgcaaattaaaattattacagaggtagatagttcctctcaaaacaaataacattctacgcagcggaaaacaaaactaaaacaaactacggaacagctatggcgactccactccacaggcaacttaaccaagaacaagcctaatcctccagatcatcaccttcactgaagtactcctcttctgatgaatgaatattgcaagaatgagcatataacatactcaacaagccacacagcaaatatgcaagtgcacaggataacaaaggatggcataatacagttcatttgcagcaaacagcatttaataaatatttaagagaatagtaaaacagttgtataattaatcaatattaaataaacaccatacaacacacccgtgttgcataggcccaaccacatttgtacaaccaaccccagttgaataaattaaacctccaaaccaggaattatccattccaaaccaggaattaaattaattaccacattattagcattaaagagtagtgtgagactaatcacgaaaaacattgctcaactcacccataaccgcgggtacggctattcaaatagtttaaactctgatcagaggtgtaccaccgtacccacaagacacaaccccacatcatgtcaccatgtgcctcagtaccaccacgatacctcggaaaggagtcgtgacaatacccctcgcataacacaattcaccacagtgcaccgtacctggatcataatcacccccttataaacaaggcatggactccccagcgacccccatggacttctcgccacttctcagtctggcgcaccataatgaatcacgctatacaaaagataaagccgttgcccacgctggcttgtggttggcacgataaatgtttcacaacagtagctcgcgaaccggtccttaattgtcatgagcacaaccatcaaaaccatatgctcacaacccaccttaatcaggttttaattatcaattaattaacatcacacgatttaccatcgtgagctaccattgaacataaccctaattaataatgtagtataatttatatttaacccctttagttagctaatgtttctaagcatggctaagcaaacttacctatagaaccaatccaatatataaggttcatgctaatcaaattataacccataggaaaataaagtcatcttcggccattaattaactgggaaaggttcaccacccgatgacattcgaaaacaatgcatagttgaaataaaataatagctttaaacgggttcaacatgctcaaagggttgtttgggatctgtgtgacttgccttgggcttccgcaaacgcttcggaaccttcctcaacggaaacgctctcctccggaacgtcggaaactaaagcaattaaacaaaaatcaacaaaacagtaaaaaacaaacataaacagtacatgtggatatttttatcatgtagatcttgattttagaaaaatttagaaacttgaaccacctaaaacggatctacggttatttagttatgattttctgaagttttaatctattagaaaatcgggaaaaagaaaaagaaaaggagacgatgacgtcagccctaatgatgacgtcagccctggtgatgacgtcatgctgacgtcggcaatggcggccggctcgggttggagagctcgccggagctagggaggtcggccgcggaaacggagggcatctacgcgtagagggcatcgagacgaacccgatggtactcaccactacgacaaacgatgcacgacggcggccggcgacgagaaaaagcggcgcggcggctcgggtcgacggcggcgaaggggctccggtggtcggcggtgaaagaggaggggcggccgagcttcctctcaccacggcgcacctcttggcggcgacggcaagcggcggcaacggcggagacggcggcgcgacgtgaccgaagacggccgccggcgctacgaggcacgagagaggacgggagagggggcaaacggaagaggagaacaaggggaagctttatatggcattggatcgaagagatcgaactccaaacgagaggaatcgattcgggaagaaatcaaactcggttttagggataaaatcaaaacgaattcaattcggagagaatactcaacgattcgttttgattcttgggggaaaagaaagaggagaacgagaggaacaaaacccctaaatcaatcggactcgaggagaccggattggagcggatttggagggggaaaacggcggctcgggcggcttgcgcgacggcggccggaggttgaagacggccctgacatgtgggccccacatgtcagcggctggaggaggagggggcgggcggctcggcttgggccggcatgggccggttcggccgcgcggagagagagagagtattgggccgaattcggcccaatgaccaaagaaggggttttttgaacttttttaaataaaacaatttgtgaaatgttgtttcaattattaaaaatacttcccttgctcaaataattcccagaaaattctagaaaatagaggagcaagcatagtatttaataaaattttatctagctcatttttatgttgaaaattttcctagaaaattagggtttagcttgtaggcttttaaaatagtttctaaaaatgatttaaaatatgcatttttaatttagtcgatttttagggcgtgacacctgacaacaaagatttaaaggatgcaattctgaaagaagctcatgatactttatactccattcaccctggtagtaccaagatgtaccaggatctcaaggaaagattttggtgggcaagtatgaagcgtgaaatcgcagaatacgtagcagtatgtgatgtttgtcagcgagtcaaggcagaacatcagaaacccgccggtttgttgcagcctttgaagattcctgaatggaagtgggaagaaatcggtatggattttatcactggtctacccagaacgtcatcaggtcatgactctatttgggtgatagtcgacagacttaccaaagtggctcatttcatcccagtaaagacaacctattccggtagtcgcttagcggaattgtatatggcaaggattgtgtgtttgcatggcgtccctaagaagatagtgtctgatcgaggcagtcagtttacttcaaatttttggaagaaacttcaggaagagatgggttctaagctgaactttagtactgcttatcatccgcagacagacggacaaaccgaaagggtgaatcagattttggaagacatgttgagagcttgtgctttagatttcggtggaagttgggataagaatctaccttatgcagaattttcatacaacaacagttatcaagctagtctacagatggctccttacgaagcactgtatggtcggaagtgtcgcactccgcttctgtgggatcaaacgggagaacgtcaggttttcgggacggatatcctaagggaagcagaagaaaaggtaaagatcatccaagaaagattacgtgtggctcagtctcgacataagagttatgccgacaatcgccgtagagatttgagttttgaagaaggagattatgtgtatcttcgtgtcacgcctcttcgaggggttcatcgtttccacaccaaaggaaaattggcaccgcgttttgtgggaccttataagattgtcagtagaagaggagaggttgcttatcagttggagttacctcaatctttggcaggagtccataatgtgttccatgtgtcgcagttgaagaagtgtttaagggtacctaccgaagaagctaatcttgaacagatagaagtccaagaggatttgacctatgttgagaaaccaatccgtatcttggaaacaaatgagagaagaaccaggaatcgagttatccgtttttgcaaagttcaatggagtaatcactcggaagaagaatcaacttgggaacgagaagatgaattgaagtcagctcatccgcatctgttcgccagttcttccgaatctcgaggacgagattctgtttaagggggtaggtttgtcacaccctaaaaattcaaaatatataaattgttgtttaaatggaatttctagaatttattttaaaagccttgaagagaaaatctaattttaattaataaattccaatataaaatggggccagataaaatttcattaaatactttgcttaattctataattcctagatttttctgggatttatttgagctaaggaagtatttttaataaatggaattgcatttaagaaataatttaaattgaaaaaggttttaaaaagtcctcttttggctttgggccgaaagtcggcccaaaacctctctctctctcctcggcccagtccggcccagtccgcagccgccgcgcgcgcgcgccctcgctgtcgctgacaggtaggtcccacctgtcaagcccgtcgtcttcctcgggccgaaaccctagtttcgcgccgccgccgccgctttccaatccggccgtccctttccttctccggccgaattgatagaggggaaatgatctccgggatctcctctaccttttctcctttggaatctttggctaaatcgttttggaaagcgtgtggattcgagtttgtctcggattcgttc

SEQ ID NO: 28374 - DNA, 11244 bp, Oryza sativa
ggttcggtttaagtacggatggataaatccattctgagagatgagcagcggccatagcacttggcccgttatgatgtgtatctacaacctcccccctggctatgcatgaagaggaagtacataatgatgccgattattattcaaggccccaagcaacctggtaacgacatcgacgtgtacctaagaccactggtcgaagatcttaaacaattgtggaagaaagaaggtgtccccgtgtgggacgaggacaaacaggaggagtttaacctacgagcgctgctgttcgtaaccatcaacgattggcctgcacttagcaacctatccggacagtccaacaaggggtacaaggcttgcactcactgtatggatgaaacagaaagtacgtatcttaagcactgtaggaaggttgtatacatgggtcatcgtcgattccttgcagcaaaccacccggtacggaagaaaggcaagcacttcgaacataaggccgaccaccgtacgaagcctaaacatcgcagcgggaaaacaatgtttgctatggttaaagatcttaaagtagtgttcggaaaggggcctggaagccagcatatagagagcgaagatggtcacgcggcgatgtggaaaaagaactctatattttgggagttaccatattgggaattcttggacgtacgccacgcaatcgacgtgatgcacctcactaagaacctttgcgtaaaccttcttggcttcctaggtgtatacggaaagtcgaaagatacactggaagcacgtaatgatctgaagcatatggaacaacgcggcgaccttcacccggaaccaaaggagaaaggaagccattacttgagtccagccagctacactcttagcaaggcagagaaggaaagtatgtttgaatgcttggagagcataaaggtaccgtctggatactccacgaatatcaagcgaataataagcacgaaggagaagaagttcacaaacctaaagtctcatgactgtcacgtgttgatgacacaactgctaccagttataataaggggtatccttccagacaatgtccgggcaacaataacaaagctatgtgcattcatgaacgcaatttcgcagaaggtcatcgatccggatagattagaagcccttcagaatgaagtggtgcaatgtctcgtcagttttgagttgatatttccaccttcatttttcaatataatgacgcatctgctttgtcaccttgtgaaagagatccgtattctcgggcctatgtacctacacaacatgtttcctttcaagaggtacatgggcgttctgaagaagtatgttcgtaaccgtgctcgtccagaggcaagcatcgccaagggttatggaacagaggaggtcatcgaattttgtgtagaatttatcgaagaccttcgcccaatcggggtacttgaatcacgccatgaagggagactacggggaaagggaactctcggaaggaaagcaataatgacggtagacaacaatttattctgtaaagcccatttcactgttctgcaacactcttcattggtagctccttacatcgaggagcacttggctctagttcgcgccaggaacatcggtaagtccgatgcatggattacacggcatcacattgatactttccccgcgtggctacgacaacatctcatgggtaacgagtcgatcaaccaacaacttgccttcctggcgaggggaccgtctgggtcgatcgcgacattccagggatatgacatcaatgggtacacattctacacgagagcccaagacatgaagagcacgaaccaaaacagctttgttcgtgtcgatgccatgggacacgatggaacaactgccacgtattacggtgccatcgaggacatatgggaacttgactatggtcctctcaaggttcctctgttccggtgccaatgggttaggttgactggtggaggcgtaatgattgatgacagtgggatgacaactgttgaccttaacaaggttggatactcggacgaaccttttgtccttgccaatgatgtaacgcaagtctttttcgtgaaggacatgtctagcaaaggaaagaagggcagagggcctgatgagcctaagcgtcaagtggttctcccaggcaaaagaaaaatcgtcggagttgaggacaagactgacgaggattacgatcagttggatgggtaaccccctttcacggtgacgattgaccctagcatcctcctatcaaatgaagacaccccttactcacgcagcgatcacaaggagggaacaatagtgaggagaaagtacgtgcggtcaaccgtcaccgccgatgtaatgccgtaattattgtgtacacgatgtaaactattttggatgtattgattatccatataaatcaattgatgtatggcatatgttaattacgcacgattattagaggtttcaacaagtttaaatcatgcatcatgcatgtggcatttacatatgttaattagagtttttagcatttaatttaatataattcctacgctaagtatatatgatgattacaatttttattaattttaaatcatgcagtatgtacatacatatcttaattagagtttttaccaatataataatatcattcatatatatgctaagtatatatatatattggaatttttattaattataagtcatatatttgcttattacgatttatccacttaatttattatagacaaaaataatttttcgaagtaattgtcattaatctttgtactttaaataatgttaatgcattaacttctattttataaacacatatgtaagcgaaaatcatatgcagtgctataatctttagtcccggttcttaaccctaaccgggtttaaaaagaatttcgaaatagcgggaaaagatatttactcccggttgttcacaacaaccgggagtaaagatccgggggtatatatattcccggtgcgccctcgtcttcttcaccaacacttagacgttttcggccgatcgatctctctcggcctctctccttcgccgccactgcctagggcaaatccccgcgccgacgccgccgtatctcgccgtcgtctcgagctcgtcgtcctcgccgccgcctccgcctcctccgctgccgccgcatctctggggtgagagccgccgtgtcacaccctaaaaattcaaaatatataaattgttgtttaaatggaatttctagaatttattttaaaagccttgaagagaaaatctaattttaattaataaattccaatataaaatggggccagataaaatttcattaaatactttgcttaattctataattcctagatttttctaggatttatttgagctaaggaagtatttttaataaatggaattgcatttaagaaataatttaaattgaaaaaggttttaaaaagtcctcttttggctttgggccgaaagtcggcccaaaacctctctctctctcctcggcccagtccggcccagtccgcagccgccgcgcgcgcgcgccctcgctgtcgctgacaggtgggtcccacctgtcaggcccgtcgtcttcctcgggccgaaaccctagttttgcgccgccgccgccgctttccaatccggccgtccctttccttctccggccgaattgatagaggggaaatgatctccgggatctcctctaccttttctcctttggaatctttggctaaatcgttttggaaagcgttggattcgagtttgtctcggattcgttcttcccgatctttccttcctcgccgccggccgccgtgggcctttgccgccgcctccgagcccctttaaaagcctccccggtgtctcctctacccgccgccacccttgccttcgcctctcgtcgtcggaatcattctagcgccgtgtgccctagctttgccgtcgccgccgccgctccagccgtgcgccgccgtcgtttcagccgtcgccgtcgctcgagaagaccaccgtcgtgctcgccaagtcgtcgccgtcctcgtccaccacttcgccgtcgccggagatcaccagagcagcatcgccgtcatcgacccgaaggtttccgccgcttcctcctcgtcgccgtcgccgcccgttggtcttccgccgccgttttggtcaccggtgagttcgccgcgttgtcctctccgtcttggtgccctccgtttgcgtcctagcgccgccgttcgccggcgagcgtgcgccgttcgagccgtctcctccgccgagccgccgccgctgtcggtgacgtcaccgctgacgtcatcggggtcgtccgccgtgagccgccgtggatccgatcgatctcggccgtccgttttggattggttcgatctcggccgtccgttcgtgtgaaccgccgcccgtgcgcccggtccaccgaaaccctagcctgctgacgcaataagccttcttttccttttcaaaaataattcattattgcgtcataattcaatttaaaccgatataagtgttttaatccgatttaatctttaaaaattcataactaattcatcttagctccgatttagttggttcaagtctctaaatttttctaaaattgagatctacacattaaaaatatccacatgtactgttcatgcttgtttatttgctgttttggtgattttgcttctttctgtttagattccgtcgtttccggagagtccgtttttgcagaagaagagtttgaagagttccaaggccagcaaggcaagtcacacagatcccaaacaaccctttgagcatgttgatcctatttaaagctattgtttctattcaactattgcatttattttcgaatgtcattgggtggaattaacctattctttgttatggcccttttgtacttgattacttcattccttgataccttgggctattacaatttgactagttgagctttatttatattggttcaactagatactagatataattgcttagtcctgcttagaaacattagctcactattgggataactatgactcactattatttaatgatggcttgatgatagttcacgatggtcaatcgtgattagttaattaattaatgtgccaactaaaacctggtaatggtgggttgtgagcacatggttttgatggtcgtgctcatgacaattaaggaccggttcacgagtttcggttgtgaaacattaaccgtgccaaccacaagccagcatgggcaacggctttatcttttgtatagcatggttcattgcggggcaccagactgagaagtggcggagataagcccacgggggtcgctggggagtccatgccttgtttaagggggtgattatgatccaggaaggtgcgctgcagtggattgtgttgtataaggggtattgtcacaactcctttccgaggtaccgtggtggtattgaggcacatggtgacatgatgtggggttgtgtcttgtgggtacagtggtacacctctgatcagagtaaaactattcgaatagccgtgcccgcggttatgggcgggtcgaacaatgtctttcgtgattagtttcacacctctcatcctgataacaaatgctataaatggtaacaatttgtttagctcctggtttggaatggtacattcctggtttggagatagaactgtgcagccgggatggttgttcagaatggttgggcctatacaacagggtatgttgtatagtgttggattaatattgtttaattactacttaactgttttattaaattctgaaatgtttgctaaatgctgcttttgcaaatggaaccctactatgccatcatttgttatcctgtgcacttgcatatttgctgcgtggcttgctgagtatgtcatatactcaccttgcaatcattcatcagaggaagagttctacaatgaggctgatggtgtggaggattaggtgtagccttggtcaagctgcctgtggagtggagccgtctgcgccgttcattttatttttccgctgcttagatctttattgattgagaggaactatctacctctgtaatgacattttatacgcttattaagtagagtaataattgtactctattatcaatttgttattgtgtgcctcggctgattcctggacgagggttcacacacatgtaagcgtttggaattttggatagaaattccgggcgtgacaagttggtatcagagcccccttgaccctaggttatgccaaatggttatccatagaagccctctaaaattattggaaaagtagaactgttctcctccctttctcttttaattaaaccaaactaatggcacaggcacttcatatttttttttaatggttctcattcaaaatttattccagtgttattagtaccgtacatctattactgtactaatggcttatttatcagcaaaagttttacaatattgttttatttaatcttgctgcaataaaataaagttagcatgttgattttataactttcttttatttcttttgaaacctgttattcaaaagtacaaaatttgtaaccttgtttccaactgttttaacttatcttgcaagtttggtttactttatttacttaccttttactttgaatttctaaactttgttcaaatcaatccaaaaacttgtgctattaattggataaatgtcttaactccctcctttcacttgtctttagatgccacgcttcaagcctgagtacctgtttggtgttgagggttttgtccaggagttgcgtacgatgtcctttgccattggatttgggactgcccctttttatgcccagattcttcatgatcgtcatgaagagaagtgccgagtcaaagtcaccttgaacagcaatagtgaagaggtcccctcagtaatgtttgaagctggaggaagaaactacatccatgcatgtcaggaggtggcaaggatcgccataggagagctccgcgatcgctacagtaatcagttggccgacactgagtatcgctaccatcctcgccaaccccagggaagtgaccgtggcagttaccttgagactgaaggaattgagaataacgctaccacaaggcatttggtcgagatgctgtgggctatggatgaaagtcgtgcggagactgtgttagcagctcaagatcgtgaagatcggaatcgtggtaagatttgcaagctagaagacaagatggatcgtttggagaaggaactagccgcattgaagggagaagcaccaccgcagaaggccaggattcgtctcaccgcaaggaagagagctctatttgtccctcgctaccaattggcgccaaaagttcgtgtggtggagaaagaagttgccccaaccttagcagatcctccggttatcatcataagtgatgatgaagaagaagaatccaagcgcaaccattccaagattgagtgggtagcaactcaagatgatgaagacgagccgaacgagccttcaatcgacctccgatgctcggaagaactagagtgatttgttaagtcgttgtcttagatcgttgtgataggttgtttgctttaagtttgcttgtgtgtgtctcgcgtgtgatttacatcagtggtgggatgtaagtgcatgcgtttgtttgcttttgagtgttaggaagttggtgagtttagtggtgtgagagtcttcagtttgtaataatgaaactcagttaagatcaataaaagttaaagtaattctctgtcctaagtagtttccctcggtttctcttcttatcctgtctatgccagatggtgaacactcgcagcaacgggaatggtcccaacaacctcaataacaacaatggagagaatcccactcttgctcaagttcttgctcaacagactcagcttatgaacatgatgatgcaacaacttcagaactagcagaaccagggaaataatcatgcacctccccagaataagttagcagaatttcttcgtgtgaggccgcctattttctctagcaccactaatcctgttgaagctggtgattggctgcatgccatagagaagaagttggatttgcttcagtgtactgatcaggagaaggtctcatttgcatcacaccagttgcatggccctgcctctgaatggtgggatcacttccgcctgaataggattactgctgaacctatcacttggcttgaattcaccgctgctttccgaaagacgcatataccatcaggagtagtgtctctcaagaagaaggagttcaggtcgcttacccagggatctcgctctgttacggagtatttgcacgagttcaatcgtctggctcgttatgctccagaagatgtgcgcaatgatgaagagcgccaagagaagttcttggaaggacttaatgatgagctttcttacccactcatgactggagattattctgatttccagaagttagtggataaggctattcgtcaggaggacaagtataatcgcatggagcagaagaaacgccggatggctcacttcaaggcacaacaggggagtaatcagaagccgcgtcttactttaggaccccagtctgtgccacaaggaggttcttcgtctgttgttcgtccgcagcgtcagttcttcaacaacaatgctggcaataacatccgtaatcaagtcccacgtcctgttgcagcctcgacacagcaacaacctgccaagagggagcaaggcagcaagcccgtggtgtgtttcaactgtggagacccaggacattatgctgacaagtgtccgaagccccgtcgcgtgaaggttgtccctgcccagagcaactctacagtacctgtgccaaaggcccgtgtcaatcatgttgctgctgcagaagctcaagatgctccagatgtgattttgggtacgttccttgttaactcagttcctgcaacagtgcttttcgattctggtgctacacattcattcttatctatgagttttgcgggaaatcatgggatggaagtagaagatcttagacgtcctttgatggttagtaccccaagtaatcaagcactctctttgcaacgtagcccctctgtcagaatagaaattaaaggagtaccatttctggccaatcttatcctgttagaatccaaagacctagatgtcatcctagggatggactggttagccagacataaaggtgtgatagactgtgctaacagaaaagtaactctcaccagcaatgatggtcgagttgtaactgttcatgcattgtcatctgagtctttaaggtcaagactgaaccagataactttggaagagattcctttagtccgggagtatcccgatgtgttcccagatgatttacctggtatgccgcctaaaagggatatagagttcagaatagatttggtacctggaacaactctgatccataagagaccttatagaatggcagccaatgagttggcagaagtcaagaggacagtggacgatttgcttctgaaaggatacatcagaccgagttcgtcaccatggggagctccggttatttttgtggaaaagaaagatcatacccagaggatgtgtgtggattatcgtgcactaaatgatgtgactatcaagaataagtatccactacccagaattgatgatttgtttgatcagcttaaaggtgccactgttttctccaagatagatcttcgatctgggtatcaccagttgagaatcaaagaggaagatatacctaagaccgcttttaccactaggtatggcatccacaacgtgttccacgtctctcagttgaagaaatgtttgagagttcctgaggaacaggcaagtccggatcacatcgaaattcaggaagatctgacgtatgtggagaagccgactcgtatcctcgaaaccagcgagagaaggaccagaaacaaagtaataagattctgcaaggttcagtggagccaccactcagaggaagaggccacttgggaaagagaagatgagttgaaggccacccacccgcacctcttcgccagctcttccgaatctcggggtcgagattccgtttaaggggggtaggtttgtcacgcccggaagtttccccttttgtttgctttaaaaattggctaaataaatcgtccgaagaaattatcttaattaacctagagctgaatccccagttaataaatgcaaataataatcggaatcggcatgtggaatttttcttggattctacatgtcaaaatatgttaacaggatttttagtggaattttcagagccttggaaataattttaaccaattaaaaatcaccaaagtgcaattttaatcccaggaaaaatcctttcttctttttctttttcctttttcctcctttttttcctcttcttgggccgtcggcccagtccatccctctcccgcggtccctcctccttgtgggccggcccaagccgcccctccctcctctctctcgggacgccgacaggtgggccccacctgtcggtcgtctcccacctccggccgctggagccgaagctccaaccgcccatgccgccgccgaatccgccgcgccgccgccttctccgctccacgtcgcgcctccactccgcgcccgcacctcgcgcccacgtcgccgccgattcccccgcatctcccggcccgcgcgcgcgctcgagagggcgggattcgatttcgaatccacctctctcactctctctcctccccacgtcgccggccaaatcggccacctccccggccacgtccgccccctcccgcacctataaatcgctccccgcgtcttcctctctcgtttttcgcactcgccgcgccttcccgtgcttcctatcgtcgccgcgccgctcgccccttgcgccgccgcctaccgccgtctccggccacgcgccgccgcctctatagccaccgccgtgccgcgcagtcgccgccgtcgcgctcaccgagcccgcccgcacctcggccaccattcggttgccgccaatcgtcgccgaagcgccgtttccctcgcacgccggtgagctctccatttccacccaactccggccggctgctctagccgccgtggtcgctctccctacccctaacccctctttgttttctcctagcgtgccgccgccgcccatccgcacctcggcatcgccggtcgtcgccgccgctttcttccttcgcgccggccgtcgtgctcatcggtgaggaatcccctctcccccttcctttttccccctctcccgtgtgcgccgccggccttcgcgcgtgtgccgtcgccttcagccgctgccgccgcctttcgacagtagccgccgcttcccgcaccgccggtcaccgccgtcggtggccgtgcctcgccgccgcctcgccttg

SEQ ID NO: 28375 - DNA, 1747 bp, Oryza sativa
gcgagaacgagaacgatcgaacgaagacaagcgagaacgagggaacgaacatgaatgagaacaagcgaacgaacgtgaatgagaacgagcgaacgaacgaggacgaacgttaacgtgaaatgcaatatatatatatatatatatatatatatatgttacttcgcatttattctaatacatctttttgtatcttgcagaaaagacgtgttgtcggagtcgtccgtcaagcctgagtggaagagctagccctagaaggaattggagcaggcaagtgacgtaataatataaatgattgttatatttgtaatgcaattaattaagattattagacctgtaattagacttatcatataagattgtgtagtgttctaatattatttgagttttaatataagattattttattgcaaattagacttagtatgacatatattattgactacggaattggtgtgactcctagcaattgactattgtagtcttaattagacttagcatatacgcacgaaacacttagcatatacatgactattttagtcttagcatgtaatattatttgagttttaatataagattactttatttgtaattagacttagtatgtaattattgactacggaattggtgcgacaagtagcaattgactattgtagtcttaattagacttagcatatacgcacgaaacacttagcatatacatgactattttagtcttagcatgtaatattatttgagttttaatataagattactttatttgtaattagacttagtatgtaattattgactacggaattggtgcgacaagtagcaattgactattgtagtcttaattagacttagcatatacgcacgaaacacttagcatatacatgactattttagtcttagcatgtaatattatttgagttttaatataagattattttatttgtaattaaacttagtatataattatttactagctagggttgtataatatacgtcacctagacttagcttatatcacgatttgtaattagacttagcacgtaaggttgtgtagggttctaatgtacgacatttacacttagcatacatgacttagattgttaaaacataaatgtctcgtaacttagcagatgtttcttgtatcaacagatggctgaccgcgatgaggaacagatattgtacgatacaatcgcggagggaagcagccagtactggaatgaagaagaggggaacgaggatccaaaccagtacttgaacgaggaagggaacgtggagagggatgtggaggggaaccaggaggaggaggctagtggtagtcaaccctccgttggacagaagagggcacgcgggcaacgaggtgcagcgaagaagcttgagggtcggcacatcataacggaagtggaagaagatggacgtcctagtgccccggccgaagccgccaagaactatgtacgtcacagcggttgggttgtgcgggataacgtgcctgtcagtacggtgtactggcgaagaacaagggcacgcggagatcatgagagctttgtcccagattcggagaaagagatgctgtggaccacaatgctcgagacattcacccttcctgcgggtacagaggacaaagtgaaaaggtggactctgaagaaaatggcagaacagtttcagagcttcaagggagatctgtaccagaagtatatactgaaggggcagacaccgaacttcgacacattcccaaagctaagggatcactgggacgagt

SEQ ID NO: 28376 - DNA, 11955 bp, Oryza sativa
caagggcaagctatgatggaaagaaacaaagaaaatgccggcaagaagaagtcccatcaccacttggggtcaggaggctatagtgtcgcgatgccgaagagggagcagatggaggctagcttgattgagaggggtatcgaaccggcaacagccaaatggccggaacgatcaaagttctggtactatgctcacggtggaacgctcaacccagctgatggctcactggtcttcggcgatcagatacgagaggctgcgcgacgactaacagatgcagtggaagcctcctctcagggcacgttccgaccagacagagatagggacgagctgacactcgccctgcagactccagagcatccaggacgaacacgagggaaaggggtgattccttggaagattggtttcaaggaggacatccacacgtacaggagtcggatgaggagcaagagagataccgaggcgaagattgcagacctagagttccgggtatcgagttacgaactcaacatgcaagaggaggtggcaaggaaggttgatgaacgcatggccgcacatcggtcccatgatccccagccgaccattcctcctgcaatggtgagcccgtcaggaaaccgtagcagctgcgcctcaacggggcaggtaggatcacagagcatggacgccatgcaaacacaggacgaatcgacctgtcccgttgatgacatcactcagcggacaccatgtgagctgcatattcctttcaagaacttatcaataaaggtaagatttagccatttcgctagttgctgcttatatatgttgattactaataaataatctctcacaacatgaaggtggcgtcgggcatggccatcccaacggacccttcaggtacttaccactgcaggccgattccagcaggatactcgaaggtcgaagttgagttggtcgaaggcgcgtacgaggacctcgagctggattaccctggaggagacggtgagacgcatctacgagacacatgccatgccattattttatggcgcaggcggtacatcatcctccctgggcgacaagcggcgtctcgtgcaccatctcctccggctccgccatctcctcctcaggatcctgcaccgtctcctcctcatgctccgccagcaccgtctccacctcaggctccagcatcgactcctcctcaggatcctgcaccgactcctcctcgtgctcctacacctactcccccgcaagctcctcttccggcaccttcaaagtcaagggcccccccaactccaccgcctgcccacacaagggcaacgaagaaggcgaaagttgacgccgccaagaacaaggacccggggtacgattgcacgcaagaggagcttgacgcttacgttgcatcagaagtcaagagacaattcaagcctcgaagtccagaaaagaagattcctatagaccccagtgtcaggaacttcttcaggggtatgtctgcatctgtcaaggaggccatcaagctatcggactatgagcgaacgctgaagaaagcatcttctggaaagtccaaaccagtccctcagcttggagagcaaccaaaccaggagatcgagccgttggtgaccggtaaagaaatgacgatagaacaatttattactgacaccggtctaactacggatcaattgctaggagtcgcaccaatcgaaaaggcggaagtgaaatacatgtatgaactcggtaaaccgcttgtcaagcctgagctgctgcagtccctacccacacaaatgtacaagttccatcagctgtacatggagatgagcgccaccggtagagagatgatcggagcgaggatcagggacacggacttcttgcaaggagatgacattctctggatcaatttcaggggaatctacgaactataccagctggacgccctcgacgtctctattatgagttgctggattttgtaagtatatcgttcagttagatttcttactatacgtctcctttaattaattaggtccttgtatataagtagactatagaaaataatatactcccttttatcgttgtagaatggagattcaaagggcccgacggcagagggttttcgatactggattcatcgaccctcggaaagtaaacgtcgcaatgctcgaccaatatccacaagaaacagaggacaatctcgtccatctcctgaaggcgcagcattacaagacgttcatactgttgccatacaacacagagttagtttaattttactgtcttcctacataccaaatttcattcccgtatgaacttgctaagtgtttcatatgtaatgcatcccacgcacattgcagattccactgggtgcttttactcttcgacctggatgcctgcaccgtcaacgtatatgactcaatggataaaaaagagtctacgtttgacaaggttttcgaacttatagacaggtaccgtcataagttcctttgttaattaagaaaatcttgttatgttaattgctactacaaatcatagctttaaactccatgtagggcttggtatcggttccgtcatttggtccgcggcaaatggagagaaagacttaggcggaagttcaaatttcctgtgagtacacatgctctgcatttatatttctccgattcaaatacatacaagtgtatattaattagatctctcgttgtttgtcatttatttgtagtgcgcaaagcaaaagcagggaactaacttgtgcggctattacgtgtgcgagtattgccactgccttgcaaaccaaatcatcaccacaagagagctcgaagtacgtacaaataaattcaaaatttcattacgtagcgatttcttgtttaattactaatcaatttcatacattcatatagtttattcgcatgagggataacctgaccacacacaaggaatttatcgcggcggttcaagaacaactcatgggattcatcaacgaagaaatccttgatcccaagggtgaattctactacgacggaaacacaattcaccggtccttagcttctgagctagcagcgagtactactacgtcgaaatcgttgctagctaggacatataatggattgtaattaatacatgactacatatgtttctatatacatgtgtacacattttctataatgtaaatatattttggtcatatatatatctatatacatatgcatttgcataacatatatatgtataaatacatatatattatgcatgtatatacatataatataatataatatatatatatatatatatatatatatatatatatatatatatatatatatatatatatatatatatatatatatatatatatatatatatatatatatatataaaccatgcagcaacaaggccatgcaaaaaaaaaaggtcagctcgatctttagtcccggttgataacaccaaccgggactaaagatcgatctttactcccggttatttcacccgggactaaagataacgatctttagtcccggattggtactcccggtttggaaaccgagactaaagggaggttacgaaccgagactacagagggtttctccaccagtggatgacgcggcctcgaggcggagcgatggcatggctcgacctcgacacggagcgatggcggtgcggccctcgaggtgaagttacaattcgaatctcccacctgtgcctatcgctggcacacaaatgcctccaatgagatcgctcatatgcctagtgcgcttctactactcctcgtgtgagacggatttcatccgaatataatttaacacagtataaaagaatgtgtgcgtgctacggtgtaactggcaaggggtttgcatgtattgtcggagaatgtgtgcatggtatcttgattaatgtgatttaaattgttcttttagtgtataaacttataaactccctccttccctaaatgtttgacaccgttgacttttttaaatatgtttgaccgttcgtcttattcaaaaaaaatttgtgaaatgtgtaaaactatatgtatatataaaagtatatttaatgattatcaaatgatagaaaaagaattaataattacttaaattttttgaataagatgaacggtcaaacatgttttaaaaagtcaacggcgttaaatattttgagatggagggagtatttggaaaggagggagtactatttaaggagtcaaagttgaatttttttctttttttcttttctttttctacttcggcggaggcacagagacgccaaggttgaggtattgggggctgaggctttgggctcgttctttttccccacgacgaacgggctccagccagcaggtctccaggtcccaggatgtgggcgacacgcagtgtatctgatggctaccaatcgccgtcaacgtggcctagcgagagggcaaagaatgaacagtcagcaccgggaaaacaatagtacggagtaggagtatatgatatgatgggagaatttaccaaattacaatgcatgtacatatagagtaccttttaccttgtaacctatactatgattttcttttattttcagttttgttcaatattagttaatcaagttacttaattagtttgctaattttgcttgcgtatatacacgaaagttaataaattacagtgcctgtgtgaacttttcacagtgtactccctccgtcaaaaaaaaaaaaaggcaaaccgcgggtttgcgtgccaacgtttgactgttcgtcttatatgaaatttttttataattagtattttcattgttgttagatgataaaacatgatgaatactttatgcgtgacttatctttttaattttttttcataattttttcaaataagacggacggtttggacacggaaaccagggtttgtctttttttgggacggggggagtatcctataacgtaaattttgcaatatatgacagtaattatttaaaattattttttctctcaattaaattcaaattcacactatatatttttaatatatgattatttgtaccctcaaaagaatatatgattatttgttattagtcatctgtgctttggaaatttgatcgcgttttaaccaaaaatatggcacatgatgaaatactgttagttccctttatcttgtgcgttggttttctcatccgagggcaaaaataattcgagcgatctaggttgaaaaaatgggccggctcccacccctgaatgcttcttggattttttttttcttttttgaactctctacgcgtcattttttcgatccgtcgaacagtgaattgcactctgatctatcttttatcatcaaagtttttctttgaatcatcttttaacatatcattttcactataagctaaataagattatatttgttatacattttagaccaccctaattttcttttctagttgtatctatcttctcatctagcaaaggacgattcaagtgtaagtcgaaaaaatcgccggtgtgcaagatgtgatgtgcttaaggtattaatgtgttcgagaaaatattttggataatttaaagtgtaacaaaggcgaaacaatctagaataaattgaaaagtttggttcaaattaaaattttagtaacaaaatgttatgtaaaatgcaattcactctgaaaacaatgcggttagcattaacaaccgttcagctcttaaaaaaacaagaaaacagaatccaagaagcgttcagtggtgggagccggcagctgtttctgcgatccgcctgtttaggtcctcgctgtccaccaaaaccggcgtgtcgtcgactcatggcttttgactgattttggcagcttgcaaagcccaaacagaacttgtactcttctagctgctctatctgaacttctcatcaaacacactgcaaacattacggtatctcttgcgttgatgtcttggtgatcgacaggatgcaaggtttggttcttggtcgaatcatttcagaatttaaattcggattttgattcttgttttgatgtttgcaattggacggtgaaccagtcgttttgatggtttctttctgctttcaggggaacaccatgaccatgtccctgtctacgagtcaggcaccgaggtgagaatctgaacaccaactcagattcgtctaaattttttttaatctttttccagtaagaaaagtaatgttcttgtagagataattagagcagagcacatcaacctcatgctgtgatgattctatgagtcctgaatattttctttcaggtgttccaaaagcttcaggagaaatggaattccaccaagcacaagcgataccgcgcgatgtactccagcgtcgtcggcggaatcatcctcgatccatcgatgatggtcatccccatcgacgatcacatggtccacagaggccatggcgtcttcgacaccgccatgctttccgacgggttaagcttcgtcctctgaacttttatctgaacatttgcttctgatgatgatttgaactttcataatacacgagctggttcttgatttgatcatcagacacatgcaaattcgctcatttggtactgaattttcagtggttcttgatttgatcaggtacctgtatgagctggattcgcacttggatcggctgctgctatctgcatccaaagcaaagatcagctccccattctcccgcgaaacacttcgcgccattttggtgcagatgacggctgcgtccaagtgcaggaatggctcgatcaagtactggctcagcgccggccccggcgacttcctcctctcgccaaagggctgcactgcgccggcgttctacgccgtcgtcatcgcgtccgccgccgccgccgccgccggcgggcacccgcggctcagggagggcgtgagggcgatcacgtcgacggtgccgatgaaggacccgttcttcgcggcgatgaagagcgtcaactacctggcgaacgcgctggccatggcggaggcagaggagcgcggcgcgtacgcgtcggtgtgggtggacggcgacgggggcgtggcggagggcccgatgatgaacgtggcgttcgtcacgggcggcggcgacctggtggtgccggcgttcgacagggtcctcagcgggtgcacggcgaggcggctgctcgcgctggcgcccaggctggtggacgccggcgtgctcaggagcgtcggcgcggcgaggatctccgccgccgacgcgaggaggtgcgccgagatgatgttcgtcggcagcggcctcccgttgctgcccatcgtcgaatgggacggccagccggttggcgatggtaagtgatattcttcagaatcaaaatttagtataatttcgcttgaaaaattcatcaagcagattgaagcatctgaatatatgcaaattattctaattttacaacttgcaaggatgcagtactgactactttgatcatttgttttgctactatttcatagttttttagataatcagtgggaaataggagtacttgatagactaatctctgaattttttttgtttgttgaattgcaatcgaaagaattcaggatatcgagcctctggtggtgttaccctatatatctgcagctcatattcacagcatgttctataagctagcaattcatatttctcaaacaggctaacaattccaaattataaaggacaaaattcaataatctgttcaattttcattatgcaggtcaagtggggaaaattgcccttgccctatctgacatgctttgcgaagacatcaaggccggtctcgacagagtacttgttccttatgatcaagcgagctagacgacgactcatagagctttggaagatcaactttgtataataataataataatgtaatacttccatttatgtgaacgaaatttttccgtattatgagtggaggatccgtcacattgacagaattgaatatagacttattttataaaatcaagttctacgcttcattccaaaagctaaaattttcaccattaattcctaccaaactgggagaaaattatagaacggtcacccgattcaaagaaaagaaaaaagaaaaaatcggatgataaaatgtcgcaattgactaacaagtgaaacattgacttatatatggtgaaaaagaatcaacaactgcaacatttacaaaattaaagcatttaaaattttgtaaaacattgtgaaaacacaccttaaaaagggtcactatcatatatgaaacaatgagttttaacaatttgaacatatttttttattaaaatataaaggataatttcgttgttgcccatactttaatgtacaatattaattttgcccctattttttattttcgtttttacccctactgttttaaatgaatcaaccataaaacaaatcaaccatttacccatgttccgttaattcttgctaatagtgttaaatgtgggggtaaaaagacaagtatagtcttagatattttcctttacttttgacataatcaaaatacaaatctattgatgccatactatagcaatgatttaatttatcaaaaatttgtgaaagtttgccaaaatttgggttaaaattgaaagtggtgtacaaaagtaccaagaaaatatctaaggtatacttgtcatttttaccctacatttaacaccgttagcaataattaacagaataggggcaaacggctgtttcgttttaaaaaagtaggggcaaaaacgaaaacttaaaaacaggggcaaaaacaatattggacatcaaagtagggggcaagaacaaaattgcccaaaaatataatcatgtgatatttttgttgtaaagatttagttgcaaagaatataatggtgtgattgaatcatagatcggatatgtagtttagaagaaaaaaaatattttgaagatcactacacgtatgcatgcatgaatggaatggaggaaaaggaaaagggaaaatttggaaaaatatgacgtagtatggtaggagagagagtaagaacatgtagttgtgtaagttttgtaaaacacaataaaaacatacactgaaatatatcaccatagcatatgaaaactaagttttaactgtttaaaacatatatttttctttcactaaaatataatcatgcgatggtgtaatcgaatcgtagattggattattagtgtaggagaaaaacattttaaagattgatatttgtatatattgttggagcaaaggagtagtagtacagtagtacatgttttatttttattggagatgagctctcgaaaaagtttcttaggatcggtagaccgattagcattattgtgaacagtatgagtgaaaattctgcaaaattatgtgaaattcatgtattctggcggcttgtttggcaacttaagtgaaaatgattgtgagtttagatgagagaattgatggtgagattaatatgagaatttgatatttagtctcaatatcttgtttgatagatttggtgagaattgacatggagtttagttggaaactagatcttaaatgaaaacagatcgcgaatgcttgtaatcgcccgtctgaccaagatggaaaaatcggacaccacaccgatgcctcccacactatacttgctcagtctagaaaactttcgaatcagtccaccgatatgataaatttatcgggtgcttctacctgcaatcaactactctctcattccaaaagtctaagtcctatttctttttcatcaagaccaagaagcaattaattcattcactatgtgataaaaccaatgaacatacaaccaataagcattaaaatggcttattgggttcctatcaagaatttaatttagcacatgaagactacaaatatgacttagatttttggaaaaactaaaaaataaaataggtcttagacttttggaagaagagagtaactgctaactcaattgtattaactattcatttcgaccatacatatgcatgtgtcaatcttcataatattttttctcctaaactacttatccgatctaaaattcgattacaccgttgtatttattgaattaaatctttataacaagatatcacatgattatattccgattaaaaccattagtacttcgtctttcatacgttatagcgacatgtttcagcgtctgtttttattgtgtttcacaaaattcacggaaatacttgccactgccctcccatctctctccacacatcaatgattgcatgcatgcattttagcgatttttaaaatgatttttcttctaaactacttatccaatctatgattcgattacaccgttatattcgttgtaattaaatctttacaagatgatatcgcacaattatattttgatgaaagaaaaatatatgtttcaatccgtaaaatctcattgtttcataagtgatagcgatatgtttcaacgtgtatcttcaccgtgttaaatctcattgtttcataagtgttagcgatatgtttcaacgtgtatctttaccgtgtttcataaaagttttaaatgtttcagctgctgtttttttaccgtaaataagttaatgtttcactcgttggtcaacttcaacatttgtttcactcgttggtcaactacaacatttgaccgtccgattttttttttttagagatcaggcgtttgatgggtagttttctccgaaaacagatgactgagatttgtttaggtaggataaaggtgaaattccctttcaattaccagcacattgaaaaaccaaatagaatcctatatccctctaacctttcaatcccttaaaaaagactcctatcaaccaaacacacccgggagagttgaaggcagcagaagtttttagcgggctaatcggcctgatttatgggcccaaatgaagcccactacgaccagccacacctcctcttcttctccgaactctcaagtctcaactcgtcccccggcaaaatcccccgtgctagggtttccgcaaccgcctccgctgctacccacccaacctgcattgcgacagcgacgcggcgcggccatggcgacggcggcgaagggcggagagaagccggcgctgaggaagccggtgttcgtcaaggtggaccagctcaagccgggcacctgcggccacaccctcaccgtcaaggtcgtcagcgctaaccccgttcctgcccgtggccgtgccggagggggcggcccggccgtcggatctcgccccgcgcgcatcgccgagtgcctcgtcggcgacgagaccggggtcatcgtcttcaccgcccgcaacgagcaaggtgatgttgcctttttgactttgcgtttctacgagtttatttgatttttgcaatgtttgttatttgttaaattttgcaatgtttgttattttgcggatctaacaagagccgtcaaatatgttttcagtttaataattagtgaattaccatcgctttttagagtcaactggataacatgttgactcatgactactacggagtacttgatatgaccaatcgcctgtagtcgaccaatccagactatgacattacgcaaattgacatttggaatatcacaagtattggtgagtcaccaaatattgatttgtagttgaccaaccttgcagcttcaggactcataggtggctgccattgcgcattttaagagaactctattcataccatagctagggttcgattcgagaaatgcaacaactcctcttcttttatctagtacggaacacgacaagagagagtgctctttccttcgaaaaataccaaactgttcagtcttttgaagaaatgagcaggtggagggtgggaaattttttgtatttcatggatttgggtcgaaaggtgttgtattgatggaaattttcttacgttttattcttaagagtcaacctggcagtaatcaatttagggaaacgggtgtatgaatagatgttagagaaaagtgagaagaaaatgggcatcacactacccttctgaccatgatagcgtaataaatcactcatgtggctatccttattgcagattgtcatttgctgcatcatcatacatgaaccttccgttagtggcataatttggctaatagtaaattcatgcgggcctaccaaa

SEQ ID NO: 28377 - DNA, 6554 bp, Oryza sativa
ttatattatgggacggagggagtactgttcagattgtaagtattggcaacttatattccctctcttgtctcaaacggagatggagggaggcactcatccttagcgtaaggacttccagtgtctggctcctttgggactgcctccacccaccagcagtgggaccctccttgccatgttcctactaacctttcctccagtgttttttctagatttgattttattttcttcaaaatcaaagccactagagagggagatgggcatgcacagtgagcaccagtacctagtactgttgtatagtgagcctgtccctcctctcatctccctcctgttcagctatgaacttttaaaggctgattatcagcttatcacctttctctgtcccagttacttgacttacttcatgtcttcaccagatgacggtggtggtagcaactgcttatttattgtctctttccccaactatttttttagatattatctcttattattgcctccctcatcgagggctttgatggatgcttgagcatactgtctaccaactggccatgttctggctagatatgagtgtcatccacaatgtcaactgatcaaactgaattcacgaagggaaaacactgccagggaaaatagccatgcaatgtcggctgctagagaaagcagtatagcacaaagaattagactgggaggaagagcattggaaagggaaaattgataaattctttcttcattgctctgcaatatcaactctatggcatgctttatagactagttgctagcactcagtaacaactcatatgaatagcaaagataattagccaactgacagataactgaactaactaacaactcaattatactcttctctataaccctaatctcccaattctgtggttgcatacatgggtcttggaggcattgatgttggtaatcgatcagatggttgggtatgccgaggtgttccatgccttggttagatgaatgctggagatttcaatcaaaacattcagcacaaaccagcaagcccagttgcttggtgttggtggtggtgattaccaaggactgacagcatgctttcaacgttggctcaagattcatcttttgtcttgtacttttagagactgctgtccctgttgtaatgtgctctctggtctgtgtgatgtgtgtacttgtgctgctattgttatcctagttccttttagggatctctctccccttgtttagttttaaaaacacttccattgtttctatggtctgattttgaggtttctctctaatttctacttggtcaagtatattgttgaacaacgtgtagtgggcctttggctgttaggcaaactagatctttttggcagtgtgggctgccgatttagtgttttcacattgcctattcctaggacacggtctaaattctctgtgtaggcctgtagggaaccttggtcatataattcttgtggctgcagtgcgcacagcctagattaatcataacttaatataactataaatggttagtatttactttggcagtatcgggtattaattgagtatttgagttagctacctaaaggataccttggctttatagctcattttaattaaaaggtggggatgaaaattcaagttgttctgaaattgatttatttgatataccatttggaactcgttccattcgtatggtgctcaacttttaatctctttcctttagtgttgggggtatgtataatgacctgaccctttcaggctgtatatttggacaaattccttttggcattccactcatgagaagttttccattcttattgttttctgaatttttagtgtctaatttgagacacatggttttttattcatttctcagcataccatagtaggcctttttaaccgttttaagggcaaatgaaaaaaaagttaacctctctttccaagaaagcctatcttttaaggcaaaatggaaaaaaaaagggtaccatctattttccaactccctctctacggtgtggtgtaagaacaaaaatagggttctgaaaaaaaagatattaaaagaaaaggttgactttcaaaatcaattttgtgtgtagcggaaaggagttgctgtttcttctttttcctatggaacatctactgataagaatatgaaattgttaatagcaagtaattattgccttgcatggtctaagtctatggatataccaaaaaaaacgcttatacaatttcatctacttggctgaaatgtggatcaaaattggtgtttttctcacttgcataagcacaagttaaaactaaatgctgaccttaacagatgctggacacttatcccttttttttccaaagtaattggatggcatgtattttggtgctacagaagtacttaaaagaacactaagatgaactacaattgcactgtataggggaagcagatttggagatttttcgtgcttttaaattttagtcactaatctctctttcgagatatgaagttttgaagtgcttgagctcatttttttgtgcttttggttctacttttgcagtggacatgctgatgccaggaaatacagcaatcttgcggaatgcgagaatcgatatgttcaagggctcaatgaggcttgctgtcgacaagtggggacgtgtggaggttacagagcctgccagtttcgccgtgaaagaagacaataacctatcgcttgttgagtatgaattggttaacgtgccagagtgattgttccatcaaagtttctactgctagcataaaaagggaatgccaaacttgtagtgatttttgtttaaaagatcgtaggaggggctatggcgttttgttaagagttctcaatcagtgaaattcatataaaatccttgtgtgtgcacccatcaagttgcttattctcgtgacctgataatcgtattgctgctagttgtgggtgtgattaccgaagctgcaggacaggcaagatgcaaatgcaaccgtctcagcaacaattttctccggcttttactctggtttatgaccaatactgtcgtgttacattacctaccgtctgcaagcaagcaggggtatgttactacagtagaatgacatgttagattgctactagtacttgctagtagttggctacagcatcttgctcatcctgcttagctgaaaggcagaagcaaccaagatcttaggccaaaaggcagtgaccagccagccggtagtgtacagcagctatgctcgtgaaacgcaattgtcacatccccttggcaaccaggcagaatagccaaagtttcttctcactcacggaagcatccatccaagtgcgcacgcgcacggtaaagaaggtacacgccatggacggaccatgtttccatgtaacattgtccgtgaagatgccattgccagccatcgtcttatactcttatgatgcgatcgatatatccgttgcaaatggagttatctgagggagcctttgtagcagagattggtaccacgatctactattttcatcctacggaggcggtaactagtcataccacaaattgtttggaagaaatttcaagcagaggtactccctccgtcgctaaatatttgacgccattgacttttttaaacatgtttgatcattcgtcttattcaaaaacttttgtgaaatatgtaaaattatatgtatacgtaaaaatatatttaacaatgaatcaaatgataggaaaataaataataattacttaattttttttaataagacaaacggtcaaaaatgtttaaaaaagttaacggcgtctaatatttagggacggagggagtaaaaattagaggagaaagccagccgaaaatatcatcaggatcagcttaattccatagcacgataacctgataagcatggatcgaagttggaatcggataaccccgatgaacagagcttagcttcgcccttgctaaaacaaccattttatggggaggttacttacactgatcatatcaattagctgaattctcctgaaatgtttacatacgcataaagttaaaatatatcgttgtagaatgtggttagcactgctattagagtttatgaattgagtacttctatgaacaaatgagatgtagtatgtttttttagataacgaaaaatattacatttccggtctctgcactattgcaaccggacataaatcacatcaataggactgtagggaagggacacatgtggcatgttcgtgatccactaaggtgaaggttcatagccccaaatccgcagccgctacagtctcatgatatcagattgacaaatatgtaagttcattgactagattgtgggtacttaccataccatgtccttatgacatatcactaaaacctgcaatttcacactaaattggaacttttctaatgagtaaagattactagggagactatgggtatcaggtgtgtatatgacccgtatatccgattactataggaggagaccataactatggtatttggaattgtatatgtcttagttgctagagttttcctatcggttatgccctgcccatgacggcgttggaagtggagcaggggatgagagagtagagaagatagatgggagtagatcggatcaattgcttgtgttattcataaatcagtagcccttaaataggcttacaatgaactgaattaccgctaatgaggaaacaactaattaacttaatcctatccatgcaagcgtgatcactgttccttgttcggcaattgcggagctaactcatgagccgtcgttctaagcgccgtcctctgccatcttcttgtgattattgcgttcgtagaccataccgaccataacaagtagaatattacttcttatcgagagagtttgaacctgtctaaacctttattcgtacaattcattcactttaagacctcatatgttacatcttttattattgtcgatatagaacatcgataattactctgctcggttcctaacttctttttttttacgatcgcttccatacgttaagttacacatagcttcgcccattgacgatgcacatccagaatggatgtagtggccggcttttaatcaattttatttttttaaagaaatacgtcttcttacgtcgagccaagattctactccatcctccaggaatgtcgctgatgacgataaacaaatcccttcatacactatggttgttagtggatcgaaatatattatgtgatccaaattccaagccgatacatcgtcggtttgtttgctgctcaccatctttatcttgcttgtggtttacgtggcgaccaggctacaacaaaaatggagatcgatcgagacccatgactcatcaatcaacttaacagtggatgcctgattttctcagtagttgatggaaaacccaaaacccagtcgccctctctgacaaggacaacctcccatgctggtcaccgacgcacttaagtgccctaatcattaggttcacactacgagaggaacccctttagcaatacatatatgtattgaaaaagtgaaaataaacattgctaggctctgtatcaacgcatttaatatgcgttgcctatgctactgttgctagcaccaataacaacacatacacaatcgttggtaacatgtaagcataaacgttgctagttagcaacaaagtaaatagttttcagccatacttgtatgcgttggcagtttcggtgatgaacaattctatataatccttgcaatggctataatcaagttgcaccaacactaataagtattgcaatataggcaactattcattccagcatgcctttgcacaattatcttgttgggttagaggcccgtaaactcaaatgatgtacacatgagaaaaaccaagtcattcataaaactaattgtaattaaagagaattttttgtattacatggaaaatcatcctcataagtcatgacattaaattttgttcagaacatcatgcacaaatgtaatctaaactatagaaaaaaaacatgcatatgaagttgccactatcattgccaccatcttccacattacagtcatcatcatattcacaagggatctttagatgacagttgtccaccttgcagtaaccatattgtcccagatcatgatccatttatcttgtcaacttgtaacagaaaaaaaaacaaccattgatacaacattggaagaaagaagaccacatctaaagaaattgagaaatagcaccgtacaaaaattgctggccacgcaatatcaagtcctacgacattgccaataattttgtagcctttgtatggcctgatcatctagctctgttccttatggatgattggatagaacacaaacaattgatatataaattaaatattgtgtattataaactaacaaaaaaagagttcagaaaaagttatctaaataatgctgatgtatattatttttagagaaattatggtaccgtagtacggataatccagactgaaaagaacacgctcttacacccatataagcaagcaagcaagcaagcagagagcaaaacagagcagagcaggttgtgagccagcactgcatcagcatgatgagcagtcgtcttttcaaacgcgcctgcctcctcct

SEQ ID NO: 28378 - DNA, 5010 bp, Oryza sativa
gccgccgccgccgctggctcgccggagtacggcgtgtgagtgacttttggtctcaccggagtaaaaaaatcacatcacatgcatgcgattgcacgagcagctgtggcggatcaacgagacgacgttcaactttcgggcgtcgagcggccggttcgtcggcgccgggagcgacggcggcgcggcggtggtggcggtggccgccgcgccggggccgtcggagacgttccaggtggtgcgcgacgacggcgacaagagccgggtgcggattagggcgccaaatgggcacttcttgcaggtaatttatttaattaattaattaatcagataagaaaccgtgcgcactgacattcataatggcacgcgtgtttatgtggaagaagcactgcctaagaggagctacaccattgtacttcttttttttcgcgattacacgaaagacacacataccagggttggaaatttcggaccgaaatttctcatttcagtcccctccaatacgatattacttcggctgaaattttttatttttttcataaattttggtaatatttattcaaattcaactaaattttgtttaaaatattagaaattttggaccgaaattttcgaaatttcggcatttcggcgaggcccgatcaaatcggcctaaccgataggattaaccctggcacatacacatatctggtatgaacgcatacgtaatttttaacatgctttagaaaaaggaatgtgccaaaccactgatctcactaaatatttatacaaacgcatttaggcgtgtagtgttgtggacatcaatgttcaaacttttacgtggaaaatcatatactcacgacttcatcatcacaccaattctacctttttttaatatgcttttttaaataatgcatatatcacggtgtgaagaggcagagagtttttttctattatctgaaatcttggtttcgtatattatctgaaatcttggcttcttacttaatagtggtcgtatttaaaaacttaacatccatgtactcaatttgattaacacactataaagttacatggtgaatactaggcatcaccctacttcatattaagtgaacatgtacaatgtggtgagtacatgctgttgtacaatgcccctcctattacaattacaattactccttgttaaacaacacgtgacatttcggttaatttggcagatagcattgggatctaactcagtgacagcagattactacggtgaaagcacaagttggggagacgatgacccatcagtatttgtagtaacaaaagttttggagctgcagggagagtaccagatttgcaatggctatggtacagccaaggctacaccaatactcagggtaagatatctcacaacccaagggccccacttgtcatgaaaataggcttatcttcttgttgatacatagctaatgaatcatgatatagcatatacttacttgtttccttaattatatgatttggaatggtccatacttcagggatatgtctgttttgttttttgttgtatctgatgtcaatgtctataggggagaggaaagaaacaagaaaacagtagtagcaagcaatcaatgcaaccgatatatagcccggtgtttactttgagtttggaagaaattgtacaaatcctgacatgcatgtgagagatcagtgatcacatatgagttgcaaattgcatctatgctatgattacctcttgtacaattccggtgggccaattacaggtggaatagtgtttatcttatctgaaaggacctgaaatttactaggcatgcaaacatgactccattctaaacttttttctttttgataatgaaatttaatccaatatccgtgtacatcatcataaactacagagaattgaagcactcctgtgcatcccaaatgtgtgaaggggtctgttcattactacttggcacttgcagaattcagagtaaaattttcacatacatatgctgagttcagcttgcttgaacgaaactatcttgtttttgtcttgcgttctgtcccgtcaaagattgccaatccaaacactatgatttggtcccaattttgttgtcataagtgaaagccgaggccttagcttgtgtgtctgaatgattgagggaaccaattcattaaatgattattggcactggtcctatatatgccaaacagtagcatgatttctttttctgaaatttagtaatagacccagcaaaatcaatgaaaatatgtttgcacgattatggttgctttgtactgatgaattgggatcattttcacttcagttttgtgaatcaattatatattattttctggcagaatcattggagcacatacatagtcgaagacgacttcaagttcatctcagcaagcgggttaacagcagtgcgaattccagttggatggtggattgcgagtgatcccaatcctccggctccatatgtcggaggatccctgcaaaccttggacaatgccttcaagtgggcagagtaagtcttcacaaaattaaatcacaattttgtagctttaaatcgactcaagtaaagtaaagatcaacaaatgttcagatcatgagctaatctgaacatttcagattgtgaattcgttgtaaggattgttatgaatattcagattgtgagctaatctcttgtatctgaatataggaagtacaagctgggcgttattattgatctccatgcggctcccgggtcgcagaacccatgggagcatagctcatccagagatggcacgcaggagtggggaacatctgatgctaacatcgcagagacagtgcaagtgatcgacttcctcgcatccaggtcagggttctcatctttcacaagggaaatttttctcaccagtgccaaaatcataatttaaattgttcaaacttttgtagtcactaaatatttatagatcatttctatgccagaagcaacacactttgagaattttcaaagcaaattggcagatttcattcagtaaaaagaaaaaaaaatccattctgaagtgatgagcatgttgatttacaatggacagaaatattcagagttctggaaatttcagatatttcagtccgaatcacaaaccttttcaaggtctgctactgaacagtgaacagtgaggcagatgttgtaagataatgaacagtaagccagatatcgctgccatgaatttccttagatatttcaggacagcagatctttcattagcatgtagtctagcagtgaatcaaaacatacagaactgcggaactttaagatgtttcagttcaattcgaatcacaattcgttgcatgatctgatactgaacagtaagccccattttgtcatgatgaatttcctcgtactgttttaattcaccttgacgtcaataggtacgcaaagagcccaagcctcctggcagtggagctgatgaatgaaccgtttgcaccccgtgccaccttggagagtctgatgaagtactaccatgatggatacaacgccgtcaggaaatactcatcgacggcttacgtcatcatgtcgaaccgtctgggaccgcatgatccaactgagtttcttcaatttgccaacggcttcccccgtgccgtcatcgatgtgcactactacacggtgttcaatgacctgttcaataacctgactgtgcagcagaacattgattttatcaaatcaaacttctcaagtgagctaaaaaatgtcacaacacaaaatggccctctcacctttgtgggtaagtaataattctttttgggtgaaaagagagctttattaattactcaagaaactggtataattattttgcattaggattcctaaaaatttctaaaataatggtagtaagcaatctaacataatatgagatatgttcttttcctgcaggagaatgggtggctgagtggagagtacccaatgcaacaaaggaagagtaccagagatatgcaaaggtgcagatggatgtttatgggcaggccacctttggatggtcctattggactctcaagaatgttaacaaccactggaatctagagtggatgatcaacaatggctacatctccttgaaaacctaacaactgacatgcctctagctgccattgttacgaggtactggctccgtcccaaaatataacaatctaatagacatagattagactttttctattaataaaaatctggatagaaagtatgcccagatttattataatataatatatctgggttgttatattctcgaatggagtagccaaattttttgagacgaataaattgggccacatagatcagtgagattttaccgtaatgggaagatgcaatgttttgttagaccacttgccacctcactttttagtatcagaatatactataactatttctgcttgacataagcgcataccatttgcacaagaagtttgataacacaactaagaattcatgggatgaaattatgaagaattcacaaggtatctactctagaaaaacggttcataaataacaaaactctgattaaagtacactgaggccatccaaatgtgaattatcataattacacatctgcatgtcttgtttccgggaacttaataaattaatctacggccgtagcttgaaatccatgctgaatatattcttggctttcttcaacttctcccaaggaaagccgtgaagaaaaaaaaagggtaaaaagaatgttttaacttcactctgtattatataattgatttattttggttaaattgctaatgcgcatcaatcagagactaccttatcttgacctgctgcaactttgttgcttttgctcgtaatgacttcataataccatctatcgctggtttcctggttgaacaggaaaattcagacaaattcattattccaattataaatccatatcatatccgtaactcaaataaattaacagaacttataaaaattgccccaaaaaaatgtctgatcaacatactctattttttggttcttcccttgtttttgctgatttgaggtgccacctaatgcttcctgtgtt

SEQ ID NO: 28379 - DNA, 29704 bp, Oryza sativa
atggtcgcctctcccttccttctcatgtcgcagagactgtatagcaaatttaatttgctcgatctcgagcttcagatcacgatattccttgtctagacgttcctcctgtatgatcgtaaagggtctttcctaccttaaaaggtagccaatgatgtgaggggcttctccactacgtatatgttaggtcccttgtttttctacaaccaatgtgagactattcaacacctccttatcacctaattaatcaaagaacacaacatagaagaaaaaaagaccgttaaataaatatcaagactaaaattatatacaataattacttatggtgggaaagcatctatcactgcaatgaatactcgatcatgcatatttgctaggagccaggaaacgtttagagcacagacaaatttaagtatgtgaccatatcgagtgtttgctattattgttctgttttcaatcaccataataacccagtactaaatatgtccactgaacttacagatatattcctgaaaccgtacttatgataaaatacctcaatgaaaccaatttattctagatgttcttgtcgtagtaatcatgatcaatgcaaattaagcataaaatgattaattatatatgcaaattaagtgtgcaaaggtaataatgcgtgccatatacatattggagaaactacttaagcgatgcgatgcgatgatactcacgtaagcgatgcgacgctacccaggtctaacacgctgaggacgagataatcactcaacgcagagaacggtttgctcatactgcttcaaatcatcctcttttaaaagtgaaaacaattaattaagtataacaagctttaaatcaccctctgttaaaagtgaaaacaaatattgagtataacaaatccaaataaatttagtacatgcaaaccattcatctcatcctcgatttaaataattcagaacaagtaattaagatctacaaatccaaaattagtctaaccaataagtcaataacataaacgttgcatggagaggctttattatgccggtggggacatggctactgaaactgctgaagagctgatactactccgtccatcataatatgatataattaaggcgtccacatattttaagatttcacctttaaaacattttgatattttacttgctataaattatattattggattgacatttgaatttactttcatatgattataattttgttattacaaaccttataatatatgaaaaattataagacaagaattagttttggagatcactgtatcaaggttgatcatgccttatattatgggatagagagagtataatccttctatacacaaatgattggcacatataagcaatttttatcacagctacttgccatggaaaaaaaaaatccagacatttttgtgagcttgtcataaagttagctgaataccgttgctgctttatatcctgttaactataaagaaccaagtattgtaagtattgatctgccagcagagtatctacttgtttcatcgaactattattctggcattcaaatatacttaactaatgtgtgattgtctattgtcgccccaattggacatttttgtgcataatttttgaagttgtcaatatgcctacgtcattgtcaattatctctgctgccttttgtttgatcggttaattattaacagtctcatccaatgcaggtaatctcgatgtctggaggatgttgcttatctctcttagattttacttctggttaaaaatgtcttgaaaggagccgtattcatgttgagttttcaagttgaactgctgcatggaagttctccgtagttttgatgtcgaatgtatgcaccacttatattaaattatgtcatatgaagtcagagttggaacttgtaagcttgatttgtcatgtttcacaacatctcgtatcatcgtatcaggtgaagtttcttctaagtggaaagctgtaacatcctgaaaattaactattttctaattatgcattatgccgattcttatgttttcaataaccttttgaacctaggaaaatataattagagagacctcctagaactaacttgcataaaatccctctccgatatttaacttctgttgtgtttttcatttaaaaatatatttggttaaattgaggtatttcttgatttggttttaaattaaaaccttctttcgatgcaattccttttattcaaatttagttcgaaaacccttttcatttgtatgaattatggtccaagaaaaccctccaaaccaactatgtgcaattctaactttaattggaattaattgtcgacccatcctttgattctcgatccaaatatccaaatcctttcttttaatctagccaccaatttaattcttgtggcttgattttcttctcggcacaataaatattattattgcaaatattatgaataattgctcttgtgttaagaaaatagattatatctttgtcatccaaatttcctattagcctcaaacaattttttgaaacccatgccatatattttgaggctaaaaccctacttatccttctccaattatcttcttcccaccttcctatttacacattcaattttattcatatatcccttaccctttcatttgagcgcatcaaataaattccattatatgctacctctaaaatattgcactcaaataattaggaaatctctctttggaaattatctccaaaataaattcatctcaaaggttagccacttaaatttcttccaaatattaatttggatttaaactccatccctcaattccctacacaaattagaaagccttcctattcatttgggccgaattttctctctcttccttcggcccagaccagcccaagtcggcccagcccctcccactcaagccgactccctgctcctcctcccgtgggcgcttccaggcgccgccaccgtgcgccattactgccgccgtgcacgactcagctaccgccgccgccatcttgccgtcgacgcgaaggaaccgccacccgacgtcagctacacttcattccgccgacgtcagcaactgggacgaaccgccatcgtcggccaataagaggacagagccggcgccgtcattcttttctccacgtcgctgcagccgtgtcctcatcgaccttcccctctaaaccgccatcagccaccgcctctcgccgcctataaatataaggcgagccctccccttttctccacacatcaacagagcctcgagctccctttctctctctccatccatggccgatcgtcgacgccgtcggtcgatctccccatccgtagctccacctctcctatcctcgcgccaccggcttcgcctccatccggcgagtccgtttttcccctttcccctcttcctccacctctaagtcaacccaccaccgccatcatccatgccggctcgaggtgagcccttgccgccgccgttccggctatatatctctccctctcggccagccaccgacctccccgggtgcgcgtcgctcgggaacacgcgtggccgctgccgtcgaggccgttcatccaccggagcatcgacgcccctcctctcccttctctctgtttgctcggctggaagagaaaaagaagcagaagaaggaaggaggaagaagaaagagaaaagaagaagagacaaataactgacaggtgggcccctgtacagtactatttcgtaatttccctatttaattcaaattctattctttagaagcccatatctcataaaccgtagatccgattccagtgaaacttagacctaaattcatctaaattcaaaatctacattttgatatcaaatttgctattttaagattttatttgaatttattcaaataccgtttgaatttatatttgacttttcaaatattttcttttatcccaattaccctttagcaactaaaaaactgccggttggaatttttacgccttccatggggacgatcgtggttttctatccccgatgtcgaaccgttggttgtaaagcccggcataaaccaaacccaaggtcgaagtgctgctcctagcaccccacgcttcgatgcgtatagcggtcggagcttcactattccatcgacccccacagcacgccgcacagttgttagctctcgggctctgtgtgatcctagctgctccgccgccacccacggttgttggagtaacacttccaccctattaaacctgcacccacctcctattccctcttgccgatatgctgtctgctgacaccggctagagaagacactaaatctagtcgttatgctgccaactctagcaacgactagcaaacaaccaaaccctagccgataccggattgctagtcaaatcccagttgtcatccaaattccatcccctctacaataccacctatccaccatactctcagccacctactttctgtctaccagaacctatacataaaatatatagcctggccgatatattgccctactccttagtcggcctaaatataaccaaaccctaggtataatcttacccaaacctaccatcagccaataccagtcacatatctactcaaccaattcaattatccactatactccctatccactaaccaatcaaagtctgcaaaatttgtgatatgctaccctgacccacatgtcattggctcatgtgggtcctacatgtcattgagatacgggtggcatatctcaaattttgcaaaattagggtggcatgattccaacaaaccctaaaatataggtgatcttagccacttaattccctctccaccccagctgccaactctttataactgtcacgcccagaaattcccgaatagaattccaagcagaatgtgcattaaaatccccgtccaggaccagccggggtacacaaacgacaatgttgacatacagatccacgtcttacaaacattgtaaaatcttacataaatgcagcggaaaacaaaagaaactggagctaagccttgactaaactgcagcgggaacaccactccacaggcatcctcgacggcacggacgaagcctactcctcggggaaaccttcatctgacacatacccgtcctctggggttgggaaaagtagagcaagactgagtactacccactgtactcagcaagtcataccggaataggggtatgatgcagggaattaacaaagaagagctaaagtggttcatttgcataaatactggcatttataaacaggaatttaatgcgaaaactgttgtaataattaagcagtattaaacatccgctgtccaacgctaacccacgttgcgacaggcccaaccatccacctaaactatccaagttcaacagattacactagggtgagactaatcacggggaatctggttgaccgcccataaccgcgggcacggctattcgaatagttttactctgatcagaggtgtacaactgtacccacaagacacagccccacgacacgtttccgtgcgccggcatgccaccacgacataccggaaagaggccgtgacaggacccttcgcataaccccctctagccaagcacaccacacctcaggtttcacccccgtccccagcgggcaacgggcagtcccctctcgtgcctaggtgaatccggaagcgacagaggccgtcgcagggcccgccccgctccatcacgcccacccttgcctggatgcgtcgactagaggaaagctacactacaagcccagccgttgcccacgctggcttgtggtaagtacgataagttcttccagggcatcccgcgaaccggtccttaactgccatgggtgcgaccagcaaaaccatgcacccacagcccaccatgtgattcattttaattaaccaacaccggagcggtggtattgatccaacattaccattagaaccaacagtctaatcattaatatgattttccccattgtgaactagttgaactaagcatggctaagcaattcctagtccaaactctaatcatgttataacccaagctaacaaaggagcatggtatcaaaatagcatggctgtaacaataggtaaccatcccatagtaatattgcaaaaccaatgcggtatttgaaagaaaacattaggacatttgcaatataggatcaatatgatcaagtgacaagcatgacttgccttgctctgctgctggaggaacctcggcgactatctcgaagtacaccggagcgtcggagggatcggaatctaacgacatacaaagcaaacattgcaaacaggctataagactactgaaacagggaacaaaaccatttttaatggattctacacatttttcttgatttactgagacttgaatgggattaaacggagctcggatgaattagttatgaattttagaagattcactttgtttattactataaccataatccttaaatactttattgcgcaataaattccagggctgacgtcagcacgggggagtgcggcgcctacatgcgggacccaccggtcagcgacccgggagagagaaaggggtggcggctcgcgggcccactggtcagtggcacggggaggagagagggcgccgacacgcgggacccacaggtcagtggcgcgggagagggaaaggaaggggcggcggcactcggcgcgacccggctcaagaccggccgaccggccgcggcgacggcgacggcgcgcgcgcgaacgggttgccggcgacggcacccggcggcggaggcgacgcaaaagcggcggcagcggacggtggcaacgacccaaagcgacggcgagcgcgggtggcggcgacgcacggggaaacggggaaggagaggagaggagatgcctcaccgagggtggccggcgcggaggaagacgatggcgaacggcgacggcaggccacgggaggcgacggcgacggcggacgagcttcggcgtgccctaaggaaggagaagagagggattagagagagggagatagatcccggcgatcggaaaccatggccgaaggcggcggtggagatggagctcacccgtgcgcgtggggatgagggctccggcgacgaacctcgacggaggaggggtggacgaggtggacctcggccgcgcgaagctaacggcgacgacggcgcaagacggcggcgagcctagcggcggctagcggcggccgaagtagcaaaaacggcggcggcggatggttgcacggcgcgggagcgatggggagctcgggagaggtcggcgaaatggggaaaaaacgagagggggtgccggcgatgcttaaataggggatgagggaaccggacgtggccggaagaggcgggattcgccggccgacgtgggggagtggggaggagagagaggcgggattcggttttcgaatcccggccatctcgggcgcgggcgcgagcgggagagagaggggaacgggcgcgggggatgcggcgcacgcgcgggcgtggtcgacgtggcccggggaaggcggagacgtgggcgcggcggcggttgcgggcgcggcggcggttgcgggcgcggcgggaggtgggagacgggcccgacaggtgggccccacctgtcggcgaccccgagagaggagggaggcgggcggcctgggctgggcctcggcctgcggccggcccagcaaggaggagggaaggaaaaagggaaatgggccgacggcccatttgacaaaaaggaggaaaaagaaaggaaaaaaaaagaaaaagaaaaggaaaaaggattttccctggaataaaaatattgcttgctcaattttaattggttaaaattatttctagagctctgaaaattccactaaaaatcctgttaatgaattttgacatgtagaactcaagaaaaattccacatgtccaatccgattattatttgcattactttattagggttttttttcctgatttcacctgcattttcttggggtcatttgtaaattcaatttttggcttgggaggaaaacttcggggtgtgacaataacccacacataaaatatcagcccagtaatccatataccctataaaagagataggctataccctaaatcctaaccgtcccaaccgtttatctctttctttctattttatggcttttattgaatttggttcttcctcttctgtagtagagtctattatattttggatgacaacctgtggtatttcaaggatcagataatcaggttgtctatctcggatttatttacgttggagcaaggcaagttattattcctcccctttgagcataattaattcctatattttatatctctattattccatgcattagacatacatgattttgaatgcataacctgaacatagtaaaccagatatatgctagctttgcttagccctgcctagttagattatgcataaaatttaatgaagttagattgggacagtacaatataaatggttgatttccgggtggctagtactgttccaaccgacataaaattgccaagtacatgtgaaaaacatacgagtacgaccacaattctcgtatgggtatagacctagctgattaagttatctagcaaaagtggtgcctttgtacagtggttctattttaagtcctcgcgcaggaggcaaatttatgtcgcgaagggcaattgcgatatttaccgaggcgcaggtaaatatatgagatttattgatgtcgacttgtttgtgaaccctgattgcgatgacatggtgtcatacaatcagttctctctaaagacctcgggaacgccagaactcctctcgctgctgataacgttacgttcagagcgtatggggactagagttcatggaacatgtaccactgatgttagtaaccaaaaagctttgccatgacaaggctaatgtgtttggcacgtcatggattgcgggtaaagcgtacatttactacagtaaagtataaatgaatctattcgaatagccgtgctcacggatttgagcattgggactcatatggtatttggttagaaacttaattccaaattttattaaatactgttgcatttaaaacattttaggctttcttcctctatattctttgctttctgcaagtaaacctagctttactcagatattaccatttcatgcattcattattgaatataatagattgccgagtacgttgtactcacccttgcttcaacccctttttcagtcattttggagtccttgctaaagttgggagttcaaacacataagttagtttcattctaacttaattcgcaaatatagattagatagatggtttaagtctatagtcaaacattagagttaagtcattctataggttttgctgtaatagttagccacagccttgtaaataccctattattttacataaagaaatctcctttgtagccttgcatgatcaaatgtatgcgatgaagatccagattgttgaacttgtatcaatctactgatccagggcttgatacagttttaatatgtcggttttcgaatcattagtttcgggacccgacaaaagctaaatcagatttgatgtaaactagcatggtcacgtatgttagaaaacgataggcacataaacgatgaagaacaatagatcaatcatagacgacacgagattttaatgtggaaaacactcctaaggcaggagaggaaaaacccacgggcgccagccagcaaatcttcactacatcggatgaggttacaaaaacgccgaacgacggcttacaagaagtatatataaggtgaaaccctaaagtatgacgatccataccgcttcgctccgtcccaagcctccggcaacggacctccacttcgctccgtctgaagtcgccttttatatgtgcaaatgaatttggatcacaactcaacaacgtactccctcaaaatatagcaatctttgcgattcaaatttgtcctaactagagctatctaggattgtaaaaggtgattattttggaacggaggaggtacgtctttggacattcagacgtgccacggaggcatggactgcgttcagacaagcagtgcaagtgcaactcttcccttcggccccagttatttttctgaacttctcgtttttagttaacactctttttaaattgttagatgatacgtttttggcaaaaagtttctttgtagacactgttaaaaaaataaatctattttttaattttataatagttaatacttaattaatcatatgctaatgagttttctcatttcgtgtgagctgaaaatatctctccaaaatcgagacaacaaatggggccaaattacaaagccctcaaatgggccttacacttgcgcagttgggtggtgaggctaatcgagtggcccagtccgatgaggtgggccgacaccatccattagtggcgcctccactgtgccatgcgaaacaagtggcccatcagcgattgcccttctccctgccgctcggaggcctggtgacagacggggaagatagggtagagaggaggaagaatgttgcctaccgcccttctagtttgtagtgaccgttgtccttctagttcgctgcactcactgcccctctctaagtaggcggccgtccctctcctttctattcgctgcccacccgttagccctccttgttggctacccctctccaagttagtatccacccttctccctgccgctcaaaggctagttgagaatatgagagatgctgaagagagggaaggagggagaaaaagagttggccgctgacatgtggggctcactcgttgcgtcagccaaaattgggtactatactatcttgaacctcacaccagttttgcatgttaaagaaatgtgttatatttggtattatggttcaaaaacataattcaaactcagcgtcaagatacgagagatgtaaaatgaacttattccatctacaaatggattatgttcttcaccacgcctgtcgacgggtgatacctgtagaccggatctatagggtattggggtacgtcggtactaggatctacacgatacgacatcaagcaaacaagaagacaaggattatactggttcaggcccctcgtaaggtaatagccctaatccaatttatatgggattaatatggaaaaccacatattacaataaagaacaactgatcccaagattactggcgagatccttgtcgagatggattcgacgagatctctcggcgagtaggcttcacgtcctctggcttgtaggttatggtggtgatttggcacaaagattcgatgatccacacccctcagagggtgtggcttttataccgtgaatcaccttagtctcctagtagaactcggagaccacggaccctgcacgatatagtacaaaccaaatccttttcgagtaggactctattatcaccttgcctgcaaggattatttccataatatcttgtaaattccctgatcatatacgaaacacattgtgtacaaagaggtataccgtatccgtgtattctataagtcgtaggatataaggtatgccttatccttaaccatgacagtagcccccgatttcaactcaaatgagtcctcgttgtcatcccagacttcacggacgatgttgtcatactcacgtggtcgttctcgataagaatcaagaagatatggagtttgcgacatcatcgaaagaagatcaacggtccacaaatgaatttgaattgaagtctaaaacaactgccaataacgggcctcagaaaatttcggcggcaatctctctcctttcctcgaaatgtgaaccgttcggtagtgctcctataaaacttgactctaggatccattttaggtccgtttgcctaaaaaatcctttcgccttcctgttcatcttgcttccaagaacccctaattccttttcttcttcctcgccaccccaagatcgccctcatggatttgggtaaatccactatcgacaccaccgggatgaagaagctgcaggtggagggctcgatccctggacgccaaaacctggagcgctcagaaggaggtactgaaccccaacccgccctagggcaagtcgtagttttagaagatttcgtccgttgtggttttttgcctcctccttccgaattcctcctcttgatcttgaacttttatggcctcagccttctacacttgaatcctagctccattgccttcttgagcatttttgcttatctttgcgaggcctacatcggtgtagtgcctttccttgatctttttcgttattattacgaactctgatggatggagccccatagaatctcaggatgctgtgggttccgcgtccgagatgggatgaaggcggaatatatccccttcaactgcccttcttctcagagcagctagaggtcaaagtggttctaccttcatgtagacgagctcgatcctgttctcgttgtcctagaagatcagcctgagcggtcttctgactagacttcaaaaccatccttgattccatccctccaggcttttttagacatagttagcgacctctgaaaacaagggttggccgggtatgaagttgctgtagactttatacgccgtcgtattcaaccgctctaagctcgtgctcaccctgtgtacgagtacatgggggatgaagacgtgacgcgcgtttctcagtggggtactcgttctcgcgatgtcgcatgctcttcagaaaatatcattgactccccctttactgactttcattgttcccttgtaggtttgaatgacgacatcgtgaaggcaagggtcgggcaagtcctgataagccctccctcaggttccacgcagctgccaacccccgtctgcgacctccccgtcgccgacaaagatgcagccatcaatgtaagtatcttctgcttgatctgtagcaaggacctcggttgccgctttgcactttccgctctttctattccttttcttgctagactctggtgtatccttgttggttgttttcttctcgtcgcccgtttttcctttcccatctttctgacggagggcgtcatctgcatgggcgcatctatccacgatctcgaacagcttgcgtgcgaaggtaattcgccttgttgccaactcttgggtggtgtagcgatcttggacacctgacttgaacgcacgaataacagaagcgtcggcgatttcagggatcgtattctggcattcattaaaacaccgaatatagtccctcaaagattcacccggattctgcattaaggcgtggaggttgtcctcgatcgcgtgtcgcttgtagttccctggaagttggcgacgaattgttgccacaggtcttcccatgacggagcgggagatgaattagccacgaatgagcaaatcctttcaacgtggctagcaagtagttcgcgagtacgttatcatatgccccagtggcataaagaaccgtggaatagatatcgaggaactcctcggggtctgtaatcccatcgtacttttctatcgccactggtcaaaatttctcgggccaccgtacttctcgcagtgttggggtgaacacccttcatccgcccccaggcaatagaggtggtcgatgtccgtgttgtcgtcgaggggcaccagccgaagatgatgatgacgatgacgatgaggggtcgctagggttaggcatgcggtcccaaggttggcgtccttgttgtcaatcccgccgggaatctggagagcacgaatctcggtgtcgtctgtcgtcatcgtgatcgtggcgacctcaaccgatgtcgccctgagctcgccgtccacgttcactgtcatcgcggtggctttggcgatcctcacgatctcggttctcgtctgagcggcctcctcaattgccatcattgttgcgtcgatgcggagaccggcgctgatgtcgatgggtatcatcttgatctcgtggttcccgctggcgcccgttcaagtgatcatgtatgtcatgattgccatgaggcggtggggtctgctgacgaggttcgcgtgcattgcggggattatggcctggatcacagctgggatgatcgctggtagcattgacaatgccgtcaacttccatagcgtctcctcgaggtggaggtcgaggaggttccaaagtcgttggtccagccgccaccgcagaagcgctattgagatttgccactgtggaccgtaatcgttgcacccactgatcgccgtcgtggtgtaggtctggatcgaaagggccttctatcaatatagaattgatgatgtccaagtgctgggtaggcgtacgggtatgatccggggctactcgagtacttgtaccttgctcctcaataacgttcactttgcgtggagtatgagatgttgaagactcttggtcctccaagctgtgaagaaccaagggtttgtgggggtcgatgtcgatgatccccacaaagcgatctggagttccctccgggccctgtccctctgcaacgtttcgagtttgaactcgtcgttgttggatctgagggcacggaggtttgactgtaataccccgagtttcgaattagtatatttcgggagatcttaaaacgaacgcgcaaaagttcagtttttaaaccgtttttcgaataggcgatcaggtaccgtggatgcgtagagctcactgagtagtgtaaaatagactataagtttatagtaatcggagtccgaacgaagtcctggggattgaaacgatgtgggccgttagatcttgtgttttagtctctttatataacttaaaaaaaaagaaaaaggaaaaaaaaggagagatcgctacagaagccctagccaccgctactccagcgccctggcgctgctgctgccattcctgtcaccgccgccgcttttgtgtcgccaccactgccccgaccattgccggtcgctgcagccatcatcctccatcacaaccggtggattctttcggttccgcttcttcccggtgaggtcttactgctgccaatctgatctagggctgttgcttgtttgcttgctgccgctactaaccttcccctgctgctgctgctgctggtggctggtactgcatcggtcagagaggagaagggtgcagagagcagaggaagcaggggaacaggaggaagaagggaaggtaaaggccgagtaattttggggatttcggtgacttcgcaactagtgggtttgtttcgaaattctagtatcctcgctgcaacagtacttttggttactccctagaagtataagattcgaatagaaattgattcgatagtcgcttgtgcaatttttgaggttcttgattatgggctgaaacagtattttaaaatctggcattaaacaggccattgtgattcaggttagttgtcctaaataaagtttgtattcatcatcaatatctttctaatggcgctggtttcactcaattccgataaatggtttgggagaaacaatagaaacagtactaggacaataattcgttttccataatctgggactttcataggcttaatctgatttttttcacccacatgaaagttgtagagaattttgtctagatgtctaaagtgatatcggttgctactttttgttaggtggattgtgaaatatgtatataacattgtatagggctagtataggtggttttgtgtggttgccagataaataccaaatttaggttttgatctttcataatgttttggacatgtatagttagtctcaacgattcctcgatagaggttttacttgtagctttactccacaggtgtggagggggtttcgccaggttgccgtcaaggttaaaggcaagtgcatgacgaactaactgtgtgattcatagattgtttgctctatctatttatgtccgatatatttttatgtgatatgtgatatgtgattgcttatattcagattgtttgtttacgccatatatatttcaactttatcttgtgtttacgatgttattcttatttcaatattccagattatggttctgtttaaataattcaagttccatgcttgacatggatgtttcaatttgtttctttgtttccggtttcaactattcatgttccatgcgagtcatggatgtgctatctagtttttattcaggttcctgtgggtaagcgctgatcacgcttactcggctttgctggcaaatgctaggatgtattcataattgtccgggatggaaactactatttcaattcatgtttgcccgggatgggaactactattttctttaacttggtgtttgaaatgtgtttcttttcaaagaaagaaagtgtcctgttcagactttattgccaataatgtgtatacatgttttctagttctatattgtgcttgctgagtgatctacatatttgtgttcatttattaggtctattcattatttgtgcattggagtaaatgaacattgatgtatgcatccatgcacacatgtatttataacccacatgcaatatcttgatttgctattggctaggaaatagtggggatggtgtatgcattgagtttgttgctagagtaaatatactatgagagagttattagcttttcttggtcttggtgtacctatgaaatatgtagatcaatttggaatggagggaatggagggagtattagttaagcaaattatgtaaaaaaaatgcactctagctctaaataaactaattaaaactagttagaccagagaatctgtacattcatcctcattcaccaaaaacctagatgaacttagctgacctaataatctttaggttaaaagattaagtaacttacatagaatatttccctagcttataaaatgtgaagtaaagttatataatatctaaaatcatgaactaaaattatattggttaacaaaattagtcattttatacatctcaaacaagatagaacatgatctggacattaaactccaaaaccatatacacatgaaacactatatgcctacaacacgttataatttgcaaaaatacctaaagaattcataataactctaaaaattatgaaaccaaatgtgttaaccttataaaacacatctcaacacctaagatggaacatgatctggacattaaactccaaaaccatatacacataaaacactatatgcctacaacacgttataatttgcaaaaatacctaaagaattcataataactctaaaaattatgaaaccaaatgtgttagtcttataaaacacatctcaacacctctgtgaagtcaagtttaataaaaaaaatcactttataaaagtattttacaacactgcctaataaaatcctaaattataccgatataatttataaaattcataactctcaaatggaatgagataaaatagaaattctttcacctaaattcatcctagaccagtacctatccaatgtgcacaaatcatgcattttagagcattttggattttcgcatatttcggtgtttaattgcataacgtgtactttatatagataattgcataacggtgaagaagtgaattaggagctaacatttccaggatcaaggcaagtgtttcctcccttttcctttgatcacattgaaacccatgatttgggagatgaaaatgtttgtttgcaaagatgcatgtgaatttagactatatcgatatttaaaacttggttatggtagctatgacctatttgctgcattccctaccttgaataattgtgatccttgctgtttgtacccctagaatggttagagtacatatcttgtgctcaaatggatttatatatgcaactactagcttagccatgcttagaagtatgcaaatgcttatttcatcaataattaaaatgtgattttactaagtgaacccttgctggaattaaaatgaaaatgatgattatttgcgaactaaaatgtgtaaaagtatggttgtgatttgagcagcaagtggtatgcatatggtgttagttgcatactgatagggggagagcttgctcaagtccgtaaggaccgaacttgtgtcaccaacttaaagttatccgtacatcgacatgtgctcttatgggggggccttagctgattaatctacctagcatctagccttgcattatggtaggccggtgtgtatgaattagtcgataatttataggaacttatttgcccccgaggtggtagtttaggtgactcagtctgtccaatacaccggtattgtgccacgtggtggagtccgttcgatattcgccatcacggcgttaagtttaaggcatgggcccgccacttaacggttctaggtattattcccagtatgcctaggatgggggaacacgtattgtgctggtgcaaggctagatactagtagtgtaaagacttcgttgtgatctctagaacgtactcaatgtgtagagtatggtagtgctttggccggcacaagacaaactagagtgttcatatcatgtgggtaaagctgtacaaactttgcagagttctctaaactaatcgattagccgtgctcacggtcaagagcgctttggtgaagtgtcataagtatagactctatattttaaaattgtgaacatgagacttcatttgaaattggataaaatgtgttgagtattatgagattgatgatatatatattatgacttgttgtcaaggatgacaacaagatatttgaatatgatggaattgtaatgattaaatgatgaaatttaaaacttgttttgttagttgaaattgttaaattcttttcaaatgaattgaaaataaaacctgctttatgctaaaattgaactacatatagccttcctttgagtatatgtcttacatgtagtatgttaggattgacttgtgcttgctagttgttaacgaccaaatttggtaaatcaagtgttggatctgaagacagaactacagcggatttggaaggaagttggcggttacagaaacagagtacaaatcggctgacaaccgaatcggctatggtgtacatcggctgagacagaatcggactaggatagccgatgtaaccggttccgatagagagaaggctggatcattgtcgaattcggttggtgtgcttcatgaggattgccacgtgcggattaagtctggaaaaggcaattatatctattaattaggatattttgttagtttccttattagataggagtcgtgtccgacaaggacatcttatgtaattctgggtataaaaaggacccggggtcgtgtaaatcaataacaatcagttcaataacaaattcggtgcatcgccaccttttactgttttctatttcgacgagttcttggtttcgagttgggctgcatcgactttgatctccagcaggaggtaacacttgtcgtggcggtttgtgttctcgggattagtgcttccatctttatgatactctaatcttgtttatgtaaatcgtctagttatcatatatgctatataatctagaccaacattgccatatgacctcatcggctagcattcgttgccagaaaacagccgatagggttatataccaatattgattcagattatatagtgtatctaccatctcaaaaaggctttcatcgacctgatcgtctagatattgtgtttcttttcatacttagtgctgcatcagttaggtttgatctactaagtcgtgtttagaattataatctctagcctatttatgattgctaatagagatagcatcggggtttcagccggtcttacctgatttggttatcttgttcacttgatatactaaatccgccctttatattgagatcttagcacaataaaatatattaagcttactattaatctgattaggttatcatggttttagattgatgtttgtttagtgtattttgttcatgataatatctttatataaagtagtattggagtattaccgataccgatacatgttaagtttgattaatcggttatgctatgaatatatataatttctgtcttaatgtatatttagacataagtgatttatactgtcttggcgccctatccgatctatcccaatcacttggtttaaacatattttgagatatggactatattctattaatatctacagccaattgattaaatttaatgcatattgcatcggcttaatgttcaatgatatgtcatcggcaagccagccgatcggctatcattgatggatttactttgttttctttctatgtctcaacctatgagcatgctaaccgatttctggcccaatgtggtgaagcatcggctactgatgctctaagagttaggttgtttcctttgtctttgtctggattggctttcacatggttttcttctttaccatacaattctgttcatagatgggccgatttggagaaacagtttcataaatacttctatagtggaattcatgagatgaaactatccgatccgacagccatcaagcaaaaacatgaagagtctgtccaagattacattcaaagattcagagatgttagaactagatgctatagcttggcctagccgatttggctttccagggcttattatcaccaatcaaagaaagattttcggctcaagactttgagagtttagcccacttggctcagaaaatagcagcacatgaacaaaggttccaagaagccaagaaagcattgaaaaaggtttattatatcagctcttatgtctctgaatctgaggacgaagaggatcctgaagtagcagcaaccgaatgggtgagaagcaaaaaggtggtctcatgtcaatgggtgaaaaattccggaaaggaagaaatatatgattttgacattaccaaggctgatagaatttttgatttgttacttcgggagaaacagattcagctgtcgcgtcccaaatcgactctaaaattcatcctcaaaattgtgcaaaagaataagtaaaattcaatgtgaaagcctccaacaattactcctcctccccttcttgggccggctcggcccattccctccctctctctctctctttccccccccggcccatcggctccccgcgcgcgcgcgcgccgctgacaggcgggcccgcccgccactctcgctgacgggtgggacccacctgtcatccccctcctctcgccgcgcccgccgccagcgcccgtgccctagcgccgccgccgccgcgaatcccgccgctcccgtccgccccgcgtgcaatcaagaggggggaattactccccgtaatctcctcccccgtttccccctctttcccctctctctctccctcggattcgttcgaatcaatcccgcgaagttcgccggcgcatctatggcggccgagatttccgcgcgccgtttcctctctccccggccgcgctctccccctctcgtcgctataaaaacgttgcccgtgctctcctcctccgtttccgccgttcgccgctcgctctcgccgtcgaaatcgtgctcgcgccgtgctcctctctctccgccgtcgccgccgagcttcgttccgccgtcgccgccgctccggacctcctcccgactcggcgacccctccgtccgcttcgccgcatcgccgtcgacctcgtccgccgctccgcttcgtccgccgaccgtcggagcgccgtcgccatcgtcatcccgagccgcgccgccgtcttcttcctctccgtccgccgttctcgtcgtcgccgttgtctcggggtgagccgaagaccgccgttcgccttcccccttccctcctctctctcgggtgccactccgccgcgccgttggtcgccggcggcgaccatcggggcgcgggtgcgcgccgctcccgtcggccgcgccggcgaggccgcctttgggcgcgccctcgcggctgccaagtgggcccggccgtcagccgcccgcgcccgcgggtgaggctgacgcgcgggacccacggcgccgaccgccgccagccgcgtgcgcccggtccaccgtggaccgagcggctgacgcgtgggccccacttcccgtggacccggtccgcgcgcccgcccctcggctgacgcaataatgggaatttttaattgaaaattaaatgaagaaattcgcaaatatccatttaaagagcatataaacttcaaatggccatatcttggccatttgaactcggaattggaccgttcaagtctctaatttttccttaagatgtaaagaacccatttttgtgctttgtttctgctgttatgtggagttatttagtgttaaagcctttttcttttccgtcggtcgtgtagacgctgcagcttcggaagatccgctcttcgttgaagtcgaagccgtcgattgggaaaacgagcaaggcaagacacatcatcttgatcatattgaatcccagtttataaaattatgttgatttaaattattgcattatcgctttatttaaattcccgcgttatcactgttttatttagccatgcctatttacctttgttatgaccatattattattgttattgttattattattaccttgttcaccctagacaaacaaaaccccaactagtggacactctctactcatagtaccactagtataattctaggtagatgcttcgcaagttaattaggcaacattaggtggttttacaactctagacttgggaaattctcatatcatttggacaccatggaatggttggcttatgttggaattggacacacacctctcttcctctttcaaaacccctaaaacctgttttcggtggggtttgggtgcatgccagttgtgggaagtagcaccccggccactataaggactaaagctcgggcctctgttgcaaagcactaccgtacttccacatgtctaatgggtaaggcttagtttgtggctcagtctagtcataaacaaaagtacacggattggagatggatgaagtcgggggtcgatggacattctccagggcaaatgaaggctacacgagctgcggcccggtagtcgagatgtcatacggcggagggttggtgcccaatgccaggggctcagttccgtctgcctgtcccgggggtcccggccgtaggcggaattgggtcggtactcttgtctaaggctaggatgggttggaaactatgtcacgtctttcgtctgtataccgtggtggtatgtggcacgtggttacacgtgaggaagatgtgtcttgtgggtaaagatgtacacctctgatcagagtaaatctattcgaatagccgagccctcggatatgggcaagcctagcaatgtacccaagtcagtgttataattcttaaaatttgctcaacaactaaaatgtggaatggttggcctgggttggcttaggacgagctgggacccagggtcgggttgccagttcggtctgaatcatcataggccttgggttaaggcaggttcgtgtgggttcacggccttgattaataacattgtttagttctaggatcgtgtttacaactagctttgagcaactaaattcctttaaatgctgtttactgcaactctaaccccttatgttataattcccttgtactcccttgcatttattttgcatttgtgggtgtgtcttgttgagtacggtggttgtactcagtcttgcttaattttcccaagcccagatgaggagttccctgaagatgaaggcttcggtgtctagctcgtgcctgccgtcaagtgcctgtggtcgtcgccctagtcttccgctgtttttcgttgtctttgagtgtgctgggccttcgttgcccatgtaataattttatatacgcttccgcttgttaaactctgatttgtatcaacttttggtgtaccttgcctcctgggacaaggattaatgcacgcacgtaaggaatgcccgttgggttatttccggtcgtgacaagttggtatcagagcctcctttgaccctaggacgagccgtagatcccaagccttagctatatttttaaaaataaaaatcctttattatttgtgaaaacccgctattctctctctgtcttgctgcttcatttatcgtcaaaatctgatcttttaaatgttgtttttcttttgtttttgtttatagatggccggcagcgttacccgtcgtggtttggacatgactggcttcgtcttggagctgcgaggcatgtgcgtggtcttggggtatccacatggagtggattaccaggccaggccgctcccggagcaggagggtgaggatgcagagcctcacgctggttgggaggtcactgcagtgatcctctccggctctcctgagcggacttcgctggcagtcactgcgggtggagattccttccccgccgcttgccagaacgccgctctcctcgccatcggcactcttcaccagcgctacccggacgagttgcagcactcgccctaccgctaccacccccgtcgcggaggagccagcgacctcgccaccttccgagacgccagctcggaggatgacgctaccgtcgtgcatctggcacgcatggtggaggcgtacgacgcggctcgtatcgacttccatcagatggtgcgtcgtggcatggtggagaacaacctgaagatcctggagctgcgccaagagaatctgcagctcaagaaggacctcgacgcgttggaggcgcagctgcatcagctcaaggtcgcccagggagagatctgccgccccaagcgtcgccgcgtctgccgcagccagaagatcaccgcccgcaagagcacctccaggcccgagcttgttcgtcagtccctggcgtggacttgcttcgtcgagacccctcgtgccgagcctgcgcccgtggttccccaggagggggaagcctccggcgttggtagctcggagggtgcgctgttgctcaccttccgccctggcccgtcgcagcggtagacgagcagttagtaggcctgcgcgtgtgtttttcttcgtttttcttcttgagttgtgtggggcatggttacaccggtgtgtggtgtaactatgtcggagcctgtcttattttgtttgcctaagcaacttgaacattaatgaaccaatttaatagcagtaataattttaagaataatagtagtcgtgggtggttagttttaatcgtcagctcttcttctctgtttgctggttctgtgtggggttttctgatggtgtcgaccaggagaaatgttaacaccggagaaggcaaccaacccgaaggcagcaaccccaacccccaaggcaacccacctccaccaccaccaccagacaccaacgccattctcaccccaaatcctcgcccagcaagccaacatgatgaatgctttcctccaccacctccaaaaatccgccacagcagaatgctcccccaccacctccccaacactccaaactcgccgaattcctccgcatccgtccacccaccttctctagctccaacaaccctgtggatgcgttggattggttgcatgccgtggggaagaagctagacacggtgcagtgcagcgacgaagagaaagtcatcttcgccgcccaccagctgcaggggcccgcatctctctggtgggaccacttccaggctacgcagccagagggacagccgattacttgggctcgcttcaccgccgccttccgaagaacccatgtgcccgctggagtcgtggctcttaagaaaagggaattccgggagttgaagcaaggcaaccgctccgtgatggagtatttgcatgagttcaacaatctagcccgttacgctccggaggatgtgcgggaagacgaggagaagcaagagaagttcttggcaggaatggaccctgagctgtctgttcgtctagtctctggagactacccggacttccaacgtctggtggacaagagcatccgcttggaagccaagcacaaggagctggaatcgcacaagcgccgcttggcgaacttccgcaatcagcagggtgctaaccagagggtccgctacaccaatccctacccagggggatcctcctcgcaacagcagcagcagcagcaacctcgctccgcgccccgacctcaattcgtggtgcgcgtcccacagcagcaacagcagcagaatcagcaagggactcgtgcgccccgtcctcctacgccagttgtgcagcccgttcaaggccgcagggacgcttcaggtccgcagcgtctgtgcttcaactacttcgagcccgggcactttgcggataaatgcccaaagccaaggcgtcagcaaggccaagcgcctccccgctccaacaacggtggcaaggacgtcatccgtggtcgtgtgaatcacgtgacggccgaggacgtgctgacaactcccgacgtcatcgttggtacgttcctcgtccattccatccctgctacaattttgttcgactctggagcttcccactcgtttatatctgtgccattcgtggggaaaaatcagttgggggtagaaaggcttagaaaccctctgctcatcaccacccctggcggggttatgacagcaaagtattatagccctgccgttcctatagaaattcaggggattccttttccttcggatctgattctgctagacacaaagaacttggatgtgatccttgggatgaattggctggcacaattccaaggagtcgtggattgcgcgagacgcactgtcaccctgtaccgaggaccagaacaaccggttgttttctttgcacctccaacctctgtcagaagttcagaactgcatcaggtaggtctgtcagaaatccccatagtcagagagttcggagacgtgtttccggaagaactacctggtatgccgcccaagcgagagattgagttccggatagatcttgctccaggaaccactcctctgcacaagcgaccctaccgtatggcagcaaatgagctagccgaagttaagaaacagttggaagaattgaaagaaaaggggtatatacgtccgagtacttccccatggggtgctcctgtgatttttgtagagaagaaagacaaaacgaaaaggatgtgcgttgactacagagctctcaatgaagtcaccatcaaaaacaagtaccctcttccccggatagatgatttgttcgatcagcttaaaggtgccactgtattctccaagattgatcttcgttccggatatcaccaattacgtattcgtgaagaagatattccgaagaccgcattcactacgcgatatggactatatgaattcacggtgatgtcgttcggcttgaccaatgctcctgccttcttcatgaacttaatgaataaagtgttcatggaatacttggataagtttgttgtggttttcattgacgacattctgatatactcacaatcagaggaagaccatcagcaccatctccgtctggtgttgggaaagttgcgggaacatcaattgtatgccaagcttagcaagtgtgagttctggttgtccgaagtcaaattcttggggcacgtgatatctgctaaaggagttgctgtggatcccgaaacagtgaccgccgtcaccgattggaagcaacccaagacagtcactcagattcgcagtttcttgggattggcaggatactaccggaggttcatcgagaacttctccaaaatcgctcgacccatgacacagttgttgaagaaagaagagaagtttgtgtggagcccgcaatgcgagaaggcgttccaaactctcaaagaaaagctggtttcctcgccagtgttaatcttgccggatactcgcaaggatttcatggtgtactgtgatgcttcgcgccaaggattggggtgcgtgctcatgcaggacggtcatgtggtagcctatgcttcacgtcagctacgacctcatgaaggcaactaccctacacatgacttggagttagcagcagtggttcatgctctaaaaatctggcggcactatctcattgggaaccgctgtgaaatatatactgatcacaagagcttgaaatacatcttcacccagtcggatctgaatcttcggcaaaggagatggttagaactcatcaaggattatgatgtgggaatacactatcatcctggtaaggccaacgtggttgccgacgctctaagtcgaaagagccattgcaacactctcaacgtccgaggcattccgcccgagcttaatcaacagatggaagccctgaacctaagcatagttggtcgcggattcttggccgcgttagaagcaaagcccaccttgctcgatcaaatccgcgaggctcagaagaatgatccggacatgcatggactcctcaagaatatgaaacaaggtaaagccgctggtttcacagaggatgaacacggaactctatggaacggaaagcgggtatgcgttccagatagcagagaacttaaacagctgatacttcgggaagctcacgaaagtccttattccattcacccgggcagtaccaagatgtacttagacttgaaggagaaatactggtgggtcagcatgaagcgggaaatcgcagagtttgtggctctatgtgatgtgtgccagcgtgtcaaggcagaacaccaacgaccggccggactcctccaacctctccaagtgccagaatggaaatgggatgaaattgggatggatttcatcaccggacttccaaaaaacccaaggtggatatgattctatatgggtaatagtggatcgattaaccaaggtggctcgattcattcctgtgaagaccacctatggagggaataaactagcggagctctacttcgctaggatcgtgagtctccacggtgttcccaagaaaatcgtgtctgataggggaagccaattcacctctcacttttggaagaagctccaagaagagctgggtactcggttgaatttcagcaccgcatatcacccgcagacagatggacagaccgagcgtctgaatcagattctagaagatatgctccgcgcatgtgtcctagatttcgggaagacttgggataagagtctcccctatgccgagttctcctacaataacagctatcaagccagcatacaaatggcaccttatgaagcgttgtacgggcgcaaatgccggacaccgctattgtgggaccaagttggggaaagccaagtgttcgggactgacatcctaagagaagccgaagctaaagtcagaatcattcgggaaaatctaaaggtggcacagtcccggcagaaaagttatgcagataaccgtcgccgtgatctggaattcgcagtggatgattttgtgtatcttcgggtcacgccattgcgaggtgtgcacaggtttcagacaaaagggaagctcgcacctcggtatgtgggtcccttccgtatcactgctcgacgcggagaagttgcttaccagctggagttgcccgcctccttgggcaacgtgcatgatgtgttccatgtgtcgcaactcaagaaatgtctccgagtgccatccgagcaggccgattcagagcaaattgaagttcgcgaagacttgacctatgtggagaggccagtgaaagttctggacaccatggagcgcaggaccaggaaccgagtaatccgtttttgcaaggtccagtggagcaatcacgccgaagaagaagctacttgggagcgcgaagacgagctgaaggcagcccatcccgatctcttcgccagttcttccgaatctcggggtcgagattccgtttaaggggggtaggtttgtcgcgtcccaaatcgactctaaaattcatcctcaaaattgtgcaaaagaataagtaaaattcaatgtgaaagcctccaacaattaaaatgtgcaaagataaaagtcaaatgaggcttggaggatttttgtatatttcctaaaagcctaaaatgcttaaataaattttagtggaattttcagagcacaaataataattgaaaagaaataaacaaagttaaaaaggttttataaaaagaaaatcctaaaaagaagtctttttcccctcctcctccccttcttgggcccgctcggcccattccctccctctctct

SEQ ID NO: 28380 - DNA, 10845 bp, Oryza sativa
gagccctcggatatgggcaagcctagcaatgtacccaagtcagtgttataattcttaaaatttgctcaacaactaaaatgtggaatggttggcctgggttggcttaggacgagctgggacccagggtcgggttgccagttcggtctgaatcatcataggccttgggttaaggcaggttcgtgtgggttcacggccttgattaataacattgtttagttctaggatcgtgtttacaactagctttgagcaactaaattcctttaaatgctgtttactgcaactctaaccccttatgttataattccattgtactcccttgcatttattttgcatttgtgggtgtgtcttgttgagtacggtggttgtactcagtcttgcttaattttcccaagcccagatgaggagttccctgaagatgaaggcttcggtgtctagctcgtgcctgccgtcaagtgcctgtggtcgtcgccctagtcttccgctgtttttcgttgtctttgagtgtgctgggccttcgttgcccatgtaataattttatatacgcttccgcttgttaaactctgatttgtatcaacttttggtgtaccttgcctcctgggacaaggattaatgcacgcacgtaaggaatgcccgttgggttatttctggtcgtgacatcagctccctactggtcatgtgattccatcggcagatgaattaggaaagaggaaatattgtaaatggcacaatacagtgtctcacagtaccaacgaatgcaaagtttttagacagtagattcagttggccattgagcaaggtaaaatcaaatttgatgattcaaagaagccgatgaaaattgatggtaacccttttcctgttaacatggtttacacaagtgggaagatagccgacagaaagaacaatcggcttgactctgtaagaatgattaataaatatcagaagagatatgatcgacaggaggagcaatatttcaaggatgatgacagttttgatccacattggagttgtgagtttttcatattttgctggaatgaagggatgaaattgccatcaatagaggattgcccaggttgcagtgatatagacaagagttattcagggaatcctagccgatttcatattagagaagatcagtttgtgcagaggaagttgcctgttcatcagaggttgggcccaattcatcaagattatttccaggaagaagttgctgaagaggttgcaaattcacaatggtgtccttctgggattttttctaagagtcagaagagaagggttcaaaggatgaggaatagggagcaatttcaagaaaatcaacatgatatgggtcatcggctgaaaagagcaaagacaaaacaaatctgcagtgttaaaagcaaagtggtatcagccgatgagattaaagccgatgaagcaaaaagattggctaaaggaaaggccattacttcttcatcggttaacatggtgtttgtgttacctgcagaatttggagttgatcaaagtaatacagatatcatggaagaatcctgtgctcaattgatttcgtcaccagaacaagctatctttgagaagccagaaggaacagagaattggcacctcaagccattgtatgttaagggatttgtcaatggcaagccgatgtctaaaatgttagttgatggtggagctgctgtaaaattgatgccatatgttacattcaagaaattgggtaggagtgcagatgatctcatcaagactaacatggttctcaaagattttggtggcaatcctttataggctaaaggagttttgaatgtagagttgacaatcggcagcaagactgttcctaccacattttttgtcatcgatgggaagggttcatatagcctgtcgcttggaagggattggattcatgctaattgttgtattccttcaaccatgcatcagagtttgattcaatggcaaggtgacaagattgaagtggttccgaccaacaggtcagtaaatgttgccaatgccgatttatctgtttgggagatggatggtattgattgtttatctggaaaaatttggcaaggagattatttgaaagtatttgattgtgatatacaaccagttggagatggagaaccccaattgttactttgaaggtgttgtggagggttcaaatttctacaccaaagacactgtagatgatctcgatggcaaattaggtcaaggtttcatgtcggctgatgatttagaagaagtggatattggtccgggagatagacctaggccgacatttatcagtaaaactttatcatccgaatttaggaccaagttgattgaattattgaaagaatacagagactgctttgcttgggaatattttgagatgccagggcttagtcgatcaaatgttgaacatcggctacccatcaaaccaggatatcggccatataaacaaccacctaggaggtgcaaagcagatatgtatgacgcaattaaagctgaaattactagattatatgatgctggttttattcgtccatgccgatatgctgagtgggtttccaatatagttctagttatcaagaaaaatggcagacttagggtttgaattgatttgagagacttgaataaagccacacctaaggatgaataccgaatgccagttgtcgatcaattggtagatgctgcttcaggacacaaagttataagtttcatggatggcaatgctggatataatcaaatctttatggcagaggaagacattcacaagactgcttttagatgtcctggtgcaatcggcttgtatgaatgggttgtcatgacttttgggttaaaaagtgctggagctacatatcagagagccatgaattatatttttcatgatctgatcggcttgttggttgagatatacattgatgatgtggtagtgaagtccaaggaagttgatgaccatatagccgatctaaggaaagtttttgagagaacaagaaaatatggcttaaaaatgaatcctacaaagtgttcttttggtgtatcggctggacaatttttaggttttcttgtacatgaggggggtattgaggtaccacaaaggagtatcattgctattcagaagatcaaacctccagaagataagaaacaattgcaatctttgattggcaagataaattttattagaagatttattttaatttgtctgggagattagagccatttacatccttgctaagacttaaagccgatcatgaatttgcatggggtgcagagcagcaagaggctttggatagtattaaagaatatctaagttcccctccagttctaatttccccacaaaaggggtgccttttaggttgtacttatcagctgatgagaagtcaatcggctcaattttgattcaagagtttgagggtaaagagagagcaatcttttatttaagcagaagacttttggatgcagagacaaggtattcctcagtggagaagttatgcttgtgcttatatttttcttgtacaaagttaaggcattatttgttatccaatgagtgcaccgtggtttgcaaagccgatgtagttaagtatattctatcggctccagtgttgaaagggagaattggcaaggggatttatgccttaacagaatttgatcgttgatacgagtcacctaaagctattaagggacatgctatagctgatttcattgttgaacacagaaatgattcaatcggctcagttgaaatagcaccttggacattgttctttgacggttctgtttgtactcatggttctggcattggcttggtcatcatatcaccaaagggggcaagttttgagtttgcttatactataaaaccttatgctacaaataatcaagctgaatatgaagcggttcttaacggtttgcaacttttgaaggaagttgaagctgaagctattgaaattatgggtgattctttattagtaattaatcaactagctagagaatatgagtgtaaaaatgattcattgatgatttatcatgagatgtgcaaagaattgatgagtgaatttcgactagtcacattgaaacatgtttcttgagagcaaaacatggaggctaatgatttggctcagggggcatcgggatataagccgatggtaaaagatgttgacatagaaattgctacaattacagccgatgattggagatatgatgtgttcaattatttgaagaatccttctcaatcggcttcaaggaaattaagatataaagctttaagatatgttttattggatgatgaactatattataggaccattgatgggatattgcttaaatgtctaagtgctgatagagctaaggttgtaatgggagaggtgcatgaaggtatttgtggtactcatcaatcggctcacaagatgaagtggttgcttagaagagttggatatttttggccaacaatgttggaggattgtttcagatattacaaaggatgtaaagattgtcaaaagttttgggcaattaaaagagcaccagcatcggctatgaatccaattattaaaccatggccgttcagaggttggggtattgatatgatcggccagattaatccaccttcaggtaaaggacataaatttatattggtggcaatcgattattttactaagagggtggaggcagtcccattgaaaaaagttgattcaggagatgcaattcaatttgttaaggaatatattatttaccgatttggtgttccacaaacaattacaaccgatcagggttctatctttgtgtcagatgagtttgttcaatttgcagagagtatggaaatcaaattgctaaattcttcaccatattatgcacaagccaatggacaagcagaagcatctaaataagagtttgatcaaattgataaagaggaagattgctgattttccaaggcaatggcataaccgattggctgaggcattgtggtcctataggatggcttgttatgggttaattcaagttcctccttataagttagtttatggacatgaagcagttttgccatgggaacgtgtcatcgcctcaagaaggattcaatcgcaagatgagctcacaaccgatgattatcataatctcatggtggatgagtcagaagatttggttcagtctagaatgcatgctttggagaaagtgacaagagataaggagataattgcacgacattataataaaaaggttgtgccaaaatcttttgaggaaggtgaattggtttggaagttgattctgccgattggtactcgtgataataaatttggcaagtggtcaccaaattgggaagggccttatagaatttataaatctgtctctaagggagcttacatgttgcaaggacttgatggagaaatttttggaagggctcttaatggaaagtatttgaaaaagtattatccaagtgtttggattaattcataattcggctatatcatgccgatacatgttagccgatgcgttgacatcgccttgagatggccgatatgagtaatatcgcccttagtcatttttacttattataatcggttgtgttctgaccctatttcttagccgattgtaattttgtgatgattgttatacattacaaaattagggggcaaacatatagttgaaaatatggattttcaaaaacaaatttatattacacaacagggagtttcatattacacaacttgttcagcctattacatgcttatgaatagccgatattgccctttgtctgatttgttctacctcttcaattgcttgggcatcggctgcatctgtgcctggaattggtttcacagtcttgttcagttcgactaagtgcttgattgaagacttcaacttggatttttgtgcttcaatggctctgggtagatctgcaagcttttgctcttctaaggctagctcagcattgcatccttcaagttcaactagcagttcaatttttctattttttagccgatctatgttgaattaaataggattgggtccagaaatcaatgcatcaagcttggctttttcttcattgatggattgccgatttgattggatggtagcttcaaggtcttttctttccctcctatcggctatcctttgtcttgctctctccagtttgtaccgatattgctcaaggaagactgctggagagatgacttcagctgcattatcagggatttgatcttgtatttcttcaaaccttgccctgattggaccacagtccacaactaaagcatctaaggagctctcaagccgatgtgctatgtctttgagtatggttttaagatcatcggctagaggagcttgtgctttgcttgacgtttcttcctcttcatccatgaactgcctaatgtcaaatgaaaacatatccgctaaggcctggaaaggggaaatgatgattttttagtcaatgaagatgcttggagtagccgatttttggttataagaattgtacaagtacttacagggatggcaggaatcggctgatcttcaatgtggtgactgcctctagccgatggagtatgctcgcttgtttcatgctggattggagttggagaatgaattggctaaaagttttgtgaagaaagaattgagttatcactaagtaactgagaattgaagaaaatttgaaataatatattgccgatggagatggtgctggtttctttctggcagctagcttctttttctgcaaataaaaggagttaaagtcaaaatcggcagagggaataagaagaaagatcaggttatagattcatacccgaggttgataagtcaaatgtattggagccggtggagttctttgaggagcaggggtgctagctggaggtgctttagctattgcttcacttgattcagtagctgcttcatcaatggcttcttcaattttctcttcatctaggaacttttccacctctgggtctatagtggccagatcatcggttgctacttttttctgtttctttgaggctctagtttttctagccgatggagtagcagccgatggtttggtccttttctttgtccctacttcataggggatcggctcacgtgtttgcctatgcagaagtgaagaagtttttggggcattatgtcacgcccagaaattcccgaatagaattccaagcagaatgtgcattagaacccccgtccaggaccggccggggtacacaaacgacaatgttgacatacagatccacgtcttacaaacattataaaagtcttacataaatgcagcggaaaaacaaaaggataactggagctaagcctggccttgaactgcagcggaaacaccactccacaggcatcctcgacggcacggacgaagcctactcctcggagaacccgccatcgaacacatactcaaactctggggttgggggaaaatagagcaagactgagtactatccactgtactcagcaagtcatactggaataggggtatgatgcagggatttaacaagggatagctatacaggttcatttgcataaatactggcatttataaacagaagttgaatgtgaaaacagttgtaataattaaccaatattaatcatccactgtccaacgttacaccacgttgcaacagacccaaccatccacctgtactatccaattccattaaactaaactaggatgtgactaatcacggtgaatctggttgactgcccataaccgcgggcacaactattcgaatagttttactctgatcagaggtgtaaaactgtacccacaagacacagccccacaacacgtttccgtgcaccgacatgccaccacgacatatcggaaagagactgtgacaggacccttcgcataaccccctctagccaagcacaccacacctcaggtttcacccccgtccccagcgggcgacgggcagtcccctctcgtgcctaggtgaatccggaagcgacagaggctgtcgcagggcccgccccgctccatcactcccacccttgcctggatgcgtcagctagagaaaagctatactacaagcccagccgttgcccacgctggcttgtggtaagtacgagttcttccagggtttcccgcgaaccggtccttacttgccatgggtgcgactggcagaaccatgcacccacagcccaccatgtgattcattttaattaaccaacaccaaagtggtggtactaatccaacattatcatatgaacctacagtctatattttaaatgagatttccccattgtgtgctagttgaactaagcatggctaagcaactcctagtccaaagtctattcatgttataacccgagctaacaaaggagcaaggtaccaaaatagcatggctgtaacaataggtaaacatcccatagtgttattgcaaaacaaatgcagtatttgaaggaaaacaatagaacatttgcaatgtaggatcaacatgatcaagtgacaagcatgacttgccttgctctactgctggaggaacctcggcgactatttcgaagtacaccggagcgtcggaagaaccggaatctagcgacatacaaggtaaacaatgcaaacaggctataggactactgaaacagagaacaaaaccatttttaatggattctacacatttttcttgatttactgagacttgaatgggcttaaacggagctcggatgaattagttatgaattttagaagattcactgtgtttattactataacaaaaagtccttaaataatttattgcgcaataattcccagggctgacgtcatcaggtgggcggcaccgacaggcgggtcccactggtcagtggctcgggagagaggggaaggggcgccggcacgcgggccccactcagcagcggctcaaaggggggcacggctggcaagcgggccccacggctccggctccatgagccgatgtaccggccaggcccggcaaggcatcaagccaggcccggcaaggcggcatgcgaccgccggcgacgccgagcggcggcgcgggcggcgggcggcggcgtgagcaacgacgactgaaagcgacggcgcacggggaaaaagggaaggaaaggaaggggagggagacctcaccggaggggcggcaacggccggcggcgggaaacgagggaggcggcgaagaccggcgatgccgaggtgtggacgagcgacggctgacacttaaggaaagagaggagaggaattagggcggaggaaaaccctcatggcgaccatccacgccggccggagtcggaggggagagagaactcaccggcgacgcgagggaaatggggtttcggtggaattccggcgacgcagagcggtggccgggaagggtcttgcggctgcgaagctaggggtggtggtggcttagcgcggcggcggctctggtgacggtggcacacggccggagtgcggcggtgggcggcggcgcaagtggcggcggcgcgagctcggtagggggcccgggatggagcggtgagagcggaaaacgagagaggagggcatgggtagcattttataggcggagggggaagcggacgtggccgggagacgctccaatttcgccggcgacgtgggggaggagagagagaaggtggggggattcaaaatcgaatcctgctccatacgagagcgggcgcggccggcagatcaggggagagagggcgcaacgatggcgtgggcgcggggggcgtgacgtgggctcgggtaaatcggcgaggatgggtgcggcgacggtggatacggaggggtggtgaccggcgcgggcggcgggaggttgggggaggacccgacaggtgggccccacctgtcggcgaccccgggagaggagggagtcggggcggcctggctgggcctcggcctgcggccggcccagcggggagggggaaaaggagagaatgggccggcggcccattcgaaaagggaaggggaaaaagaaaaagaaaaggaagaaaaggattttccctggaattaaaatattgcttgctcaattttaattggttaaaattatttctaggactctgaaaattccactaaaaatcctggtagtgaatttcaacatgtagaactcaagaaaaattccacatgccagattcgattattatttgtattactttcttagggttttctcttgatttacatcggcattttcttagggtcatttataaattaaattttaggcttgggaggtgaacttcagggtgacaaacctaccccccttaaacggaatctcggccccgagattcggaggagctggcgaagaggtgcggatgggcggctttcaactcatcttccctttcccaggttgcttcctcctctgaatggtgactccactgaactcggcaaaacctggtgaccttgtttctggttcttctttcgctggtatcaagtatacgaaccggcttctccacatatgtcaggtcctcctggatatcaatatgctccgagtcagcctgttcttcaggtactcttaagcacttctttagttgggacacgtggaacacgtcatggatgccgatcatattggatggaagttctagctgataagcaacttctccccttcgttccaagattttgtagggtcccacgaaacgtggtgccaacttgcctttggtttgaaaacggtgcaccccccggagcggagtgacacgaagatacacgtaatcccctgcttcaaaagtgagctcccttcggcggttatccgcgtagctcttctgtcgagactgggcaatcctcaacctttccttgatggttctgactttctcttctgcttccgctaatacctctatccctaacagttgacgctcgcctgtctgatcccaaaagagaggtgtgcggcacttccggccgtataaagcttcaaacggtgccatctgtagactggcttggtagctgttgttgtacgagaattccgcatatgg

SEQ ID NO: 28381 - DNA, 534 bp, Oryza sativa
aatttacatgcattttatgtcttagcttacaagggtcccgttgtcgatgtgtaggtttcgcccagttcgctatgatgcaggccgcccacttctcccaggctgcagggtcagcgtctcaggcagctgtgtcgacctcgcactcagcgcagttctggcagtacaccgggacttcgtcacaggcagccggcacgttgagtcagggtccaccactggaccatgctgggacctcgtcggaccgcttgctgccttccacctttctcttagacatcactgacttcgacttcgcttcaggctcgacagaggacgtcatcggcccctcacagttgggaggcgcaccgccggtgcagacgcaggatcaggcgcaggccactcctccgcgggacactcgtgctacccgtgctgtgccaccggatcgtttcacctactcctaggaccacgtgcgagcacaggcccggaggaccaagcgtggtcgcggcgcggggcagcgccagtagagcagtcttctctttgtttacttgcttcactttccagaac

SEQ ID NO: 28382 - DNA, 702 bp, Oryza sativa
ccatatagtgagtgcaagccttgtatcccttgtttgaccgtccatataggttactaagtgcaggccaacagttaatggcaacgaacagcaacgctcgtagattacattgctcctgtttatcctcatcccacacagggatgccttctttcctccacagcacttttagatctccaaccaatggttttaggtacacatcaatgtcgttaccaggttgcttcgggccttgaataatgatcggcatcaagatgtgcttccgcttcatgcatagccaaggaggaggttgtagatgcacatggtgacagaccacgtgctatggccgctgctcatctctccaaatggatccattccatccatacttaaactgaaccttacattcggtgcatactctccgaagtctttaaatgctctgtcgatatttcgtcactgcgacccgtcagcggggtgtctcagcatcctgtcttgttgaagttcttctgcgtgccaccacatcattctagcatgcgatttgttcctgaaataaatgtttcagccgtggtattatagggaaataccacatcaccttagcatgaactctcttcttcaaaggttgtccgtcaacatcacctggattatctcgtctaatcttgtattgtagtgctttgcaaaacgggcatgcttctaggtttcgtactcctcaccgcgatagaggatacaatcgttcgg

SEQ ID NO: 28383 - DNA, 507 bp, Oryza sativa
cactcacggtgaattgaagcagccacctcttcgtaggtccggtgttgcggtggtgtgccaacggctcgagcgggaggtgcggtgcgcgctgtaatagtgcgaaacgtgccgtcagatcgtcctgtcagtccacagccatggtcactggcccaacagcgtctcccgcgagcggtagccccaacaagtacgatacgtcctgtagggtaggggctatctcaccgcacggcaagtgaaaagtgtgcgtctctggcctccatcgatcgaccaaagctgctaggagggacctgtccacagtccatcgtctgggcgggtccgcgtcgccggccgcagcctccaccagccgacacatcggtaggaggccggcctcacgtagcctgcaataacaaattaatatgtaattataaaaaatattacagtgcaactaacttatagtaaaacactgttcgtacctctcgacaaaggagtcgtgaaccgtgagtagctcaccgcacgtccgtgcccggaacg

SEQ ID NO: 28384 - DNA, 546 bp, Oryza sativa
ggtactggttcctgaaattggttaaaacaaaagttgttggtatgaggccaaatgtgtgcctgatacatgataggcacgctggcattctgcgagcgatagaagagtttctgtttgggagcatggaacgaggataccctggtgtttgggacgatgtacagagtaggtggtgcatgcgtcatatgggagctaatttcttcaagcaattcaagaacaaggagctcatgaacatgttcaagaggctgtgcaatcagaaccaggagaaaaaattcaatgagctttggaagagattagatgagttgacagccaaatgcagtaatcagcgtgcagcggctacatcgactgccgttgatgacccttctcaagctcttggacctctcccaacagatagtccaactttggttagaagaactggattggagattcggaaattttcttagtggattctgcatgaaccaaaagagaaatgggccaaggtgtatgacaccggtggtgctagatatgtaataatgacaacaaatttggcagaagtttacaactgggtgatgc

SEQ ID NO: 28385 - DNA, 1460 bp, Oryza sativa
caagtattagagtagtaattaataacttagatgtggtgtctaggttagagattacctttgtttgttgtgtatcccacggatttgtcagaggtagacggcaggtggtgacagccctgaatcccgtcctagtaatcctccacgttcggatatatcatagacctatagccggaaccacgctagcagaccagcaggggtcggtgcctgaagcaacagagaggaaattaccgttaacttagcttagataattaaaacacatagaaagtcctctctagcctagcctgcctaccatcagttgttgtccttggatagtcttaaccttaggtagattacacacgttccttgagttcgatgtccttttggggtcacccgaaggttaagcgctacagcagtattccgtgcgcttgcggatttatctgtggtcgtaagaaataccaacaaacatgctcttgggtttgttgtccttggtcttctcttcaccattgtcttccttcttgcctctcccaagcttaggacaatgcgaatgaatgtgatcaagaccaccacattcaaagcaatgagctggaccatattttttcctgtacctaacattgttcatagcttgagaaatcttattagcagccaaagccaagtcctcgtcctcgaactgttcgagttgctcatcggacatggcatgaatcaaagcaaggacaatagaatttgatgaagaagcacctacatccaaagaagtcgatgaagaaaccaaagcgctagacttagaatcaactttatgagaaagaatattcatctcatgtgttttgagtttgtgtaaagcgaatccaaagtcaaagtagacatatcaacagactcttgaatagatgtgacttttatctcccaaatagacatatcaagaccattcaaaaagtggcgaaaatcctcagattgtgtatagttaatatcctaagcaaaatcaacatatcaaagatcactcaaaatcttattaaatctaccaagataatcatccaaagcttctccaggtttcatctcacattttatgtactcctttttgaaaagatctcgacgaagttctttaatgttggtagttccttgacgaaagtttttcaaagcactccaaatttcattggcagttttaagatgcgaaacacgataaaaatccgtacaaaaaatttcactcaaaagaatattgcgagctttgcaattgttattaaaataagttttcaaagcaatagtgtcaatctgttcaggaatcacatatggctgtgcaacttttttccaaacatcataatcctcagccataatgtatgattgcatcttatcacatcaataagcaaaatccgaaccatcgaaaacatggggcgtagtagtaaacttgttagctatggctaaagctctatatcggttaaaatccaaagaagaaaacaaggctctgataccacttgtagaatcaaatagcaagaactaag

SEQ ID NO: 28386 - DNA, 679 bp, Oryza sativa
ctatttgaggaataacaagtcaataaagcatatatatagagcatttatagatcaaaccatatgctagcatcgacattgcatattttcttaattcaagtatagaatttaagtgtcatgcatcatctcacttaaaagcaaaatctagatctcatgaaaagactagaatacatacaagctatgctagagacaaataaaccttcaaagtattgctagcatgcacaagaaaataccatatgcataaataaagctctcttttctcaatttttctcattggcatattattgcttgataaaaccatgaggtacaaactccccctcaaaccatgccaaaaggatgaattatgcccaattcaccacgaagaaaagcaaagcgattagaatccaaagatttagtgaaaatatcaacaatttgcaacttggtgtcaaaaaactacaattcaacatctcccttctcaacatgatgcctcaaaaagtgaaaacgaatatcaatgtgctttgtgcgtgagtgttgaccgagattcctagaaatattgatagcactagtattatcacaaaagagaggtactttctcaaaagtaagaccataatctttcaaagtagataaaagccaaagaatctatgaacaacaactagcagcagcaacatattcagattcagcagttgattgagcaacactagat

SEQ ID NO: 28387 - DNA, 694 bp, Oryza sativa
ccccagtggacatagaatctgctttacttcgtatgtcgtcttggacaatgtgttctcaacaagaagcatagtcttcaaaattcctaaaagatctatgaaactcttgtctgtccatccactacttgccttcaacttcattaggttcaaggtcgctgacaactttgtgtgttttgctttgcatccggcgtacagaagcgtctcggaatcactgaccaacctgctaaacttcatgaaatctctctcattctgggctgggtcttcaacgtcacgtaacatgtcttgtagcagatcgtgatccacatttcaccgcccaatggagaaggtataaacatgtcatgctcatcttcatcttcctgattatgcgcaccacttctgtctgttgctgcaccacttcctgattcttgctctccatgcttcacccaacatgtatagtccttcatgaatcctcgttgtatcagatgatcgtgtacaacctcttcgctatcaaacatattctcattcttgcaatctgcacatggacaacgcatgtaatcattgtttcttcttttcctatcctcccctgcggcgttcataaattttattacgccatttctgtactccggaaaatgacgtttcacagttgtcgcatacatccaacttcgatccattgctacaaaataaaaaaataaattagaggcccatattataatatcag

SEQ ID NO: 28388 - DNA, 2060 bp, Oryza sativa
gatcagagtttaaactattccaatagccgtacccgcggttatgggtgagttgagcaatgtttttcgtgattagtctcacactactctttaatggtaataatgtggtaattaatttaattcctggtttggaatggataattcctggtttggaggtttaatttgttcaactggggttggttgtacaaatgtggttgggcctatgcaacacgggtgtgttgtatggtgtttatttaatattgattaattatacaactgttttactattctcttaaatatttattaaatgctgtttgctgcaaatgaactgtattatgccatcctttgttatcctgtgcacttgcatatttgctgtgtggcttgttgagtatgttatatgctcattcttgcaatattcattcatcagaagaggagtacttcagtgaaggtgatgatctggaggattaggcttgttcttggttaagttgcctgtggagtggagtcgccatagctgttccgtagtttgttatagttttgttttccgctgcgtagaatgttatttgttttgagaggaactatctacctctgtaataattttaatttgcgaatattcaatagttaattatttgtactctattatcaatattgtcattgtgtgcctcggttgattcctggacgagggttaacacacatgtaagcgtttggaattttggatagaaattccgggcgtgacatcagggacacaaattctctcacctaaccatacagttccttgctcgtcctccaagaaaccgatagcttttcctcttctcatattcttcttaatttcttgaatatcaggatcattaatttgggcttctctaacttgatcaattagagtgggctttgcttctaaggctgcaacgaaacctctactgacaattcccaaatttaatctttcaaattccttgcataattccaatggcaactgtcgtccttctgtagcattgcaatagcctttcctgctaagagcgtctgctacaacattagcctttcctgggtgataatgaattctcatgtcataatccttaattaattccaaccatctcctttgtctcatgttcagatctggttgagtaaagatatactttaaactcttgtgatcggtatacacctccgtacgagtaccgaagagataatgacgccaaatcttcaacgcatgaactactgcagctaattcaagatcatgagtagggtagttcttctcatgcggacgtaactgacgagatgcataggcaaccaccttcccatcttgcatcagaacacaacctaacccaagtttagatgcatcgcaatacactcggaaacccttctttggatcaggcaaaatcaaaataggagctgatattaaacgactttttcaactcttgaaaactctgctcacattcttccgaccacttgtacttcacatctttctgaagcagtcggtgtcatgggcttagcaatcttggaaaaattctctataaaccttcgataatatcctgcgaggcctagaaaactgcgaatctctgaaactgtctttggttgcttccaattggttacggattccacgttactaggatcgacggcaactcctccggctgagatgacgtgaccaaggaatttcacttcagacaaccaaaattcacacttgctaaacttagcatacagttgatgttctcgtagcttctccaatgcaaggcgaagatgttcttcatgctcttctttggttcgggagtagataagaatatcatcaataaagaccaccacaaacatgtctaggtattccataaatactttattcatcaagttcatgaagaaagcaggagcattgataagtccaaaagacataactgtcacgcccagaaattctcgaaccagaatttctaagctgaatgtgcattaaatccctgtccaggaccagccagggtacacaaacgacaattgttgacatacagatccacgtcttacaaaaatagaaaggattacaaatgcagcggaaaagattaaagcgagctaaaccgggaagcttgacttcagcagcgagcggctccactccacaggca

SEQ ID NO: 28389 - DNA, 1165 bp, Oryza sativa
aggggtgagactaatcacggtgaatctggttgatcgcccataaccgcgggcacggctattagaatagttttactctggccagaggtgtacaactgtacccacaagacacgattccacacatgtcgccatgccccgaagtatcaccatgatactgcaaagggggaaatcgtgacaagaccctccacataaccctcccctaaccatccacaccacgctaaggtttcacccccacccctcaaaaggcagtgggcggtcccctcttgcgccgcggtgaatccggcagctggacaaccggacaccccggccgacccaactccatcacgcccaccctcgccaccggtgcctaggaaagggtcgagctatacttcagatcaagcagttacccactcccgcttgtggtaagcacggtaagtctcccagggtttcccgtgaaccggtccttaactgccatgggtgcgaccagcaaaaccatgcacccacagcccaccattcagtgtattctaattaactcacaccattgcggtggcaccaatctaaagctatgccaatagacaaagtctatgtaataatgtgatccccatttgtgtactagttgaactaagcatggctaagcatttcctaaaccaacatctagtcattttgatacccaggttatcaatggcatatggtaaacaataaatggctgagtaataggacccatcccacatgatattgtaaaagaatgcaacatttaatagaaatgcgggatatttgtaaattgggtacaatatgatcaaacgtattgcatgacttgccttgctctcgcactgatgagacctcagcaacgtcttcgagaaaccgcggatcgacgaaacggccgaaatctacgcgacaaacaaagcacacaagcaaaacatgctataagtctacagaaacaggaaacaaaaccatttttaatggattctttgcatttttcttgatttactgagacttgaatggacttaaacggagctcggatgaattacttatgaattttagaagataaactgtgtttttactaataaagaaaagtccttaatcactttattgcgcaataaagcccagggctgacgtcatccaagggggggggcggctgcgccgacaggcgggccccactggcagcggcacaaggggagagggagggggc

SEQ ID NO: 28390 - DNA, 758 bp, Oryza sativa
  unsure (1)..(758): unsure at all n locations
tgatgggnannnnnnttgaagtacagctctatgaacnacnncataatgtgtaagcgctaccctggaaaagacgggaaggctgcgctgttgacaggcggaccccacatgtcaactctaagggaccacggtggaccgagtacatagagacggtccacgggtcgacgaaagcggaccccgtgtgtcaaccgaggcgagtggccgcaaacggactccactagacaccacgcgggctacacacgtagaaaccatgcggctaccgagcgggcacattaacacggacaccacacgcacacacgaacgactaccgacaccggtacacgggtaccggggtcgacaaccgcacaatgggcacagggcgataccgaaaggacgaggagggacccttaccatcacgcgacaaggcgtggaatgacgacgacgaacgggcgcggcggagatggctcggggacgacggaggcgaacagcgaggggacgactttggcggcgattcttggacgaaagcgagacgcggccggcgcagggcttgacgacgcggagccgaggacgaagacgacgaggaggctacagcacacttgacgaaacgcgggcggcaaacgcaaacggcttgacggagggacgaacgccacgacgatcgggaacgacgagaggacgacgacgaccaaggccagtaaagaggcgacgatggcagccgacagcagttgcatagaggtgaggacggcgtgnaacacgccgctacaatgccgacgacggaagtggcg

SEQ ID NO: 28391 - DNA, 1274 bp, Oryza sativa
  unsure (1)..(1274): unsure at all n locations
aacaaagtggcaggtttggattttaaatcacctttttaattgggatgaagttgaggatttggagggtaaataacttgatttgaactacgattatgtttgttatttagagaagaaaggtgtgtccggttcctgctagtgttttcttatttttctcttatgaccctagtgtttcgatcttcttctatgatctgtatgtgcttaatgatctagtttgttatatcggtcagatgaagaaggtgggcacaaagacgttgacaacacagccgcccgcggcgacaatgatgatggcggcggcggcggtgacaacgatgatggcagccgtggcggcaacaacgatgatggcagtgacgacggcggtgccagcggcggcggagacggcgacaatgatgatggcggcggcggtgtcggtgcagcacacgccggcacaggtaatacacttaagtgtttttttttgctcagcttgtttactgaatgagcctttgcatgtagctatgcatgcacagtaccatgcaaaccatgagtaatcttgttgttgttgcttgatcgcggtcgatatataccatgagtaaacatgacaaaactatgcaaaccatgcaaatcatgactgcaatatatgcacgtactaagcatcatcaaccatgtctaggtatcaatatcaagaggaggaggcactaccctcctgatgtaaaacgaaccatatatgccaagttattagagaaatcaaatcctggcatgatgaaggagggagtgacaaagtcagttgctaatgaaatgggggtgccgttgagagatgtccaacgcgtatggcgacatatacagattggagatggaattgaagcttttgagtccaagaagaagaagtattgtggcacaaaaaacttccgtgtgatcctagtgtcatcaaagatgtgccgcttggacaacgccatagcatccgtgacctagcccaccgctttggttatggaaaagccccattgtttcggcttcgcaagaaggattgttacgcgccatcaaaaggcataatgttcaccccgacccgaatataacctgtaggnncgtgggcttatgtgctatacaagggcttgaatggttaagcaatatgggccccccctaactttcaaaaggggggttaccggcatttccgtggtcagaaattggtttttagggacaagggtttccaccattttttccttgggtaaggcgataggaaatcctaaagaaacgggggttctttggaaagggaatgtgtaaacgaaaccaaggtcctcccaggg

SEQ ID NO: 28392 - DNA, 1575 bp, Oryza sativa
  unsure (1)..(1575): unsure at all n locations
gcgcgcctttgagtgcgcatcgcattggacncnncncanattagnacacaatatcccctcgaccaattctataggcatggcctatcgcctgccttacaatagaagggtttttatgttttattgatgagaatttcacgcgatgccccaacaagtgtaatgccttcacaaaaccaatgttgttaaaatcgccaccttgaatttaaaaccataaaatcgtacaatcaagcacattttaattacaatcgtaaattcataaaatcatatgacaaaatcgagtctttgacaaccttgtacaacactccttcgttgatgcaaccattacattagcattgtgtttcatgtcattgaaggcctccacggcttcttgaaattttactaggacatttccactcatctacaggatctccttattttcggtccaattgaacattgtgctaagctggtccatgatgaaagacagttattcatgatattgactgagcatatgcactcactctttcatggcttcaccacaaatggacaatctccaagacaaaccttgtgatctccaagacaatctccaagacaagccatgcatatatatatgtttgtatatactatatacatacatatacaaattttattcataagtatgtatagcatacacatacatatatacgtacaaaagagatataggggtgatttgttgtcgtctagcgcgcaccacgcacggcgcacggttatccgcccatcagcaccccagaccgctcctcttctcgagcgaagaaccctagcgccgccgccctcttgatttccctccccgcacgtttcctccacaaattaattgccaaaattgtttccttacattgtgggcattatttcccctcttgaattgcattcgatcgagcctttaatcaccgtgggagacgcctgtttcctctctgccttcaatggctggtttcccacttcgccggtgccgatctccctgcctagcgccgttccttctccctagtggcttatataagcccgccggaggagtgtcctcgccagtgaccagtgaagacgccatcgtcttcttcctccaacagcgcatccaacctcaccggagtgccatcccgcaacgccgtcgctgccgccagcctcgcctcattgagatcttcctcgtccacgccttcaccaagatcagcaagcaccggacctccatcctcaccgtcaacccgagctacccacctctccttcttcgtcagccggaagtgattgtagctcaccggtggcagtgataatggcatgttgacatcagatctatgaccaatggaccggatgcaaacatggaagcactggtggagaaaccatctttggtcggtcggccgaaatccacaatagtcccggttccactaaaaactgggacatctttagtcccggatcaaaaggttagagctacttttttgatctttagtcccagttggtaacatcaaccaggactaaagatcatttttagtccccgtttaaaagacagcaagctgtgtcagacccctctgtatatttagtcacgggtggtaacacccacccgcactaaagatctatttntaggctcgg

SEQ ID NO: 28393 - DNA, 15687 bp, Oryza sativa
  unsure (1)..(15687): unsure at all n locations
cgcactggtgattgacattgcagctggcacattggcacatcatatacatcccacttgatttgggagaaaataaaaagaaaatggaccaaccgggactgcccctatcctctctttagtctcggttggtagcattaaccgggactaaagatccctctttttagtcccggttggttaccaactgggattaaagatcgatgtttactctcgattatttcacccgggacttaagccctgggactacaggggttataaaccgggagtaaagatgatttctctatcagtgaaggataccagtgaaggagaggatgactgttgtgaagaggagggaagctttattatttttggcatcttcacaatttttttctggattttctttcttattgaaaaattctagattcatcttattgaagaagataaaaatggattgaataagtcgaccttggaatcagggtaccttttctttaacatttatcattttcttttcgcgcggatgtttctagaattacctggatgttgctactctcttcattttcttgtgctccgttgatgcatgcacgtgggcagcgtttcccatggccaagcacagtgaggtttgttttaatcctaaaatccttaattaatttatcttaaaggttaactccaattaatcaacgataaactaaaaggcgacataatttatttatttatttagtaaaattaaaccttttccaattacaaagattttattaagttattttaggtaaataaacacggatgtgaattttcgagttcaggaaaattaaaaaacacgaaaaacgggagtaagatgcctcagtgctccatctctgtatctccaacccccaaaatgatggttgatccccataaccaaacatgatacgaaaatcatcccaagttaccaacgggcccgggaccatcccatcctatattttctctaaaccgaattcatgattattactccctctatttcgtattttaagtcgtttaactttttttcataaacaaattttgttatgtttgactaagtttatagaaaaatctagcaacatttattaattagttcgttaaatctaacattgaatatattttaacaatatatttgttttgggttcaaaacattaatatatttttctataaatttgatcgaattaattaaatgaagtttgactagagaaaaagtcaaacgtcttatataatatgaaacttaaaacttagagagtagaattatctgtgcgctattgtcaagagccataacaagtgggtctgatttaaaaccttatccaatccaaaacgtacacatctactccagcagtccagccccgtgttcagatctttgattcttgagagaaggcgtgcacgaacggatcggtttcactagaaaacggcgaaagggccctatcgaaaaaaaaagtagtagtagtccacagcccggcccaatacgcatcagattctaatcggagacgaaatccgagccgacttcgctctctggctctcgcaccgtcgcacgaatttgcctattatatctggctttttctgaatctgaaggggatcacacagcgaaggctccaagcacgcgcatgtctgacgagagacaggaggctgttgttgttgcggaagaagccgagcagacgaaggagatggagcgcgtgcgaggtaatagcagcagcagtaagcgctcagagcctgtggatcttgtcaaggaggaggaggaggatggggaggactggttcgatgcgttgttgagaaaactcggccaccccttcaccgtcgacgagaagggcaggtccgtcccagatcccgactggtgtccctacgcccacggagatcccagacacgtgctctatgttgataggagaaacacccccgacgtcgatatgttcgctttcattctcggacagatgtacgtatcctgatcctttctttctaagttcttgcttttattgatttgggttcataaacctctcgtttcatttacatatgctattaatcatgtttactctagctagctatagtattactttctgtcatagaatacaaggaagtatgaatttggtagtatgtcaataataagtgttctaacaaagccgggctggttggtatgatattatttggtttgctttttgtaaagtataaaagtcttactatataatcaaaaattggttgctttgtttatttttcttggcttacttataagccatagttgcaacaatgagacattgacgataataactatatcttggccgacgtatttaggataaggtcagtgatactattgtgttaatttgaaaactattgctggtcatgggcaatgggcactgctctagtagagctaactataaaaaccatcatacatatgaaatatgcaatgctcatacaatttatagcatttgcattactttttttttcttaaacaagctgacaataattcataagattatgtattctatagtttaaagttccatgcatgtttaattaattagtgtaactgccaattcgatatagtttacactttgctaattatgattactcttcgatgctagacctgtggatgatgctgatgacagggaaaagggcatctggaatgcttctatggtttacatgagagctcaaaacatggtaatgcatttagttagtgcttgggatacctttcttgaatttttatcatttcctttgtcaataataaaatcaatgtaatataatattggagtaaaaaagaaaaacggatatagcattcccaaaagatcgatcggattacatattgcattcactttgtgatagtgctcttacctgatttacccacaatgcaactaccaacatgtatatgcaattgatgctctttgaccagttgaccatagttagagaatttatgcaactgcaaactaatttaaattcttctacacatgcatgtcaaattattcagagtcatttgcgcatggaaagacacaagtcataagataatattattataaataagtcgagaaaatgttaagctattacatttctttttaccagatgctactacataaatttgcatttaatagcatttaaccattcaaaagtcaacttcttttgacatgctttaatttggtgaactagcaaaggtaaaagagaagccacattatttagttcatctggggcaatatcattgcttgaagtccataaaactttttggggaactatttcttctggatagagtatgtcctattatgttccttaggatttttagtgtgtttcatctagttatgacttatcagaagacaaggtccaagaaaataattccagaaaaaattctcctaatggtggtgctagctccactgaataaaataaaagaaagaccagacggttcttatctaatttgaaacaaatttgaataataatcagtgttggatgtgcttgcagtcatagttgtcaattggaaccaaatattcgtcataaattttttatttaattaaggtataaaccagaagaatttgtggatcttagtttaaaaattagtgtttgtggcctcgtgggaactactggcaagtggaaaccattcaattacataaatgggatatccaacgacctttctggaagttattataaggctagtagaattgtgttacaatttgttcctcccatacaatatgccaactcatttctggtttatgcatatgttacattcaaaattctgacttctaaagtgctagtactaattattatattttctttagtcgtcagagtatgatatggttccaaacaacttggtcttgtatcctatgatgtttgagaagcgccgttggtatcactgtaacatcttgggatgtaaacgtttaaacgattctacgggggaacactccacacaacaacggttttttgttgagcttatcattaatggtggattcatctaccatgtgctttcttgcaccaaagttggtatgccatttcttcctttttaatctgatgttaatgtttcatgtcataattccatcattttataaatttgtttttatcaaatttcccttttgtagatggtgacatcgacaacaatctatgtatagcttgtccgcccaacagtggcatagtgcatccacctgcaggtggatttatttgtggggtttcgaaagatcagaagatattcaaggtccccttctattaattagaatttagattttagagcttatatagcaatagtagaattagttgggccttttttggttgttttctatttttcagccttagctttaagtagacagctaagaatagaagtacaacatgttttgccctaatattatttttttgttgcttgcacttactgtctttgccttataagttgtaaaaaaaagctaccaatgtctttgtggaaactctatgatgtatacgctgtcatgtcatgtaacttatatgctttattttcctatctattattctcatgttggatgttctaccagctgcctgttggtacaggtggcacaaccctattttttgacgcatgtactattggcggctgttaaataccaaattcacgccgtcaatacctgcataaaactgaaatataatataaaatatccaacatagtagtagggtttatttctaacaaaatccacaagtgttggcgtatatttagatgcaggtgacaaactactagagttgagaagaaatatacataaagaaggaagataatcaaactcatattcaagcctatggagttttgggggccacaaacctaacgaaacacgttcaaatgggcccattcaccaaacatatgggttgagggattctccaccagagcccaggagaaaaggctgggtcaaatgggccagccatggtttggtcgaaccgacattggtgctgttcgccatcttcttccacgtggacgatctagatagcctcctaatgacggtggagaggtagttgggacatttccaactgccaaaccgtcatatgaaggctataaaaggagctcacatgcttcatttcaatacacaccaaagcatgagctgaattataagaggctctattgcatctttttttacattagaatagggagaaattaaagaagaaagagtcagaggaattccagagttgtcggtactttcctctttactttgtgtaccttgtcaagtactcagctttaattgatattatctttatcgagtaattgagatttgctttctgaggattatctcttagttcctggatcattgttcactatttgtcaattaatagataatgattactttagtgtttagataacgctagagtagtaattaattgcatagatgcgatgttaaggttgttaattaccggtgattgttgcgtatcccacagttcgttagaagttggtgtagaggtggtgacagcccttgagatcactgcagtccttcttgttcgggtacggagtatagtgcgttctggtagcagtgagcaagctagtgcctgaagtattgcgatagaattgaataaactttctatagacaatgttcctcactaggaaatcctctctaccctttgcctatttttgctttgtgtccttggatgaagaggagctgaacacacatgttccctattaaaattcgatatcttcgtgcgcttgcggatttcatctgtgaccgtaagaaatatcaacatgtacgagtgagcgagcccgagctagcttaacgccgcctgtacacggttgcgcatggctcatgcagcatcattagccaggtgccacacatgattaaatggactaggtagacccacgtaggaagaaagaaaagatgaaaagattggtctatcactatacgcatttatttggatacttatgtttacggcataattttgacaaattaatccttctataaaaattattttaataataaaccgtgtcaaaaactaatttcaaaaatagatcgtgacctcagtgctaccctgataatgctaaactaaaatgtctcagtgcacctaacgtggcacaaattagacatgtaaaagtaactcagcgtcactatacattacactgacatcttaatataggtttaaaatatacggcatgtgctgaaatcatgagtagtattaaactttatccgttttataaaaaagtgcctataagtaataaaaatagacaaaacaattttaaagttaagaagtgaatttaaatgtattcgagtaattcatagcacatacatatgtaattttcagttattaaatagaccaagattagtattactatgttttaagcatatggttaaggttatagcatatatactttagaaaagtgctatcacgaattgtgtgtatcgttaggtattcttgcagaacgcaattaatcctagaatgagttcatattggtatatgtatttctccctgaaaagagaaaatgaacgtgcatttttccaaaaagaaaaaaaaagatatgttcaaagtgcttaaatacaaaacgtgcaatttcattaaaaacaatttacttattcacccaataaaacctagctagcgtatgttactactctttctgcagtcttttactaacacaaaattaagaaaaaaatatttaagagttttgtggattgtaagttttctataaacaattaacacgaaatgagtttattcatgtaaaatcttatgtattcttacttgacaagagaacataaatagcatgtttgtgttatataccaatagatctgttatagttttgttcatcgtgtattttaaacctaaattttaaaacccattaattaatattacaggatataaatattgcacgcgccaacgggcacatcgattttctagttatgttccattatgggggaattccaggaaattggaaaatgaaaatatcgcttacttctcaaaaaaaaaacaattgtctctgcaatctcttatttatcaaagccattttgtacttataccagatatgcggataatccaaccattatttgacatgttaagttttgaacactcgaaccgattaactcctcatagcacgatgttcaatgttactaaaaaaaattgtattgatgctggttgcgaaacccccataggtgccgggttttctagccgacacccctcaggtggcaccgatgacaaaagccatcgactagcacctatagcatatagacagttgtaaccatgaaccgacacctatatattgttataggtgccagttcttggcccccaagcgccatgtggtggttgttgtcacagcctgattttcgtttcaggatttataaattacttaataaattattaatagaatttatattaaatgttcattaatttacaagtgaagttaaatgtgggaaataaaatttcctaaatataaagcatggctggatttaatttttattaaattctccatgattaattatactctttgaaattttctcagatttttcagagctcaattcctaaatgatacaaagaacagttcaataattagttaatcaataatcattaatgatctagttataattatgttaaatgcttttctcgtttaaaaatccttaaattataaattgtggtttaaaaggaattattagaaatgatcttaaaagcctaaaagagaagatctaattttaatttgttaaatctcaatataaaagtgggctagataaaattttgttaaatacttctcttgtttctatagttcctagatttttctgggatttatttgagccaaggaagtatttttaatcaatggaatatcatttcatgaataatttaaatataaaaaggttttaaatctctcttttagctttgggccgaaagtcagcccaagtctctctcaccctcctttcagcctgctcgcgcccggcccaagccggcccagaccgccgcgcccctccctcctctcttccttttgctgacaggtgggactcacctgtcagtcgtcttcaacctccggccgcatttagccgcgccgcaagccgccgcctccttccaaaatccggccgcccctttccttctccggccaaatcaattgaggggaaataatctcctcgatctcctcttccttttctctttaggaatcccgacctaattcgtttggaaatcatcggattcaatgccgatttggttagcttctctttccaaaaccctagaccttccatctccttgccgccggccatgggcctccatcgccgccccctagcccctataaaaggacctccgggacctcctctccacatcaccatctccacctttgactgccgccttctctagcgccgcctctgtgtggctctttgcgtcgtcgccgccggcgggtgtccagtcgggcgccgccgtcccttcgattgtcgtcgtcggacgccgtctccttcatcagcatcgcgaggtcatcgccgtcctcgtcccgtcttccgtttccgccgcagatcaccgaagcgcagccgacactgtcgacccgaagctctccaccgtcgccgtcggtccagccgtgccgtgccaccgttgcagccaccgccttcggtcgtcgtcgccaccgtcgggatcacgaggaggagcagcacctcgtccaccccttcgttgccgccgtttcccaccgaagcaccgccgtcaccgccgacccgaagaccgccgtcgtcatccatcgtcgtttgccgtcgtccaagccactggtgagttcgctgagccgagctctacgcgttggtgccctccgtttgcgccgccgtgccgtcgttcgccggcgagcacgaggtgccgagccgccgccggagatgacatcatcgctgatgttagcactttgtcagccgtagacccgtggtagaccggatcgatctcggccgttcgattcagtcaattttaggtcaattagatcttggccgttggttccgtggaccgcttctgtgaacccggtttaccatggaccgtctttgatgatgcaataaatctattttccttttcaaaaataattctttattgcgtcataattcaatttaaaatccatataaatgctttaatgcggtttaatctttagaaatgcataactaattcattgtaactcggtttaatgtggttcaagttgcaaaagttgtataaaataaagatctatatattaaaattatccataaattgtgttaaatttatttaatcctttttaaatgggctttaattagattaaatcttgtacaattcgtaattaattcatatgaagtcagaatgaggccattcaagtctcataattcatctaaaattatgatctacatgtttgtttactttatatgtattgtttatttggagtttcttagtctttttcctcgttttgcgtgttagcttgtcgtttccgtcattgtgaaggttcgcgagtgtgtcggaagtgttccagaagacaaattgaagacccattattgcaagtcaagtcacacagatcccaaacataattcctttgagcatgttgatcctatatttaaattctctatttatttcaactgtgcattttttttcgaatgtcatcgggtggtgtgaacctattcctttgttatggccaatttgcattgattaccctatttcttgattacctcgggttataatttgactagttggatttatatattggttcaattagatatattagatataattacttagtcatgcttagaaacattagcacactattgggataactaaggtttcactattacttaatgatgtacatggcaaagatagctcatgatggtcaatcgtgattggttaattaattaatttgccaactaaaacttgataatggtgggttgtgagcacatggttttgatgatagtgctcatgaaaattaaggaccggttcacaagtttcggttgtgaaacattaaccatgccaaccacaagccagaatgggcaacgactggacactttctatagcaaagctcattgtggtgtgccagactgagaagtggcggagataagcccacgggggtcgctggagagtccatgcctctggtttttgagggggtgactatgatccaggaaaggtgtgctgctttgagttgagctatgcgaggggtcttgtcacaactacacaaatggtgacatgttcagcatgggcacataatgatatggtgacatattatggagttgtgtcttgtgggtacagtggtacacctctagctagagtaaaactattcgaatagccatgcccgcggttatgggcgggtctaacaatgtctttcgtgattagtcctacactactcattaataataatgtggtaattgatggtaattaatttagctcctggtttggaatgacacatccctggtttggagatagatctgtacagccgggtatggttattcaggaaggttgggcctgtgcagtatggatgtgctattcagtgttgataaatattgatgattaattactctactgttttacaattctcaaatgtttgctaaatgctgcttttgcaaatgagccctatattatgccattctttggtatccttgtgcacttgcatatttgctgtgtggcttgctaagtatgtcatatgctcaccttgcaataatcaatcaaacctcagttgaagacaagttgcgaaggagaagacgtttgacttataccccagttgagttgcctgtgggagtggagccggagcttcgctagaccgtaattccgctgctattttcttttcttttgtaagtatgtaacgttattattatgatgaatctgtatattaaattatctgtttgtgtaccttggctgattcctggacgaggattttatgcacaaattggttcggaaattactagtgaatttctgggcgtgatagttgtcaaaggtgtcgtttctacgtaacatttgacacctataagaatatattggtgttggttatcgcttgagctggacacgtggcagcactataggggtcggtttttaccaacaactgtcacctatatgccggtatgaaaaaaaatagtagaccttacaaatttcacagaatcataaaaaatcacagatcatacacgatacattcaaagacacaggtacacatccacatggacaatgcattaaccatcaatacatatatctcccaaaatccctcgcaaagttcagtttgaaacattcacattcaacacacaaatatatatctctactattataaaaattgaagatgtttttatcagtactttggtacgtcatccgtatttgagttggttttaaagttcatttcatttggaaatacaaatccgtttttgagttgtttgtttaagttcattcgttttacaaatacgggagacatataagaaatatcttttaagaaactatgcatgctacctttagatgatcggactccgatcctaattgcagctcatgcgaattcccacagtgaattttaccttagttaaaccgtacaacaataataaaattaaaatagtcttcactcattacaatgaacggatattttttcctaatacatgcatatatgtatgtatacatacaaatatagggacataataaagcgcacatacggtgcacaataactaaaatgctcccctcacctactctccccacccaccaaaaccccccacccccaccccaaaaacaaaaaacccacacccctccccaatccaattttttccgtctgcactccgttccccatttcttttttttttgtttttttccttctgtttacttcattggcccatgggtaaaaagattactagctctactatcaacctacgagtaaaagtattactgagagaaagaaaggccattagtaaacccatgtacttatattattgagatctgctatacgtccgaccaagttatacgactagcgtacaactaaaacagcgaacggtgacggcgtgaagtgatgctgtagattggacctgtgccacaagcccatacactctcatatcatatacataggcccatgtacaagtctaaacccacaatatcatgtcaacatggccgcatgatgcttctgccgaagctttaggtcaatctgaaatgctgaatccactcactgtcaacttgatctcaacattctagtattattttcagtgtagcagatgttaccaagaccagttcatacaactaggtaaagcaagttattttttttattcttttatatagtgtaaccaccaagatcagtttttataactagcttatcattattgattgcgcttatgtcaacaattaagctatgcatgattaactgagggccataagcatttgaatagcatgtgaaaacccacttatactgtcacagccgtaacatacaaacaaatcgtcttaacggacttgtacaatgtaatgatatgaatagaagaaactaagaaaataattgaaaattagcacctgaagaagatccattaaaagctcatgtaagacggtgattccacgcacacgcgaatctgttagtagtatttgtttgttgctgattgcacgaacgcggtcagacatggtagttagccacgattgtgactggcttttggaaggcccaacgagaatgagattcggatcacagcccaaactggtcagctcgcagacgtcacatacgccgtcaccgtggtcgtacgagagttggacgctcgtgatcgtacttaaagcattttcctttttttcttttgggaatttgaatggtaaaaattgctctgaaaattggcacatgatggttctttttttgagcctcaaatgggagcatcgattttattcatctttagtaaaagatggagtatatatttacagctcttagttcgtttgggatggttgggaaccaaactcctccgcacggaaaacgaaacaatctattagcacgtgattaaataaatattagctattttttttcaaaaatggaacaatatgattttttaaacgactttcgtataaaaactttttacaaaatacgcaccaaaatagcagtttgaaaagcgtacgcgcggaaaacgataagggagagttgggaagcaaagtgttccctaaaaaactgatttgaagttggtgagagaacatgacaaacatacttcgacatgtgggactttgtctatagtctgtgtattacagctcatgtttttagttcatataatatcatgtatgccactatgattaggctcctttgacgcacgttgcagggacatgtgcctccaatgtgtgggaccgtgaaggtgagccccacatcttagggactcacgcccctatgtgtaagaggagctgatttcaagccattgatgaccgaattacaagcctcatctttttcttatgcctatgcttataagccagaatttaaatttttaaccttcaatttagagttgattttgggtttttttgataacatttattcagagccaagcaatacctaagttcatccaagcacgatagaccttccaatcaatacatctgaatatatgaaaggcacatagaggacggtacaatagatgccgaaacagctaaaatcggcacctatagtactttttccatccacacaggtacccgtgggggcgtcaaacgaaaaaaccacgtcaccttccaatggaaataggtgctgcttttttaaatagaaccaatacttatatttcctgtcagagataggtgccggttccatataaaatccaacacctttgacatgcatcccatcagaattgttggtcgtgaggcccaccctataaccggcacctttgaggctgtcatagaaaggtgtccattcttagctagaaccagcaactttgactctaccacctagctagtagccattgaagggcccacacttaaaaattggcacctatatttttgttagagatatgtgtcgattctagttaaaaaccggcacctactatcacaatatataccactttcctgtcccctcaagctgatcgagcgaagaacagagcggcacctcttgttcttgcttgaccagctataggaggagggaggttttgctctattttttttttgtcttgttggagcttgaagcatacaaggttagttttcattattatttctcactccatttcactcttgcatgttgaattgaatcgtttgctacatacacatataaagtgcgcaaccgaaacaaattatttgtatttgttttgtaggggaaatatttttttatcatttttgtgttcatttaattatatcatcctcagatgagaccacatgctaattttgaattgaaatattgacatgagagtatgtatttgacaggactacacgacaaagtactccacctggttggagcgcaccccacatgggcctcacttgggtcggggttccagatgaagttacaagcaaataggcccatcataggtttcgcaacacattgtttctgtgattgtggatgactgagataaaatttggcgatgagactggattcgttggaaaaaggactgtgagagcttttcatcaagtacacatggaccaaaaacggagaaggtggacgaattggattccagcacttggaggacttgatcatgatgtcattttattgatccatgatatgaacaacaattatattcatagtagccatggtcacatcaacatcttattgttattacaagtgcggatatttttaacccatgatgaaaaaataaaggaaaacgtactccctccatccacaaaagttgcacatattacttttgacaccaagaccaaggagaaattaaatcaccttggatgttacaaaatcaataagtgaatccaagcatgcaaccaataagcatttagatgactccttgggttctaataaaacatttaatttatctcttcattaagtcttgaatgcataaagactacaaataggaacaacttatttggaaaaactcaaatatgtaatatgtgtaacttttgaggatggagggagtacgaattagccctccgaactatcgcggtcaaccaaattaccccctaaacccgaaaaccagacatcgttcacccagaacttttaataacggacaaattatccccctcaaaccaatccagaatggttttatcctacgtggcgtacacatggcagaccagtcactcttcccctctctctcttctctctcgcgggtcggcggcaggctagggacacggagcggtggtagcgggtgacgcagaggcggcaaggaacgaggaggtggcggcggctatggccgcggccacgacgagcagccgccccctcggcatggggatggatggcggcgggggcgggcggagggcggacgtggacggcggacacggagaccctcctgcaccggagggagttcgccggagctccttcctggagttcgccgctccctcctctctgtcccgcactgtcgccgcctccacgttctgcatcgccgcttcttcctcgtccccggccgccgccgcctccatccggacacgcaggggcggtcggcccgggaatgggcggggttgcggcggcgcactgggggtgggcggtcagcgcggggacggacggtgggcggcgacacgcacggcgcgcccttgcctcgcccgctagggcaaccgccgccgtgtgccgacctcccccattccctcgccttttcaccgtgcccctggctcgcctgccatgggcggcgtcatgcgccaacctcctccattccctttacctgtcgggttgacggcggtcacggtgctcgcctgcccatccacaggcgcttgcacccaccggccatctcgattcaaagtggtcctccgattaacgtgatacggggcgcgctctggcctcccccgctattgaatatcgaatgcgtatcgatctggactgtggcatccttngtcgtgaatgaatcaagggtctcgcccccc

SEQ ID NO: 28394 - DNA, 17836 bp, Oryza sativa
  unsure (1)..(17836): unsure at all n locations
agcattggggggttagaagtttatgcgattaaganataaaggnaacttccccttccccatcgacctcccccatcccctccacctccccgggcgcgtttgcccgcccgtccatgagcaccaccacacgctcactgcccgtccccgcgcctcaattaagagagagagaaagagaagaagaggggaagatgataggtgggtcccatcttttttttaaaaaaaaaaaggtgctgactggattgccacgcatacgccacgtaggacaaaccgctatagattgagtcgaggggggtaattcgtctactattaaaagttgaaggtgaataatgcatgtctggttttcgggttaaggggggtaattcgatcgaccgcgatagctaggggggtaatttgtactttttccaaaaataaaatccagttgttgaaaaaaaaaggttttatattgtgaaatttgcaagatttggaagggttatttctgtcgaaagacaaataggccgacctaaacataactgtcgtgattacggaagtgctaatgggcgatcgatcgcccggcgacaagggtagcgatcgatcccccttcccccctccctccacctggtttcctttttggcaccgcattactttcctattttagtaaatttatgtacctaaagtttatacacctcaagtttacacatctaaagtttatacacctcaagtttacacatctaaagtttagagaccaaaagtttataagtcaaaagtttatatatccgattcaaatttgaatttgaattcaaatattttttatatatagtatttctatacatctaaagtttatagagctgaagtttatagacccaaagtttataagtcaaaagtttacatacccgattcaaatttgaatttgaattatgtcgggaatcaaatttgaatttgaattcaaatattttctatatatagtatttttatgcatctaaagtttatacaactaaagtttatagacccaaagtttataagtcaaaagtttacatacccgattcaaatttgaatttgaattatatccgttcaaatttgaatctgaattcaaatattttctatatatagtatttctatacatctaaagtttatacacctaaagtttataaacccaaagtttataagtcaaaagtttacatacccgattcaaatttgaatttatattcaaatattaatttatagacccaaagtttataggtcaaaagtttacatacccgtttcaaatttgaatttgaattcaaatattagtttatagacccaaagtttataagtaaaaagtttacatacccatttcaaatttaaattttaattcaaatttatatggtgtagcagtaagagaagaaggggaggtaaagtagtaaaggggaggtgcgggtgatcgcttggaaggggagggagcgatcacccgtccgttaggagtaccctgcagactagttcaggataaaatagtgcaggaggaaagcaaagataaaaaagacgggggaaatactacgcaaggaagataatcaagaagtcgtgggctcgtggctatatccttgccgtttacgtgaaatcaacaaggccaaacggcagagaatacgtatcgatcggggtggtgaaaaacccaacctcccccgccgtacgccctcccgaactgatcgacgccggcgccgccaaatcttttcactcctcgagtgctcgatccgccgtgatcatccccgcaattcgcctccgtgctccgcgcctccgccccgctgtccgctataggtaagccgccatctgtaaagtctcattggaagcttatacgtaattcacaaaggtatacacgttattcggtatcttcattcgtttttctccttttattttcttaataatgaataataaatccagccctacatggagatgaatgtacatgggctccttttattttcttaataatgaataatcaatccagccctacatgtctacatgtgagatgaatgtacatgggcacacatggccaatcatcatttgttggaatcgtatgctttgagtttcagaattagtgctatgttttactagaacatgcatctcatcagctgcaaatataatgcttctcgtgagggggagaaacgtttaagcttggtggctcggttcaaaattaattgctcccatgacttggttgctccgactgatctagttttctttttaaataaaaattatttaattgtgaatgaaagtcgttttcacctaggctatgctcgttagtttgttagcaaaaataatctggaatgatataaaaaataagcaaatcataaaaaagttaaatctgatgaaagctcgacaaagacctgatcaagctttttttttccccacaatgttgctactgaagactaattttctatttattcagttttaactgaacttatattgcattcatggttcaaatatcttacaattctggttgaattatacgtcttctagtccagatggttactactttatctttcgtgtcgttttggttcaagaaaagttgttctgcatgtactttattgagggggtacgttttttttcagtactaactagacaaaattgctttgtttatatatactccagcacaggaaaaagtgtcacgaactgttgatagctgatgcatggcaagttcaactccacaatggcaaacgatacgaacaacacctcctcctctgtcattgctactgaaaccacgagcgcgtcacatgtaatcaagattgatggatacacagtaactaaggatctgatggagaatggcgaatttgtgtcatctatcccgttcagtgttggggacttcctctggaacgtcagatactaccccaatggcaactgctcaaagaacgcagactacctgtcgttttctgtgtttcttgagtctcactgggccgaggacgtgaaggcaaagttcagcttcaaactgctggacacgaataataaaccggtgcgatcgcgcaacttcatctccaatacgcacaatttcagcagaagaggttcaaactggggctactccaggttcatcaagaaaagggatttggaacaatcggagcatctaatagacgattcatttactatcaggtgtgatcttactgtcatgaagggcttctctagcaaaggaagccactgtaagccgtctgtggaagttcctgcaggccgtctggacctgcatttgggcaacctcctgagtaataagaagatgaatggaaaagacgtcacgatctacgttggtaaggagagattcagagcacacaaatgcatactcgccgctcgttcgtctgtcttcagggcgttgttcttcggtgccatgattgcggaaacccctaggaccattgaaatcgaagatatggaagctggtgtgttcagattattgctacatttcatgtacaatgactcgctgccagagacgtggtctcaagatgcaatgatggctcagcacctgcttgtcgctgcggattggtacaatgttgggaggctgaagctgatatgcgaggagaagctagcaaagcacattgactgcaacatggtggcgaccactttggctctagctgagcagcatagctgccaaggactcaaggaagcttgcctcgaattccttgcttcaaccaaccaatcttgagaggatgatgagaactgatggttataagcatctgaaaatcagttgcccaattgttctcaatgaactcattgcgagattgctgcctcctaacttgaaagcagcaagacagatagctatggatcttcggtagtgttggtgaacttttattattattatagtagtttgccttgctattattattattattattattatagtttcatcggtaaagataccttgccttgaatgtttagggagaacagaagtaaagttagaatttatctgatgttgcatataacgtcacaaaaaatagttctaacggcaatccacgtcaggattaattttcctgactgataagccagtcctaatggagtaatggtaccccattaggaagcattttcctttaggcaattttacggttcttaaagaggtatcatgaggtaccaaattttacactaatatttggtacctctcatggtacctcatagtacctagctattaagaggtatcaaatttacaataaaaaaattagtacctcatggtacctcctcaagtaccataaaattgtttttttcctttatgtgaatagtgtttttcctaacggtttgtggctatcaggagtaatccggtttgtagtagcaaggccagatgcattggatttgatatgcaactcgtcagttttatttttatacatgcaatttatcaggggcagagctagtggataatagggggtgttcaggaacccggtcaagaaaattttttagctatacctcatctattttcaccatgtatgcaccccttcaatacaaacttaagcaccagcattaacttaaactcgatttaaagtagagtaaattaagcaagtggcatcaccctccatttcgctctagctccgccactgcaatttatattttatatgcaatctttacctacttaaaaaattgatgttgcttaggttcctgtctgtcatatctgcccgactgtgattcgtgcgttcagttcgtaggcagagcctgtctctgaaattgcccgggtacgtatgggacagaacgcaatgggcaagcgtgtgcgttcttgaaaatgcgatgggcttcggttatgattgatcatttccacccagagcagcgtggttccgatccagcatctatcttatgcaccccacgggcatggccgcccaccaggatttcaaattttgaaattagattttctgtcgcgggttgggggggggaggggggaggggcgaaattttgactggttttaaataaaatttgaccaaattcataaaaatcaaaagtttcggacgagatgtgagcattttggttgggggaggtgggtgaaattaccgaaatttcaaaaatttcagaaatttcgaaccgaaatttcaaaccctgccgcccaacaacaaactcaatgcgcggtatccccttgctgtcggggcgtgggctcaacgcaaccagtggcgggagggatagccggaagcatggcgaggagtggctgcgccatggcgacaagccggcgtgcccgttgtgctgtcgatgttctaggtcatcatcgaacatcgggcggtctagctgggtgatgtttccaggtagccttagttcatggcagtggtggctatcatggcggacaccagcgtcaacacattatgcacatcattttcttcccaaaacaccaaaatgggatccccacatctagggacacgtgatgctcactctttcctgtgtcgtttctaactttccatgccgaagttatatatcaatcccattcacaacgtcgttatagttgtagatctagaacttgctttctgaccaactcaaatctttcttatctgagtacgccatccaaattcgtttaatattcggctcgtttactgtttctttgtgttttgtttccttgtagggtatgctagatcttcatcggatgtagacctacactaaaaaaacggaatgtccttggcggccaaaaaccgccaaggatagcatataaaccgcctaggataattattccgtcggccgaccaccaagaaactaccaccaagtctagagtgccaaggatatttaaatttattggcggctaaccgtaagtaaaaatattcatggcggtcaaaccaccaagcaaattaagaagattgccatctttcgaaagcgtcaggaaaaatagccttgtcggttttccaccgccaagaataactttaacttggtggctgcgaaaccgttaagaatactaactgaaacgtcccgcctctcttacatctagcagcttttctaggacatagactgccctcacaaaccaacacaagtattttctacacaatatgtcctcactcgcttaacctcagagttctttggagatcaacttcatcttgttacaaatacctgaaaccaaaaataattattttttctttcacaagctctagccaaatttttttttattagtacaaggctatgaatgcacggagcaacaggctaaggtcttccatgccgctggccagctgcggcatggcctccagcttctcctcctcaggctcctccatggcgtcctcctcctcctctgcgcggttcagccgctcgagtagcatccacctcctcctgtggcgcccatcgggacggcgagccgggcccgaaccggtggcaccatgttggcgcggacggcacgaaggcggtgccccttcaccgtgatggtgtcgcggtgggcggtaatcctggcctcgatggagcggatcctcgcaacggcggcggcgacggcgtgctcctgcacaaggtgccggaactggatctcctggcgcgcgtaggcggctagcgtggggctccccaaccagagaagctcctccacggtgtcgagcgcccgcgggacgacggaggttgtggggggggggggggcgacagcggaagaggtcgatgttgttgaactcgtcgatttggtcgaagcacgcctcctcaacaattccggtggtgtggggattggaggagaagaggatggagtggggaagaaaggggacgagaggatggagtggggaggcagttgccattggatgaggagggaatggacggttgggattgagatcacgggaggaggcgcggattgatgacatggcatgagggcagatcagtgatttggcaggatagcgggaattttcgtggtctgagaggcggccaactcaaatttttgacctgcaggtgcgcgaccctggtaatagggagttggaatttatattgacagttttgcttgtaaccgccaagcaaaatacatatttctttgtctgctatggaatagccgccaataaaatttctttatgcttggtggcaagtttgaaccgccaaattaaagtgtaatcttggcggctgatttcagaccgccaaaaaaatcgcatggccgctaggggcattcctttcttgtagtgctgcggcatgaccagatgagccgggcagtcttattcttattgtgtgtggggcatgttagatccgatcaaggccctattatgcatgaatggcgtaacgagtacgccctaggatggtgaccacgcaaatgccatatatattaccaccgtcacccttggtcgtcctacatggctgcatgtatagctatcaccatcatgggtagcagtgatagccgatgctgatcaagtgaaagaacaatctaaagaaacatgtgcatgcttgagatcgcacttcccacgatgcaaatatgcacaatccggtgaatccatcaatagtaataaggaatctgatcaacaagattgctcgagtggtggggagaagagaggagaggccagggctggctcaacattttcgagggctctaggcgaacttcacactataggcccttaagaattaaggctatttcttttaacttataatatatactctataaagcacctatactatagtgatataaataaacatttctaacatggtaaataataaatcaagcagtttgcaaattgcaatatagtaatttgttctcgataaataatatcgatagtatgattgacaacttaaaacactacaccggattaggttacctctgatggctccaaaccaacactacaccggattaggttacctctgatggctccaaaccctcaccattgacaggtttgggcttggtaacagattagtggtcactagtgaggaccagtcacctttgacggaggaccgtcactggtaacagtcacctctgacggacaagaactctatggcccgttaaaggtaagtgtctccgctaacccatggcatgttacaacccgtcataggtaactcatttgtgacgggtcggagagtaaaaaccgtcacaggtgactttcttgtgacggcatgtatgtgcagagccgtcacaggtgacatcacaagtgacggcttttgcaatatcaaccgtcggtgatgagcaacatgtagaaaaaagtttctaaagattggctagcctcccatgccctctaaaagaatagaatagtcacatgcattcaaactaacatcacacatgcattccaagttgtcaccgaaaatcaacaagaagttaatagatcaaatgttcatcaaactagaagtataagcgcggcgtgacctgcaatcagaaggatgattaacagcttaagcaaagcaattgttaaacatttgtagcttctttttttcaaccaattcccattctccagacaaacaagaattaggaccatgtctcttacattcgtactgccaaaattgctcatagaaaaagaaattacaaattcaaaaattagaaagtaatgatgccatatcagaaaagagctcttttgagttttcaaatatagagacatgctaccaggccaacatcatcaagttcgagaattaatataaaactcaaagaacacaatggcttgcacttagaaaagcagagtcattcaattatctgctatgtcagcaactccatagtctatggagcacctatttacctgcaagcaaaaagatggcactgaattagtttgatatgagaacaatttgcagaattaaataagatgaataactaaagataagcaaaggagaataggagtggaagatattagctaggtaatccatagtacgtgcaacctatggaacaatagagatcatgtattctatctgagacaacagagatatatttttcaacaactcttccaggacctatgcacatataatgagatacacggcacaaaacaatttatgatcgtcaatctactaaattcaagaaggcatgtggataagcaaaaggattgcagcaaacttgtacaccaccttatgggagaagaggatcttgcagcaaaattgattttctgtaattcctgcagccatctcatgggagaggatcttgaatctctgaatctcaaagagctgcagcaactggagaagcagctgaaaaatacatcgaaacatatcagatccagaaaggtactatttgtcatgagaacctgaatagaatagtcaaatcagttctgcaagaacattttagatcatgcacataggtttgctgtatttgacaaacagattcagatatatcacttcagcgcaataggaatctacacatcattcagaggatcagagtatgacaaactgactagcagcttatttaatgctcaactcaactaaaatagaagcagcaaccttatttaagcgtggatacattcctacagacaacaaatttagccatgcaaagaaagaaaaaagaggataacacagaagctcacctccaaagatgtctagctaatgtagccggtaggtggtgactgcacaggatgaggagaagcacatgctcgccgtacagccgataggccttgacggcggacggcagcgcacacagccgattggaggagagaggagacgccatccactcaccatgagcctggatctggcgctgttggcgccgaaggccactggatctggagtacccaaactcgggacagctagatccacagccccccgagctcgggttgtccaaacttggagccctagccggcttgtggtcaccggcgttgcacctccacaccgttcgccatgaccgtgcctctcctcctgctcctgttagatctggtggaggggagggcgccgccgccgttgggccgccgcacgctcccctctgtccctgccaggccgccgctgcacacagagagaaagggagagagagagaagtggagaaatcgaaagaaatggagagagagagagaagtcggccttatctcctccgggagtgggcaccgccggaagaagaaatatctccttcggtttgggtatatagtggcacaactcaccggacgggttagtgcttaaatccgtttgaggtgagtaacctcacttctgatgggtcatccggttacgacccgtcacaggtaactagtcacctgtgacgggctggaagtagaacccgttacaaagtactatgacctaaaatcagtgagggaaaaatctatataatcaagggcctaggcctaatgaaaactaatccaccatataccttaatttaattaacttatggacttatggtgcactaaatggttgtatacttgtattgattcctttaacggttgaacccaaaacggtagcaccctaagtctctaatcaaggtaatttaatggggaacaaaaataaattagaagaacagatcaattctaatcagtgagaaggatcgatggattggatcatcaattctaatcagtgagaaggatcaattctaagctattgggctaaatacctatacaggatatatacctggatcggggctccgattttggctgggccctaggccatcgcccttatggccctgctccaaagccggccctgggagaggcggagagggagataaaggagttgacgagaagaatcggggagatattttcttttcctcccatccatgcttggctcagctcaatatgtgatggttctttaaaacaatctgacacagatatttataggtgccaatttttttataagatgctcaagatgaatgcgaaatatcttatatgtgtcatttagagcaactggcgcatataaaggtgtctgttgatgaaaaaaacacatactggtctaagagatttgctttactctaatgcaggtccaaatcttaattactttcgggttgagagcgtgccaactggtttaattctacagccagcaagaaaaacaagaagcaaagttagatgaacaatagtcgatcggctagtaagccgatgtcgtatcgtcaagaattaagccaatgcaatcagatcgaatcagctcttgtatgatggattaaaaagagcaaaaccctaaatatgattcattggctataatattaatcatgtagtttaatcaatattggaaaaatcaaccgatgacccaatatttagagcaatgtattactctaatacaaacttatataaaagtgttgatcaaatcaaatgcaccaaatatgccccaatcctcagatatgatgatctgagctagattgaatcatgcttgatatatttaaaaagacaattctcttatataagtggtagatacaattatcaaacaagttaaaagataaattcaactgtatcaggtaagatcggttgaaactccgatgctatccttatttttaatcaattccagattagtttttagagttctagacaagagtagggttgatgcaactcaaagtatgtaaagaaaccttgattgagctacgattgggttctcattctcccacgtgtcgctctagcacatgctgtatggatgcatgctatggcggcattctggcgatttgtacccgaagactaattaaaattgcatccaaaaaacaaattagatttggattatgagtacagagtcgcgaagcataattttgcattcgattaaggattccaatttttaaaatatcagtaaaggaccttcggtccatagattctaccgacccgcctagcaatcaagctcttgctgctctgcgagactgggttttttggaaagttggaacgacatacaaatgttgttaaatgccgcacactggtaaaaccctccaagcttacttccccctaccaatctgaatgtaaaagaagaactaaatactactatccatgagatcatcataacaaaaactagaattgcccagctaaataggaatagaaataaatccagggtaagaaagaccctttctctaaaccctaaagctttgcagaagtacgaatttgaaaaggaataggtcttgcttggaagaaaagggaatttggttgttgcaaagcaaggggaaaactcatcctcaagtaaggcaatagttgcttgcacagaaacagaaccatggggaaagtgatctctgaccgcgtgcctgttgaagaatgagctagggtcaaacctatccttggtttaggcaatgccaacctttcctttcgaacaacggtacttactgcccgtaaaacagatcggcacctatcctcggtctcggctatctttacgccttagaattcattcataaaatgacaatgaacagtctttatggctgttttgctatatcgcctgaaagcactatgaccgtcggtgaaaaagaatcaaagagaatggtccatgaattggtggcaagagagcgagttcgactcgcgaacgacccgcaagtgaaggaccgatcctttaacgccagtagtgttgcgagactggtacttgggggctcacgagcaacatatagactaaggttacccatcactccctcgctcctttttgaaggcccactgctccccctttctttaagcatctatcccggcttgcattttgggggcgagtactacaattcctccataatcacacagaacgcccagcttcgcgggctttgcctgccgacgttctaataaagaattctggctcggcccaggaaagtgctggcaacaacataaagaaaggcaatgagcaaaaatgtcactcaccggcctaaacgacgagcaaacactcgaacgtgagagcaagggatcacccaatgaatgggcgacccccaaggaagggggagagagggaggcaagaaccatgctttcagagaagtggcggtccgaatccactctgtcaaaaaaaaatagcagactaagccgtgccgagatttttacccttctctaaaaagaagtgtctctatttagagatttctctacttagatgaataaatcatactctagatatattattaacgaatatgtatcccaatccatctcgagtaatttgagaatatgcatttcgaaatgaaaagctatccccagaaaacaaagaaaacgaataggggcgtagcgaaggcacgtgacgaggcacctcgagggcaattagcagatagaatatctcctcctttgctgtatctccccagcaaaacacgtgcacaaagtaaacaatccagcaactgactaattttcagaatggtagataccttagctaatctaatctagcaagataatttaacagataccagttgtcgacgggcaataccgtgactacggtattttgcatagtatggggatcattggtaccaggatatatgcgagattgaagtaaaagagatggagacaaggttttttatacaggtttgagccctttacctgacagataatatccctactcctattgtctgaagcatgtgttgctctttattcatcataaccacaccagtacaatgtttgggataacctatctaaccgttatcgacttggcggcctagaatacaaacacgtagtcagcaacagggtagtttttctcctcgaatccgtacttagcgagatcagagatagcgctagatccttcttgccggcctccacagacactatctagggcttgtctaggcttactctgacatcgatatttggcggcttgttttggcgtgtgttggcttgtattggtctatgtatgttgtgccttcgtgtgtcctctccccctcctcctagggggtctatttatacgcataggtgtccacttaaccaagtagaactagggagaccaatatagatacaatccgagtagtccatatagtttccatattgaactctattcatccttccttatccggaactccttgtatattcgaggtatgattccgtataagattttgtcaaggttatggataccacatacctaatagtagttgactaaatctcggcaagacccaccacataccatgtcttatacgggaactgacttcagatatggagggagttccggataaggaaagacgaccagagttctacatggaaatgacaaggactactcggattgtatccatattggtttccctagttctacttggacaaggggacacctatgggtataaatacaaggccccctaggaggagaggagggacaatcaacacccaccatagagaatacaaaacaatagatcaacacagaagatcaacataccagccaacatacgccaagacaagacgtcggatatcgacttcagagataggcacagctagtcccctacggtgtctccggatactaggagagacattgcgctgtctttgatctcgccgggcacgaactcgaggaggaaggctaccctgttgtcgactacgagtcagaccttcagaccgctatgtcgacaacagttagataggctaccccaaatattgtactggtgtgattattgtgaataagagcaataccggcttcggccaacaggatgtagggttattacctgacaatgcaggggcctgaacctatataaaaaccctcgtctccgtctcttttacctcagtctcgcgtataccctagcaccgacgatccccatactatgcaaataccggaaccgcgacatcaaacgtcgacagatttggtatatggtgggccctaccgagcttagtaaactactattaggtatatgatatccataaccatgacaccagtataaacctgttaacaaccaaatttggcagtatcaacatcggagatggagattagatcgaggtggaatcgaagacgaagatcgatttgggaacagagtaagagtcggctggagtccaaatcggctacgattaggatcggctgagtccgagtcaggctgggtaagccgatacagccgattccggcaagatgacttggtgtacgacatcaggttgacttgatatgcttcaagatgattgccatgcatggatagagtcctgagaaggcaattatatctattaattaggatattttatgtaattttcttagagatatgtttgggcaaaagtctaccataaagacttatggtatcttagagtttgttagagataagaatcgtgtccgatatggacatagtttgtaattatcgggtacaaatagaccccgaaccccatgtaatcaattaacacacacgttcgatacaatctcggtgcatcgccacccttcttgctttagttttatttcgacaagttcttgtttttgggttgagctgcatcggtttcgatcttcaacaagaggtaaaacttgttatgacggcatgtgttctcgggattagttcttccatcttatgatactctaatcttgtttatgtaaatccaccgagttatcatatatgttccataatctctagcaatatcgctatttaacctacaatcgactaacatctgtcagtagagggcagccaattaggttaaatatcgatgttgatttagattatataagatatccaccactctatgaaacttccggcggcttgattatctagatattgttcttcttttcatacttaatgccgcattagttgagtttgatctattaagtcgtgcttggaatatcaatctctaacctgccttctggttgccgattagggtagtatcgggatttcagctgatcttatctgatttaactacatttgctctatatgttttattgacatgttaaatctgccctttatgtcaagatcttattgcatctaagtatattaagcttctgtttggtacattctgtttgttttaatatcttaacatagagtcgtattggagtattagccgatacatgctagatctatctgatcggctatgctatgaacatatatagtcttgttgttaatatatatttcgatctaagtgatttatactgtctcggcacggtgaccgatctatcccaatcacttgatttaagtatatatcgacaccaggattatatattgttaatatctacagccgatcgagtagatttagttctttattatctatttataattgccgatcgatttacatatgacatcggctcaaagataaatgatacgtcatcggcacctagccgatcggctatcatttatggatttaactacggtttttttgtctttatttcttgttgattacaggaccaaatcaactggcacgctagcatacccaaaggcgagttttggacctgcactggagttaagaagatctcctaggcctcgtgtttttcatcaacacgcttttggcacgcctggtgtgacctgataagaagtcagcatcgcagcagcggtttttctccatggaggaaaagccactagcatcaccatcctcggctagcccaggttctgttaaagagaagatctagcagttgggcctatccgaggttaatgaaggcaacattgtgaccatcactccagacaagctgcacctgatcaaaagaaggattttgaagtgatgatgcagcaagcacggaaccagtttttaagctcatttatgcaaactcgcaagggaatagtggtgcagaagtataaggtaaaggttgtcgctgatgttcctgggactggttcttctaaggatggagaggtgaaacaagctctagatggctcggctcaaccgagtgataaaggtgctacaaatggttctcaaggaaatcaaggtgacaactctcaaggagtacagggagttcaaggtgatggtgctcagggagttcaaggtggaggtgttaatcaagacagcaatacaacacagttgcagttcaacaacttccaagatcaggttgactatgctgtacaccatgctttgatcaatcaatctggaatattaaccaatactttggcaaacatggtgaaatcaatggttgatggttcaatggctgagtataaagctacaggaccagtttatatactaggaggagtgttcccaaattataggccattaatcactgacaatcaaccagttgtccagtcaatccctctcaatgcaccatcggctcagccgacggcaccaataccggctcatgcacctgctgcaccgtcatcggcgccaggccaattagttaatcctcggttgctggtgagagaacaaccacagcacagcggacagaatgtgaatcggctaacgcaagaccaggttgcgtctacgttcttatctccccaacacactgctgatccaacccagcagtagctgattcagcaaacgccaccaaggcagcaggttgtgcagccgacccaaaaaacacccccaatccaacaggtcgtacaaccagttcagcagacgcttcagagatggtaggttttgcagccaattcaatagacgccattaaggcaacaggttgttcagtcgattcagcagcaaggcttaatgaatgcatcagctgggtttgcgacacctgatggtcagcttgtgcagcatgctgcaaatcaggtcgtcccagagcacttggttcatcacgtgcaaccggatggcacggtgatacctcaatacctcaggttattcctgagcatttggtgcgcaatattcagccggaccttcagaattaccaggggggcaatttgagttatcagtatcagccgccatccccgcaagttcaataccagtaggcaggatcggctcaaccccagtttgttcctcaatacaatcaattcgagcccatgacacagcaacctcaaggaacacctcagcaacgaccatggaccgatatgattgcggatgtcatgaaggagcagtttgggcttaggccgaaagatgctggaaatttgtatcgacaaccttaccctgaatggtttgagagtgttcctctacctaatcggttcaaagttccagatttttcaaaattctcaagacaagatagtacttcaacatacaaacttgttagccgattcttagctcagtgtggtgaagcatcggctgtggatgccttgagggttaggttgttccggttgtctttgtctggatcagctttcacttggttttcttctttgccatatgggtcgattaacagttgggccggttgggagaaacattttcacagatatttctatagtggggtactttaaaaacgtcgagcctggtaaaccccaggcgatcccaaacttaatcaccttgtggaacatccccctttcgctatagggcgtg

SEQ ID NO: 28395 - DNA, 35834 bp, Oryza sativa
  unsure (1)..(35834): unsure at all n locations
ggaggatgantttcgataactgatgtaactattccatcagcccacagctgaccantggtctgcatttttgctagtggctgccttaaatgggctgcttgttctaacacatctacagtggaagttgtttcatttttgcagcaaatgaaaaaaaaggggtggcgctagcctaaaccatttttgaagtagtgaacgtgcaaaacttgtgcagaaattaaagaaacgtattatgtgattgttcttaacagaagagtttaattattgtcaccattcaagggagtaaatacaaggtttgtctaggagattgtctatctgtgtgaaatcatgaaagagtgagtgctattcttctgtcagtatcttgaaccactatctttgatcatggaccagcttagtacaatgttctactgggctgaaggtaaggggatcctgctgatgaggtgagatgtcctagtaaaaaattgagaagttgtgatggaggccttcaatgacatgaaaagtgatgccaaggtaatgtttccatcgatgaaagagtgttgtggacttagtgaatgcattacatgtgtcacgtatagttctcttgtatgttgtatggaacccgtatgttggaaggtaagggatctgccgagcttatagaattggtcaagacaagattgtgtacacatacaatctaatcatagaaggaagaaaggagagaaacaaatacgacagacaagccaagaaggatcatatgtatcaagcttgttacaaagaagtgatgttcaatgacaagatagaagcaatggcatcacataggagctcaaaggcatgtttgtgttgattcttcattttcaatgcctgtaaacttagagctaaatcttataatttgattattatcagattaaaatgtcatttcgattcatctgcaacaaaaatgtttgtaatcttttcatgttgtttgtagaagtagacatgacattttctaagattcatcaatatctaaactatttgcttctctagaagagaagcacctggagcccagctaaacagtttcagctccacctaaaataggagcggagttgggtggaacactctcacaaaataaactaaaaatgtggagcatgagttcagcctactccactatagacctaatggaacaataaatttagaagttgaagctttaataaatagccccttgctattcatacttaaacatttaaaaaaatctttaaattgggtatatactcaatctgaatgttggtgccccagttaattttactctttgtgtgtgtgtgagtgtgtgtttgtgtgtgtgtgtccgtgtgtgtgtgtgggtcatctttgatgggccaaaaatatcatgttcaaaatatggttactggggaggacccatcacacatatgaggtcatctatgacgtgtcgtagttgtaacccgtcatagatgatttgtgatgggtgacaaccatggctcgtcatggatgacatgcatccctgacaagtgtaatatcatggactatcatagatgagaccacttatgtatgacgggtctttaactgacacacgtcatagataaagttatctctgaatggatgctagctttacgacccactaatgatgagtgaaaatttaaaagtttcgaattttgcaaaagaaaaactcagattgagacatgccctatataaagttgtagttctcaatgatatctacaactttataactaacaatattttcattacagatcgtttacatcctcgggtaagaattacaagtgatgagatctacttttaaaaacaaaattttgagttttttcaaatgacctggatggaaacatgccccatatgaaagtcatagagcttaaacagatctacaatattataattgacaatattttcatttgaaatagttttgcatacctgaatatccattataaggtgtgatctattttgaaaaatgaaaaattttatttttcttcaaatgacatcggatgaagatattctccatgtaaaagttatagaacacgatgagatctataactgcttagttgataatgttttcatttgatgtcattttgagtattaaataaatgttaaattattcgaacattaaatatctgttaaattattcgaacatttatagaaaaaataataacaatgaatgagtactcaacatgtgatgagtaggtgagttggtaagggggttctttgtggatgtggatgtcttgagtttgaaactcactatacacatgcatgtctatattgtgcggaaaattgtggatttgtaggtagtgatgtgtgaccatgtataggatggctagtaaaataaaaaaatattttttttgagtttttttgttgctttaaaagttcaaaaatcgtaattcttgctttgtcattagtgatggatcacaagttacaacccttcataaatgagtcatcagcgatggacggcaagttacgacatgccactaatgactcatctgtaacgagtgacaagttatgactcctcaaagatgacttacaaacctgtcagagatgagttgtctatgccaggtgttcacccgtcacatgtgagatttcgtcatcagtgaccacttatctctgacgagggctgaatccgttagagatgacggtttgggcctatcagtgttgacctcgtccggcgtagtgacaagcatgattaaagtttcttcattgattaaataagtctcaactaaataagtaacacttatatactttttctaataggacgaacagtgaaacatcatgttaaaattcaaaggtctcatccatttaaaaaattgaacggaatatgtgctgctggcattgacctagataaccgtgtacttcttcatgtgcagcagggtgaccgagtgtccggccatgagaaagacgacctgcagagctctggagtctggaggtctagctctttactgaacatgttgtccatagctcaaacgctgaaaatagcaagaggtagtactttactggaggtctagctctttactgaacatgttgtccatagctcaaacgctgaaaacagcaaggggtagtacattactatcaattttcagtaaactgattactgaaagcatctcgaggtgcctctgctcatatttttttcgtttgacttactctcctacattcagatcggtctagcttaactcatcacgcctctactattaaacattgcaagaccttcagaatgctccatccatctccagaatcacatcctaccttcagaatgacagacaactgcaacactttctccaccattgtcgcggaggccgtgagcgggtcacatgtgatcaagatagctgggtactcaagaatcaaggtgttactccgcaacggtgagtccctgacatccatccctttcagcgttgcaggccacagctggaccatcagattctaccccaacggtgattccgcggagagccaagattacctatcgttctatctgatccttgactccgccaattcctacgacgtgaaggtgattttcagcttcgagttgcttggcaagaatgggagatcagtgtcgtcttacagcttcactacagatctccgcaccttctcctacaaaggctcattgtggggatacaacaagttcattcaccaaacggtattggaagaatcgtcagcccatttaagagacgattcgttttccatcaggtgtgacatcaaagtgttcaaggagatctacagccaagaaaccaagggtgttcatagcaagtttgtggaggttcctccaagcaacctgcatcaacatctaggcaacctcctagacagcatggatggatcagacgtggtcttcgaggtcggcgaggagagattctctgctcataggtgcgttcttgctgctcggtcatcggtcttcaaggccgagcttcttggcaccatgaaggagaaagccgatggagccattcaagtcgatgatatggagcctggagtgtttaagtctttgctgcatttcatttacaccgattccctggacacgatggctcaagaagatcagagcagagacgaagcaagcgaggaggaggatttggtgatggctcagcatctacttgtcgcagcggaccggtacaacgtcgagagactgaagctgatatgcgaggagaagctatgcgagagcattgactccagcatggtggcaaccagtttggcgttagctgagcagcacaattgcaatgggctcaaggaagcttgctttgagttccttgcatctccttccaacctactggagatgatggcaagcgatggttatgaccatcttaaaaccagctgccctgctgttctcaaggagctcactacaagatttctgcctccggaaacgaaagcatcagaagagataaccattggtctatataattagttcttcaagtatgcttattttgattgtgataatcgaaaagaaagttttttttagtgctaatgccgtggtatttctgcaccttagaaagctaccaagtttatctttcctggaagtaatggccttctatggatcaagtttttcagttgtttctgacattttttttccttggttttttctgaagtgcaaaatttgaccatgtatagttagtccctctatactgatatgctattactctatagcccttagaaattccatgcgtactatcatatctgaaaaataattaattgtgtgcatttcaatagtcctatttgtaagaatttctttgtttagtagatctaattccagaaactaacataccgtgaaaaactatatatattaatatcacagtgcttttacatgtatatttccaatacgatccatgagcacagaggaattttagagaaatattgtaggatcgaataacaagactaagccttccagagagaggtgaatggtcccaacaccaaaaaccgaaaacttttaactgaatgaaaagtcactctcgaactgatggagatcggtctgaccggagttgaggcgctggtctgaccgcacagatgcatccggtctgaccgctgtagccgctccgatctgaacgtccgtggcattgccgtcgtccattgctgctgaggtgacgccggtctaaccgctagtattcctctagtgtgacaaagttgaaagtagattgatttttattacttctatttgtgtttacaaagtgcaacaacaacactcctcgcacaaacccttctccatcggaaagatttatggaatggatcagtcatgggtcaggcttatccaaggtcactgccggacccaggggttccaggtgtgcaccggcatactcaaaacttccgaagtaattgtagacctccgtttttcaatagatggcactgttgactttttgtcgtacgtttgaccattcgttttattgaaaaaaaatgtgagttgttttatcactcaaactactttaagcatgatttataccgtatacatttgcataaaatttttaaataagacaaatggtcaaatatttgttcaaaagtcaacgacgttatctattaaaaaatggagggagtacgtatgagtagtttgtagcagtgggctgaatgatcaatgttcgcaacaaagacttcattgactttttaggccatgtttagatgggactaaaacttttaagtccctatcacatcggatgtttgaaaattaattataaatattaaacgtagactattaataaaacccatccataatcttggactaatttgcgagacgaatctaatgagcctaattaatccatgattagcctatgtgatgctacagtaaacattctctaattatagattaattaggcttaaaaaatttgtctcgtgaattagcttttatttatgtaattagttttgtaagtagtctatatttaatactctaaattagtgtctaaagacagggactaaagttaagtccctggatctaaacaccaccttagtccttctaggacaagacccattgcaggaaagacttcattgacaaaacctattccataatcctgggactaattttagtctctgtcacatcggatgtttggttactgattagaagtattaaacgttgactaataataaaactaattgcataaataagagctaattcgcgagacaatttttttaagcctaattaatctataattagcatgtgtttactgtaacatcacatatactaatcatggattaattaggctcaatatattcgtctcgcgaattagtttagggttatggaacgggttttatcattagtcaacgtttaatacttctaattagtgtcaaatatccgatatgacatgtagtcccttgatccaaacaggcacatagtccattcgctgatttctgaccatgattcccaaacggaggcacgccgtggctcaccgccaatcgggtccagcaaagtggcgatgtagctcaacaagtctttcacatttttacaaactttacttcctgttggggccaaggttatattcagtggcaaaaatgttcagtagtgacctggcagaggtctttcatatgccactctcatatcaagattgtcaggaattcctgaaaattagctcggaaatacaaggcacggtgttaagctccaatgcagataaccggagtactggacatatatatggggtcgacacatattttttttatgttttgaacttttttattttttaacttaaaaatagaccctgcaaaagttatttccatattatgatccttttggctacgtcattccatctgacgtggcaaaacattactgacacgccacgcatagcgggcaaaacaatactgacacgctacgcatagcgggcatgatagttctattttgccatgccagcgagggagacgtggccaaataacgctgccatgccaaccagatcggcgtgaaactgttgttttgtcacgttagtccagttcgcgtagccaaaaggttcgtatcttgaaaataagtgttgaaagggtttatttttaaaattaaaaattgaaaaagttcaaaagataaaaagaattcgtcgacgcacctactcaaagattgtgcaaattcttcttcgctggaatgcaacctccgacggggtcttttgatatggaagaaaaggtgtataataaaaataaaagttttttggctggttattgttcaatgatcagctaaatacaagagaaatgatggatctcgaacattgtgcatctctaaatgcaatactcacttgttctttgtgtgtcactgcatcaagagaaactagaacctagctgttctttgactgccctttcagcagggcctgctggagttggataggaatgcaatagtctctaaacttctataaaatcgttgttcttgtgagattgacactgttacagaaatgatttttctggatgcccgtcccggtagattccagacgggttgtaagtggcaccgtctggaaaaaccgggcgaccggtgccgggctgtcgcccgtacagaaaaatgcattatctcatgtggtcgacttaagaggaccacacggaaaaatcaattttcgcgtgcgagcctcttaagtgaaccgcacgggaaaatacatctccatcttttccctgtcacccacttcaaattttcacatcctctctcttccttttccctctcaccacttcaaatttttcacatcctctctctttcttttccctctcacccacttcaaaatttccacatcctctctcttccttttcccttttattctccctcactccctcctctctctctccttttcctatcctctccccctcccctctctctctctcctctctctctgcctctttcctctcgtcgaagacgaatccatccaaagctaagctagcctgcatgcacttggtcgatgaagtacggggcgtcgccaccaccaccgctgatggcgcgggaggaggcgcagtggctgctggcagaggcggcggagcggcggctgttggtggaggcggcgtggcggcgacggcggatggtcacggcagaggccgggagcggccgcggtgcaacgaccagcgacgacgaggacgacggtgaccacgagcggtagcgcgacgacgacgaccacgagcggcggcggcgcaccgacggtgacgacgacgggagtggcggcggtgcgacgacggcgacgacgaggacagcgacgatcgcgagcggcagtggcggcgggaggagcggtggctgcgcgaccacggcgacgacgacgggatttcttcgattttatttttctcggtttcttttatttccgtgcgggtggtataatttgtccgcacgggataatcgattatctcatgcggtcaacttaacacaaccgcaaccgcctggatgcgaaaatattgattttcgcagacacctgggtgcagacgggcaggacctctgtacgaaaaaatgcattttgaccacacggagaaatcgattctgtagtagtgtgacattcaggaggaacggatttatggaaatagcactactagctttgctggcatttcggaaacaaagaaatgctcttatctttcagcagattcagcctaatgttaacagatggtttgactgcttcagaaatgggattatcttgcttcaggatgaatgagcaactatacaatatagtgctgttacaatttctgaaattgttctgttttcctcttcctttttcttttgtacttaatgttttctttctttaatccgtaatatttaactactgggccttaccagtaatgttcccttcaaaaaagatcatacttcaaacaaagtgaaaaattatatttattagcaaccttttgaattaggactagttgtttagtagtcaatagaaagctcaaagtacgaatctactactaattacatgattccttatttttgatccaaatcacaataacttggaatttatgaagtaatgtatctggtatatgtacgataaatttttgaaaattaataacatcaataataacctgagggagtagtatttacctaatgtatagtttctatacgtgggaccaaatataataaatttatctattatcttctcttttttgtatttattgatttgcctgccgatttgtgtcatatacacttttttggggaaagtgtcatatacactattttgatcctagtacaattttacttgtttcttttttcagtacaatcttacttgtttcttttcttggtgtactcggtgtcttggtaaaacatagtttatatttttcagacctcactaattctcttgtaaaattgtctcgtgccatgtcatttggagtttttttactacctctcgttcttaaatctaatgatggctctttggccagcctccatatccatggtacgattggtcagccattctgaaacagggcaagcaaatcacaaggtttgtcttggagattgtccatctttggtgaagccatgaaagagcgagagcttgtgttcaatcaatgtcttgaaccactgtctttgattatgcaccagcttagcacaatattccattggactaaaggtaaagagatcctactgatgagtggaaatgtcctaggaaaattttgagaaactgtgattgaggccttcaatgacatgaaaagcaatgccaatgtaatgcttgcatcaaccgcggagtgctataaaggtattacacttgttggggcatcgcatgtagttctccttgatgttgtatggaacccttatgttcgaaggtaggtaagcaaccaagcttatagaattggtcaagagaagattgtgtacacatacattctaatcgcagaaggaacctagtagaaagacaaataagacaaacaagcaaggaaggatcatatgtccaaactattgttttcgaaagaaccacatcaataccaaagcctgcaggatttcaacttgtcaaaaaaagtgatatccaatgataagatattggaagcaatgacatcacaaggggagctcaaagacatgtttgtaaagattattcactcattgcctgcaaacttagagctaaatctagtaatttgatatttggaggttgaaatgtaatttgatcttttgagattaaaatgccagttcggttcatttgagaataaatatttatattttttttattatgttgtctgcagaagtagacatgatattttctaagattcatcaatatatgaactcttggcttctccggaagaaaatatccagaatgtggagtatgataagctcaggatgttgatctggttaaattattcattgtcaggctatgtgttgattgcttcaatattaaaactaggactatttgctcccgtgtaatataatgatttgctctctttcgaaaactgttgcaatggaaacatgaagtttccatatcgttggtaactggtaagtatatggaatggcactatagcacatccatataagtgcttccaacactagttgctcagcatctacatcctttaattatctcaaaatttatgaaagcagctacttatgtgtttcttatttagagatgcaacagagcatcttatctgtggagaagaaaatatatgtgtgcacctccattctatcaagatggtgcttcatcgaaatttctttacattatgctcagataatttaatagaaatagtagaaaactaagggtagtttcttcctgattttggaagaactgagattatggtaattctcttaattgcttgagctccagggttcattgagttcttaagctagatgcacgaacggatgactcttgagatgatctgttcttaaacatgcacgatggattgatcacttgattgtagcatttttacaataactggttggtgattgtttagcattttacttttgcattctggtcatcgtaataggctgatgcatgcagatatgatgctggagtctgtgctatccatttcacctgtgtggtggtgtgtttgtgttgttgttgccggtttatatgcaatctaaacttatttggtatatgtatataataaatagagaaaatccaagaaatgcctttgacaagcgcccaattctaagaaactagataattccccacgctttgctgaggaaattaccaagtaatttttattttttaataatcgagcaaaaagtaaaaattatattagttattaacaacaaataaaactggtttgtcaaactacgttaacagagaaataaatttagtagactctgtatgagattgtagatgaaatatgatatcccgcactttgattatatggatgaatatatgttaattattataaaaatgatatatatatatatgtgtgtgtgtgtgtgtgttaaaaatattgtgaagaagatgattggatgttgatttgtagaattcaatgaattatagatgatgttgcatgcttgtataagttttatatgtaattattgctagtgaatgatgaggtgacatgttttcatgttgagtttttatagatgatgttgcatgctggcataagttttatatgtaattattgctagtggatgatgaggtggcatatttgcatgttgagctttagaattagtgggttataactttatagtaagatatgacgcattgataagtacgagttccatgaaatatcattgtataagtgactatgtcctagaagtgtgatcatcgttagagttttgttagtaaccctccgttaagtgttataggataaacagtgctagttaagtgttataggatgaacagtgcatttaacagggtaggatggatggaaccttaatggcgatgacattttatggacaaagtcgcttgtacaatggtattttatgaaacttgcactcttcaatggtatttcttggacttgggcatttgtcaatggtatttctggcattttctctaataaataacacgtctcattcacaatttcatttgcatatccctgtttgtaattctagaactcaatgcttcaaaaagtagcatttaagtgcacgaaaaatttttattttaatatgtaaattgcagatatcgtatactttcttgtctgttttacatactacatgattgaattttcctgtcagactgcatatttgaaatgtgctcacacggtcataccgctcagaaagttttcgatctccttaattgctcgttctagtttgctgctaatatcacccaattcccacaacaatgatgtatgtggtcgtggattttgccataagttcaaaataaacagggagaattgcaaatagatcccctcgctgcctcctctctcctggataagaaccgatcccctccctctcactgcaagaaagggatacagggtagcggtaggtacttcgtcggcggcaatgcgcggcaagcagcagcagctcaggacagcgcagcagccagcaactagtgggtaggctggcagcggcagcagcagctcgcggcaagcggcaacagcacaaggcagcaacagcagctcccggaagcggcagcagcacgagcgctcgcggcaagcggcagcagcgtagcagctcgcggcagcagcagcaggctggtcgtgttgagcaggcgcaggaagcagtagcgggaggcatggggcatccttgtcctaatttttatgagaactcacattctcacggtgttagtttgatctgtcagtttaatggcaagtattataggttccaaccatttttggtggcaactaggcaattatgttttttataatggcaaatccacgataccgattcaaaccaatggcaaatatgtaattggcccaaataaaaaccaagtgagtcaatttgcacaaatgtgatgagacggtaaaaagatagtgatactgggagtgcctttcatctggtgatattcacatttgagcgttcaaactgaagcacaagtacttaatagattaagcagacacaatagagagatggcaacaaacaagttgcagcagtgaaaaactggtctggtgccaatgagctcccatgtggcagtggggtgtgccacagaatggaggtgcgggtcacgagaggaggtaagggcggcggtggtggcagccgctagattggtaggggagggagatcagagttaggaggagtcatatatgggaggccgtcaaacaacctaaatcgttgcggttggcaaagccatcctacatgttcccctgtatgcgcaatcgctagaaacatgcacacacttgttcgtctaatatcccttcacgctacaagtgtggtttgccatatggcaaaatcttaagctcatcacgtgtctggatgggtactccgacctggcaaccaaccaggtgggcagacgctagatgttcgctagaaagccagggcaaaatggtatttgatgccgcaatctgccttgtttccttgaggatttgaaaggaaaggaatgcccgcatcttcaacatggtgtcttcctcgttggcagaagtagccgattagataattgaagaatgttgcacttggcgtgtggctggcctagcaggtccggttgtagatgaccatgaaggcgtttgtttgtatatgtgtatttccttgtgcattacatagctccatacttagccgcatagaagctcttgtggagctgcggttttaaccttcagtgcatgttgatggcaacccaactatcctgttggttttctgctttgcaactttttttttctccaaatcttaatgaaaatgatccacgttccatcgcaggctcggcaaagaaaagagatgggaggccctggcccagatagtccttgtgattgttgggtttggttgggcctttctgcgtttgtaagttataccataaatggtaggcacacaatgacgtaaaatttatctagtgataaatggtaggcacacagtgagtcagcgaggggtagggcgccgtaatggctaattagcgaacatccgctaactagtgatctagcgaatggatctactttcttttttccgattattccaattatcactaataattgcctatttctatttttggcaagttaatcctcgtaacgtacgcatgtgtatggggtgtggctgatcggcgaccagccgcgcgggcccgtactcgcgccgttcttagtccattagtacaactactactgctacaataataatactactactaatactactactaagtacattattactactactagtaatactagtactactataattgtttttatatgtatatatacacatatacaaagtttatatatgacgtatacaaaatttatatacgcgtatacaaattttgtatacgtgtatttttggttttttatacacgtgtatatatatatatatatatatatataaccttgtatacgcgtatacaaagtttgtattaccatatacaaactttatacaaactttgtatatgcgtatacaaaagttttgggtttttatatacgtgtatgtattaaaataaaaaaaacacatatataaactttgtatacgcgtatacaaagtttatatatacccgtatacaaactttgtgtaggcctgtacaaagtttgtatacgtatatataaaaccgaaaataactgaaaaaatatacgaaaaggaaaaaaacagaaaaaaccaaaaaaggaaagaaaaaacagaaaaaagaaaaaaaaccgtccgccagaaaaaaaaattccacacgtcgtcctctgcctttctccccgcgcgatacgtgtccggtcgcgtgggggagggggcgcacgactgaacgcttattagagttctcgctcgcatgtgtatgtgcaatgtacccactgcatgcgagttttggggccctatttttcatgggccagtttaagcccaatacaaagctttcatctttaaatttgtttttaaattcgtttagaattcatttccaaagagtttctatatctaacgtcatacgtggaaagtctgtggatataaactttgcatgtataaagtttggtcatataaagtatgcacatataaaatttacaggtcaaagtttgtgtgtataaagtttacgcgtgtaaaaattagacatacaaaaaatttgtacgtaggtgggctagaaggcctacaaaaataatacaaaggaaacggttgaaatagaattttcgggaataaggggcctagcttgaaacttctttgtgaaagtaggctatattttgacacattcacatatggatcctgtattatcctccttgggcatttcccattcgttttgttccttcttacacacatgaaggggttggtacggtgcatgatgcagccattcgcaaggtgtagcgcgcgcacacacgcgcactagactcacccggggaaggccgcaactgcaagacaagttttacccagtgctccctgctccggtaattttcgttggtgaggacctcaagaatgtcgccgatgttgatgaacgaacgcgaccggcagcgagcgcaccggaaaccactggctgtcatattgctgacctgcagatcaaggggtatcgtcaacgtggagtagcagctctaggcttaggccatcggagtgcggcgtgatgcctgtcaccttcagtgggtggcggcagggaggattgcagtggcagtgcagagccatgctctgtcgcacgcttccttgcggaaggcggtgagaagcgtctctcgttcaactccaaggacggtgaccatggatgctagtagtaacgccgttgccagattccacatctctgtcgcgtgtttgtcaagcaaatccgtgtatatatactaatataggccttgtttggatccttcgggctattaaatagccctccgaaattttactatttaggagtattaaacgtaaattattgacaaaaccaattctataacccctaggctattttatgagacgaatctaacaaggtatattaatccatgattagcggatgattactgtagcattactgtagcaaatcatggattaatatacctcgttagattcgtcttgcaaaatagcctaggggttatggaatgggttttatcagtaatttacgtttgatactcttaaataacaagatttcggagggctatttaatagctcagagcatccaaacagggcaatagagtactataagcttaagctatatgtacagatgaaactgaatcttcttattgttttttgtgaatagcccgtactatcctttgagtttcactccggggttagtttaatctctgatgtttcattttatccaaacaaaccgttgaaatctagcatttggcttaacgcggtcgttaaaccgaacaaaaaaacaccacgtggcattgccatgtcatcctcgcatgcaaggacaacaatcaaactaccattccatccttatatatacaccatattgcagaaaaaggaaaataagtaacaagccagaaactcatgacataaataatatcgggtgggctttctatgattttaccttttcacgtcatttttttcttgacaattatactcctcaacgtgtttactattatcaaacgaggtggtactataaatagatctaaacccttagataaaattaggtctacaatttagattattttttattactagtaaagagcatcatagtgtaccttttaaaacaagcatgtcctagctataactaagatctagagaaaatacttaagctgttagggtgcgcccggcccattgtactatgggccacccatattacattgggcttgctccaccacagacccaactggagccacaactttagctcttttctcgcaaaattaggaagccacatcaccggagaaacatagagcatttgatttcagctccaaacgatgtaaaccgttggatccttaaattcgtgaaacttactcctgactcttgacgaaacttcttttgcaaagaagacccttccgcatcctcacgtgagagaaaaggagaaaaaaaaagaaggaaaaaaacttgctttccttcgtcgcttccgctcctaaatcacgccgcatcctcttctctcttctcctcatcgttgtcgccgccaccgccgcttcctccaactcctccaatgcctctgcagtcgccactcctccttgtcatccacgcattcaccatccacgtcgcctccgtatgcctccctccatgcctctggtgactggtgacagcacggcggtggtaaggcacatcgcccctccatctgcattgccacctgcaatctgccattcgcttccacagaacaaatggtaaggacattactgaaactataaagggtcactggtgttccaaatcactaaattctccatattccaaaatgagcaaacaacaggtgtgtttctagcatgaatttcaatcatccatccaccgatcatcatatttgcaaaccaccgaatcagtggtgtacacaaataaaaggtgactaatgtagtaatatttataataatgatgatataatctgctggttcaaacatgaaaaagacctgattatggacattgtctttccgttctttacatggtacatatattactcaactcacaaaagactaatgctctgtgcagattataaaagctcttctggaggaagaacaattaattattcttgatgagttagtgcgtctgaacaatcttaacatcgacgtacatttatgatagtaattcctactccctccgtcccataatataaaggattttaagtttttgcctacaacatttgaccactcgtcttattcaaaaaattttaaaattattaattattttatttgtgacttactttattatctacagtattttaagcacaactttccgttttttgtatttacaaaaaaaaattgaataggacgagtgatcaaatgttgcaagcaaaaattgaaaatcccttatatttcgggacgtagggagtatgttgcagataactacagtgccctccaagcaaatgttgcagattagaatctgtaatgaaatgctctaagttgttttaagactgtgtcatgttagagttagaatctattgtgtcatgttagagttagaatctattttctgcagtcgacctcatatgtaatcatttgtagtacaataagatatttaatttttaatgttagttagattccaaatgaaagtatagtactaaattaaatttatgacaagggcatgcatgttagtatgttacataatgtaattaagaccaaatttgacctagaattttctaatattatcttataagaactaattcacctagagttttctatggaagtatggatgcttttaaatcttgatgacagagaaggatgtgcaatatctgtacatcttagatagctaccttaatatctttatctaaaaaaaagaagttcagatgaattctgcaacttctgactgaatatattttagttaaatttgaagaatcgaatagcaacaactaagctaaccaaaaggggggtgaatggttgtagctacaatagtcctcacatcaaacctagaaaatattgaggaggagatcatcccctttttgcagctcaatactattctgatgatcaccatccaattgaggttcttgagagattaatttgaattgtgtcatcaagattcagatgccatggataataaccattgatgccatgaaagggtgatcaacattggcccgagtacagatttcctccgaattacatggcattacatcgtccatcgttttttcttagtgaaaattgaaactgatgcaagttttttagacttgaaattttattttgtactgaactgggcggtcaccacgcctcgaaatctcaatgtatactgatgatgcagtagtcttcatcaacccaaagaaggatgatgtacaagcattccctgcgctccttgaatgcttctgacaggcaacaaggctttgcaccaacatacataaatctcaggtgatgctaatcaggtatgcctgcttagacctcgacgatgtgctagaaggcacgccggtgactagagcgagcttccctatgaaatacctggggctacccgtagccatgacaagactacgtaaggcagacctccatccattatttgacaaatccgttggacgcctagtgaggaagaaacattgggatagtagggcaaacaactctagtcaactcaatcctcacatcgcaacttgtctacttcccgatacccctaaaatttacaaaggaatccctagaggtgcttgagaaatagaggaaacggttcctctgggcaggggcctgatagcatcacggacgaaaaatgcaaggtcaactaggcaagaacttgtatgccaacaacttatggaggactggggatgctcaacctggaaaatttcatgagagcgctgagggtaagatggatatggcacgagtggaagtaacaaaaaaaaggcatgggtcatctagacactccatgcaaaatatcttataggctactatttacgacagcgacagcaataacaactggagatggggaagtgatcctttcctagaactcggcatagatgcaaggaagacgcccaaaagacatggcgccaaaagtctacgcgatctccaagaaaaaataggcccctccgagaggccatcgaggacaacacatggttacgggatctcaacttatctcaacttatcaactagtacggacatgacggtggaactcctagaacaaccagtcaccatctagatagcagtgcaaaacatcaaactcaactttaaggaaaagaatgagatcaaatggaagctcatatgccaaggagaatacacagctctttcaacctacgaggcacaattctttggcttagtcaatacgaattatgagatgttgatctggaaaccatgggtgctgaaaaaaatgccagattttcacctagctagttgtccagaatagagtttggactttcgacaaacttgcaacacgtgagtggccaaacaactcctactgtccactctgccgccacacgctagaaacatccttccacctcctggtggactgcagatacacaagtaaaatttgggagaccttagcaaattgcgagcagcacaagccgacagagtggagtgcaaccacaataatccatgactggtgggcagagctagcaaccaccaaatgactattgaaaaagggagtctacacctaatcctcctcacggcatgggaagtctggaaggaaagaaacaaaagagtcttccagcataaggagtttatatccatcagatccttgggagcaaagatcaaggaggaaggcaaaacttgggcctcagcgggagccaaacaccatgcgcttttaattccttaggccttttccctattgtacaattctttctttttattctacatgtaacttttacttctcctatattcaatgaaattggcacatcctgaaaaacgagcgagcatgtagtcttttatcatgtaaatatcatggcatgagcaagttgatatgtggctacagtggtagcagtgtgcacttgttagggcatgtacaataagtatatatgttataacaccgatggcagaagttcttccacatatattaagaataagagttggctcagtttataaggaagatcgggccaaaactatacaactagacggttaattgaggggaactatcaaaacctacactgagggcaaaaggagaaaacaaccttctacaacaaaactactaaggcacacggctcaaataattgttgccaagctcatcaaccgatgagcagcaccgacttctcaagatgggccacaacctccaaccagacccatacaattaaaaaccattaaccatggcggatggcttggcagctgagtgatgccacgtaagataggaatagttttttttccttttttgtctttttattcgccgctcgccatgcccaaccattaaccaagcttcttggtgggtcgtggttgcctctggtgttgcgagtagtttgcctggccaatggcgttgcgaataagtgtagttgcgcttggccaatcaccgtcattagatgtgctggccctaggagctagggatgggcgtggtctggggtgggctgacccaaactcgtcccatgtgacccaccaattctacaacaacactagttccaatgggtaccatgggtcgacccatgaaaattgctagtgtactgaatttagaagacactcgacagagcaaaccaagtaaaagaaactaggtaaaaccccgcgcattgctgcgggaatttagtatgataacaataaaaaaaataacgtgtaagatagctagataacatcagattaagtaaattaatgtggtttatgataatttaaatttaaatagtatgtagaatgatgagtcaaacgtaaaaagtaaggtggtatgacttcatggaagaagaaaagtagggagatagtttggaccgtagattaatcatctaaaggctaaaaacaattaatgtgatatgacttaattagaggaaaagagaaagataatttggaccatagattaatcatttaagcactaagtgaggatgaactatattagtatataggatatcataaaacgtaataaagatatacattgaaacattatgtgaattatgttggatgataatttaacatgtttgtatttgaaaaagctcttaaattataaaaactataaagatatagcatgtttgcatgatgtttaaatgtgatgattgttagtggatgatgatgtggcatcttgttaattagtgaatgatgatgtggcatcttgttagtggatgatgatgtgtcatctttgtatgttaagcttaaggagttagttagaggaaaaaaagagaaagataatttggaccatagattaatcatttaagcactaaccaagtgaggatgaactatataagtatgtaggatattataaaacatagtaaagatatacattgatacattatgtgaattatgtgggatgataatttaacttgcttgaattttaaaatctcttaaattataaaaactataaaattatagataatataacatgtttgcatgatgtttaaatgtgatgattgttagtggataatgatgtggcatcttgttaattagtggattagtagatgatgatgtgacatcttgttagtggatgatgatgtggcatctttgcatgttaagcttaaggagttagtgggggataactttatagtaagataggatgtgtacgcttgtattcctttgtgaactatgaaatcaatgttatgttgaagcaatcgtggaagcaaaaacaaaaggaacaggcttttcattgtttcactagacctatctaatttcagagaaccaattaaggaagtatcatgagaaccaataacaaacaaaccggctatgaggatttgggtgaagggagaaaatgacggtgccgtcgcgtgcctgatgcaagggatcgatcgatacctactgaagcagacccaaatacccacttgaaccggtctttttagtttgggccgggccacatacccattaaagccaaatttatgggacaggccaatgaggctcgtgggtagacttggaccatgccaatccctactaggagccaatcacatcgcttacatggggccattagattagaaatactaataatatagagggaaataaaaaaaaacccaacatatacgcaggcaacgtccatgctcctctgagaataagaatatatgaattggcctatagttcgatatgccaactagaatcactatgagatattccttccctcccaaaaaacccaacctaattagggatgagacacaaatggtacaacaaatatggatagcctgttcagattcgttgtcccatgttgtgtcccattctctactagcttaggttttttgggacgcatggagtattagagaggagaggagaggagaggagaggagggtgagagtcaactttttgcttaaggaaatgttggagttgcagtagcaggtcaggagtgatgaacatggcgcgcactgcattaatgctctaagagtcacaacataagtaggcgattcttcataaattttgataatttgaccctttgcaaaaactatttttacaaactgaatgtacgttggcacgctgacttagcctcccatccgcggtggcacggtattcagcgccacttgacgtggcgctgaggtgtctaagttcagcgccacatgatttggcgctgaaaaaggggtcattttttaaataacttttggcggcagttcatttgtaaaattagttttttcaaagggtcaaattgtcaaaatttgtggtgattcttgatgcacatagctgcctgtggagattatgggtaccacatgcccacacggtatggttatccgactggttataggggataacttatatctatagaatatgtaacagatcatgatttaggtattacgtttccctgtatattatggaacggcctaaagtcctgatttgataatattgtaaaatagatttaggaaactgataccgtatttgttaaggtttttatcttgtaatcccgccctccatcctatataaggtgggcaggagtccctctagggggcatgagcacatatgatcgtcagatctatactacacccggcggattcaaatccccaaacatgagtagggtattacctctcattgagagggcctgaacctgtctaaatcctttgtctccgcatccatccacttttatgtctcgtgcgctacccccttttattattgccgaattcatgtttcgacagttggcgcgccaggtaggggtacgccgagtttcctattgaggaatgcgatggaatcaattttatgagccgccggcttcgccttagcctcaggagcttcgacttcgtcgccaccgacaacttcaacaagcctcactctttgactttgattcaaatcagttggagaagatctaatctagctaaggaggataacaaccactctaccacgttgagtttcagattcgatctactatggccgccgccagcgtcaccttcatcagcaagctttttcgcttcagagagagaaactttatcgtcaggagaataaccggatactactgtcaacaggatcgtcaatagcatgggccgcatgccttggacgatacacggcatgctacaaagtttgcagtcctgatcttgcgacatatgtggtgtgcggttggctacgcacgcgcatcatggcccggccgactgcttcgatagccaaacagtccggtcagcatctttcctcgatctcacagcgacataatcaggggcttcggagcagctctcttattacatgcatctactcatcatcaccatgtattgcatggctgcctgctacaagccaaccaatcaagattccttaatctacaggctgctaccaacaatcgcaggcttgagaccgatcgtccaataagcatcgatcagtgcatatgagtcaattaatctactggagcaaatacagatgcatgcttgcacattcttttatctcctaatcagatatgatttgtatttacatgtccgactatgcgacagccatataacaggcacgttgtttccgatatcactgacacgatcttcatggacatggacttcatcgctgactggtttgttcgtcctcacggccggcctactacgttgctactgatagcgacatcatcttcaccgaccgtctcgcttccgtcgctgctgccgactggtttctccgcctacacggctggcctattatgccgccgttggtgggcatcgctttcaccgtcgaccgccttcgtcgccgccgattggtgtcttcattgttattgatggacgactttgttcccacattggccacctctgccatcaccaaggggaatattacaaagctaagtcatcattatttttctttatatgatatttttcttttcctctacctcactacatcaattggttcgccgttgactagtgagtcgggggctacatatgttatatcatattttttaacaattttcataatatttatcttgattgcttgcgacataatctgagtacaaaagtgcctatcgagttatggagttccatcttcctatgctttccgtttggtttgccaatggatagttgcctttgggccgattcctagcacccgggggctcgttggatggaccgaataacgcaaggtgcttagtattactcggaataattaaatcagaagcatagagatgagataaatttattttctgctcttaataattgcaaaagtacccgagtagtaaattctgatccgtgaaactttgttccattaatgacgaactcatgtcactcatatgcatgtttgggaagtacttaggctgactcccggtgcctggtggctatgactagtcgggcagagtgtttaaacgtaatgagtcatttgctcgtggaaatcaaaattgacaagagaagaaatacatatttataaatattttaaagtacttgaattttcatcgaggactgtttttacatcagatactactcatcctatatgtttgttctgcaagatccagatccagatatgcacaaaagggattcatggctttaagcttatctcttacgctccaggaatgaatcagtcagaacatcaccaccagcttgccgtcgtcgccgccgactggtgtcttcgcctatacggttggttggtcacaccaccgttgttgggcgtctacgtcttcaccgaccggccgcctcatccgccgccgactggtgtttccgcctacacggctggcctattatgccgccgttgttgggcgtctacgtcttcaccgaccggccgcctcgtccgccgccgactggtgtttccgcctgcacggcttgcctattatgccgccgttgttggatgtctacgtcttcaccgaccggccgcctcgtccaccgccgactggtgtttccgcctgcacggctggcctgttatgacgccaactgatgctatcttcttcacggctggctacgtcgccgccaccgctaataggcgtcatcatcttcaacgcaagctgtctacgtctgctgccgactagtttattcatttccatggctgcatgattctgccagtgttaattggccttatcttcttcactgccggtcatctcgtctgctgttgactagtgccctcacctctacatatggtttataccgctaccactactgatggacatcatcgtcttccgtcgccgactggttatgccaccgccgactggtgcttttatcttcacaactgcgcatcttcactaccggtttgcttctgttgccgctgactcatgtgcaacttcattactgctatgcaactttgtcaccatggtggagcaacttcatcttcatggtcttctgcaccggcaatctctattgctgctacttcgcaagttgtgctacttcaccaactacgacgtctacatgagcctcgacatattggcatgcgtcacgaaatttgacgtcgtgctaatctactactacaagtagttctataattttcaagacttatactcggacatcttcaacatgtaacctcacttaagcaatgagtactcgacgacaagctacagttctcgactctatgttcagttgtttcccaactaaccaaagagtcggaggctacacaaatacaagactcaaaatccgacaagttttatgtcaagataaagcaatcaatcaatcaaggagtcaactttaggagtcattatcttcgtctttacttcagagcagacgttctacttcagcaactcttattatttcactggcaattttgacttctggatgccgccacaatctgcttcaaattgctcaagtgtcaagtttgagatttaatatacatgtccgggagtttagagttatcaatcaatcagctcagtttcgacgagttggacaacaacatctacattcctctaagtgaagcttctacaacagctataacatcaagttctactgtcatttttataaatcaaggggcattgcatcatcttcgttatgcacatgctcgccgttacctatatatacttcatcggccctgacgtcttcgccgttgctaatggctattatcaatggacaattatgactacgacagaaggataagctacatgcataggggctcatcaactcaagcgcgagaattatatcttcaatttggacttgttccagatacattcaacttgaatttatggtcatgagtcgatttcttattctcaatgactggattattcattattccccgtaagggctatcaaccgaatacttgtgccagtcgggatttaatttttatatctattttggagtatcccatgagggataatcactcagatcagaagctattcacatgagctacacttggtatatatcacccagaagatttattacttaggagcatgttatatgcgtcatcctttaaagggtgtcgaaggcatattttttggcctaggcctaatatgtctgcagcccatattttcaggtgtggcctgtcacgttattttagggacttaggcactttttgcttaggccaaagtgcacgtgatcaagtgcccaataccttaaaatccttttataccgcagttgctcaactttttaagagttggtacaatgcatcttaaaaggtacccaacggtgaagtttttcatagctgccccgctgacttttttatatatagtcaaggcgctgtttgggttaataaagcaattgattggatacgatatcattgctttttggcacgtaagtgtgcacttttattgaccaatattatggcttaggctgattatatattgtggtaattttctaggtggttggtaaatcatttatgagtttatttactcggatgttacaccacatatgccatatatttttaggtgtggtgaaaccatgtgtcttttagggacttaagcacatctgttaaagcagtgtgcgcatggcgtatgcccaatactttagaaaattctttattcacagcatacaagcttctttatggctattttgctatgtgaattttcaatgatgtagccaactttaggttgcacacatcatattttacaaagcagtcggtatattactcggatcatattattcggagattcacaccgcatatgctatatattgatatcaattcacttggttgattacaattatcaaagccactcggttggttgaattatttattccttgactatatgcttagtttatttagctaaccacatagtcgggggctacacctattaggtgcgtctaatcgatgcacctgactttatttttcagccctccacagtcttcatatttggtaaaagtactcgagagaccatggcaaagataattgaagcatttggctttggagtaatctggttcgagagaagattgttttttgactgtgaaggtctcaggggctactatggagattatgggtaccacatgcccacacgacatggttatccgactggttatatgggataacttatatctatagaatatgtaacggatcatgacttgggtattacgtttccctgtatattatggaacggcctaaagtcttgatttgataatattgtaaaatagatttaggaaaccgataccgtattggttaaggtttctatcttgtaatcctgccgcccatcctatataagatgggcaggaggccctctagggtgcatgagcacatatgatcgtcagatctatactacacccggcggattcaaatctccaaataggagtagggtattatctctcattgagagggcctgaacctatctaaatcctttgtctccgcatccatccacttttaggtctcgtgcgctaccccttttattattgccgaattcatgtttcgacactgccagttgttgaatatatctcacctaaatcaatgtcaaatttccttggttatttgatttttacaaaaaaaaaagagatagtacaaagttggatgccgctatatatatctcagctgcataaaaaaaagagcaaatatccagcataacgttatcatttttcagaaaagaacgcaacactagctaacacatgtgcatatgttgacatgttgatgcgtggtgtgtgctttagcatatagggcttaggagaccttgggaactagttatacggtgatgcataggagagtatttcctgattccccaagacctgtgcttgattgtaacctgcttccagctcagagtctgtgaccaagtaaagcaaatgcagaaggaaggagggttacatagagcctcatcgattgtcataataggctaaagccaaaatcaaaatttaaaatttcaaacataattttgaaactgatataatgtagttcttttagcatttatttttaactcgtcaggaacacatatataaaaactttacttataaattaatttttattttataataaattaaaatagcttattaggaaatatgggtaatcgatgaggctgatatgctactactgctgtcggccggctggactagctgcaggcaagttcgtttcttgcacgtcatgaccatatttcagcaccgcgcgtgcggagcaaacggtcaatgactcagtcggcctcgtccgcattgttttacttttttgagaaataaaccaacggtatatttgcaatcgaaaataatttgtaaaatacatgttcttaacgatgtaaaaataaaagctaaaaaataaacttcgatgaaaataactcggttagcctcagtacgcaatgtttttaaggttaaaaataaaattttagctaataaacataaacattagcgaaaagatgaggttgctcgctatctttcgctgtcgagctacactcatcttctaattttacaattacttgtggtgtaaccaatcgatatgctatctatgtgtgaatgattgatcaatggatcagtgatgccgctgtgcagtagaacagaggtgagccaggggtactgttgggatacccgtaggttacgatagcttaatcaaaattttatatcgtgtaaatcaggaaccatacaagtattagatcatagatcgttaccactcgacaagctgcacagcggaagacgctgagaagttgaaggaactctcgcgaagtagcgggcgtcgatgtagaggaagtagtcgatcacaccggctcgaccttctcctcctcgtgctcgccgtactcccacgccgatcagcaccgtaaaccagcagcgcctctatcggtatccacacgtacagggatggaacgccacgcgcagatgtgctgcaccctcgtgcggctagggttctgctcgggaagggagtggcggctagggtttctcacgtgatgcaatatctccgccggtcacactcctcacgaatatataagatccattactcggacctccaaggcccgtaggactcatatttggattcctatccgaattaagctcatattagatctccatccaatccccttattccggcccattaagcgtgcgaccctataggttcatgtacactcggctataacccgaaaactctttttcggtccacgcatcaacagcggcccctagcagaacatattgagccaccgggcatacaaaaagatcatatcgactgaacctctagtgtatacttatatgaacccctttgcctcacgatatcgattaagctcaaggctagatatgtgccatcctctaatagctcaatcattcactcgaacctgttgatagattatataactcgtgattgactcctcaatcacctttggcatggccatgcatttccataatctacaacatcgaagggcccagagatatttctccatagaaggggcaaatcccatcttgattattcatattccactacatatttcatagcatacccgaaaactagttttataactacccaattacagagtagcgtttagcaatccctaagtaagctactacacatgttagctaggaaccatgataatctaaggattcaacaccaacactaaatgagatcactgatgacacaacacatatggctcttgcagtgtctcatgttggatctatccaacaacatgttcaccaacatgtgtccacattattaatttgttatctctataccatgatccatgagacatgatcattaattaacatatgtgctgatcatctaaatatatttgttccacatatgatatttgatcaggaatcctttagaaatagcaacacacaacataaagagtctcatgaaagaatcacatatttattaaccaataatgagttatctatttcaagaaataaagtcggataaatatataaacatagtatgtgatacaatcatctctatgattgcctgcagggcatatcactgacacttcggtccttccattccacggatcagctgagaattgattatttcaatcattaaactactctgaaactttacccttttttttttcttttgacaaactcacgatcggcaagttccgtggacttgtgcttgtggagtagtaaatcgcagcgacataatcttagtacttgcagattaattagggggaaggttgatgataatttaactttggcatttgtacagtacgctttctcaatatattgagctggtggcatcttaatatgtgaaagcaccaaagttatctcaaagagaatgagccacatcttctaaaatacgagtaacgtttgataaaactgataaataaaactacaccattagatcatatatgagacatatattggactaatcaggaggctcgcacaacttttatctctactctttttaatattatgtttgattaattaatcggttgataaataaaggaaaaagaataaaagtgacctcaaccttgaattcataatggagttattaatccctgtgattatcattaataatgtgatttgctgcaagattaacaagagagtttatttccctggatggagcacgtacatatgagaagtcgtatattgtatatattgatcactggacgtcaggtttaaatatatatgtatacgtttatgtgtaattttcatatgtttccaatttacttttatagatataccagctataatgtataagcgagtttataaatattatattactttcggtggtatgggagcacacaatagcagagtgccatctatcattgtgtcaattttattactccttccatctcaatatattgctgcctttaacatttaaaatgtgtcctaaaaatatataaatagctaattcacatattccctcatcccaactaattacaaccatcaagataaaaaaaactacttacaaccatattatatttatttctttttgtctattagttttttcagggcaattgcatttttgacgctattttgaggactagctactaatttggcccttcttttttgagtttgacccatttgaccctcttttttacaaggaaaaaagtacgaattacccccgaactatcgcggtcatccgaattacccccgaaccacaaaaccggacattcttcacctccaactatgcaaaccggacgaattacccccctcgacccaatccgcggtggttttggtctacgtgacgtacacgtggcagtccagtcagcaacttatttattaaaaaataggtggccccacctgtcggtttttgtatctctcttctatctcttctatccctcactcactctctctctctcttgtccttcagagttcagacggcgacggcgaaggcagcgagcgtgggcagcagcgaggtgaggcgaggcggtagccgccagggggctgcgcgccgcggccgcgtcgaccacaggggcctcccggtggatggcggcggcgcgagacaagggagcggcggatgggcggacggcggcgcgcgaggccgggcagtaggcaggcggcggcgcgagatgagtgggtgggcgctggacggcggacggctgcatgcagcggcgcaggcgtcggtgaatggcggcggtgcgagacgagggagcggcggacgggcgaacggtggcgtgcggggcagggaggtgggcagtggcgagagacgaggcggcggcgcgagacgagggggcgggagctggacagcggaggctgcatgcggcgacagcgagtacaagcaccgccgcctcgtccgctcccgcggcgccgccaccaccgccgtggccggaatcccggggttccacttcgccaccatcccggacggcctaccggagtccgacgccctcgcagctgcccacgctcgctgcctccgccgtcgcccctctgccgtcaccaccgctggacctggaggaagaaggggaaaggaaggggaggagcggctgcggcgaggggggagcagaccgcgagccacgggaccccgcctccggtgacgccatgctcgcctcgcgctgtcgcccaccgcccgccccttcctcacagcgtgccgccgcccaccgccgctcgcgctgccgctcatgcgcgccccgtgagagagagagagtgaagagagaggaagaggggaagggtatgtatgacatatgggtcccacaattttttaaaaaaaaatgctgactggattggcacgcgtacgctacgtaggataaaaccgctctggattgggtcgaggggggtaattcgtccggtattgaaagttcaggatgagcaatgtccggtttttaggttcagggggtaattcggacgaccacgatagttcagggggtaattcatactttttccttttactaatgaagatgagacttggccctattccatgaagtcaacatgacggtgttaactcaagacaaatatgtcatttatacccttgtgaatttaacctggtttcttaaagttttttattcaatgcagttttgtgcactaattagtatatattaaattgcctcaaacagaaatacatggcacagatttatgtgtaccaaaaaaagaaaagaaaaaaacatgttgacaccgcgccgccgacggcaaactctcaagcccatccatgcggagcagccgcttccaccaatcctccctccgaccctccgcgagccatcgtcgcctgcctcaccatgcgccgccgccaccggtgttccctccctccccgcagaaccgcctcctccccaccgaagtccgccaccgccgcgccgccttcgccgaccgctggagccagatccatcgcatgtgcgtctcggcgccaccggatccgtcgcctcatcgccgagcctttgccggatccaccctgtcggcgtcgcccctcctcctcctcgtcgagccaccgccgccactccttcgcctcgttgagccactgccgaccctcctcctcatcaagccgccgtcgctcctcctcttcgttgagccactgccatccctcccatgccgctgtcgtcgcagccactcctccacctcatcgagccgccgccgaccgcagcgcggctgccgttgcacaaggagggcagcgggaggaagttgctcttaggccgccgacgtcgctccctccctccacgagccagcgccgtgtggattcccccgctccgcgccctgcggccgctgccacggccgctccctccacgagccgccaccggcactcgccgagagagagatagacgagaaacggggagagacaggatagataaggatagggtttgttcgatggtattttggtcattaagaaaagtaattatatttcattcttttttttaaataaaaacttaatggtgctacggaaaaagggccaaacggagtgtttgttttaaaaaggtagggtcaaataagcaaactaaaaaaaatagggtcatattggtagttaggctttaaaacagggtcaaataagcaattgtcccttgaagataatattatatgtctaatcaattaactattttataaacttgtaatttttacttttgcttttaccttttataatagagtaaattttacaaaactacatgatttatggttcaagttgaagaaaaccacacacattttgacacttggcacttaagtacctatattttggtagtttagtttcacaaaaccacagtatcgatgaatggatttacccatgtgatgacgtggttgttacatctaggatgatgacgtggcatatcctattaatttcgtgcgatggctgataataggatcacacgtcctcgtcctatgtgaaacaaccatgtcatctcgcgggtgaatccattcattgatagtgtggttttgtaaaactacactaccaaatatatgtaattaagtgctaagtgtcaaagtgtgtgtggttttctacaacttggaccataaaacgtgtagttttatgaaatttactctttataatataattacaacgcacatgctttagcttgtacttagaggtaaaatgcagggtacgtgatttcgcccttaataagtcaccgtttgcccctagtcaggatggcagctctgtgggtccaaaactatggaattaaagaaatgataaagaaagaatccaatgatttacggtatatgaattgacctttctatccctagttatatctctcacccaaaaccaagtgtaaactgttcgggccaagtgcggggacgagttaattccaggttgctaatgttctttcacagaaccatcttcatttatctcttttcagtgctacctgtgtcctgtgggctgtggtcgtacgtttggagttggggcttagatccctatgttttagtgttgtttgaaactgatgaagagataaagattaagctgacgtacgtaaaacgaaaaaactttaacacatgattaattaaattttaattattacaaacttaacaaatggatatatttaatattttaaaacaatttatagatatttttcgcacgaaacgtatcgtttaatagtttgaaaagtgtgctaaagaaaatcaagaaaaaaatctttatctcaccgagataaaatttgtctatgcgctttccgtctcagttggtagatattttcgaagaaattaaactaacaagatgcgatactcaatactcctatctgcagccggcagccccgtaaagaaaccatatgtctagtattaatccaatctgcaattcaggctgaaagttaccacatatactatatatatatataggagaggctggtatatatgctggtgctggtgctggtgctatagcgtatagggcttagaaggcatcgggtactcgacgtgtccatgaagatatgtttggccatcgcattttttttcttccataactctgcgcttctagtaggagtacacgggttgtggcatggagaaaaaacagattaggcaaaaaagaaaaaggttaggaaagagggcaatatattttccctgagctgcaggtgagtgtac

SEQ ID NO: 28396 - DNA, 8910 bp, Oryza sativa
ttctcagtttgcagatcgatcacttaattagagcacatgcaaaatatgtaattgcatatatagaagcagctaatcgattatagaaatgggattgaagcaacaaatcttgcttgttcacggaagaacatatattcagactgaatgactaacttgatataagatcttaattgaacagggagagctcctccctccagctattgtagacttctcttcaacctctttcctcttactgtttgcgcgaattattttactccaactatcttagatttcgtgttctcttttcctagtttggactatatttttaattttcaattactcactcaaagcaaaaaggaactgctacttgttgtattaggtggttttgtagcacaatctatcttaatatattaccaaaagaggatagaaaggagatacatgttcgctccgggtccctataaattacaaagttaatagaagaaaatgagaaaaatgcatcattcgatattggtagaacgaatttataacattagatattaattgatagagttgcatacaaaatgcaattgcatttgcagaaaaaagacaaaattatataccagatacaattagggaaaatcgcattatcagttgcacaggattagctaattatgtacagggtttacactttcggaaatggctgaatttttttgtcatttcagtggtcaccgaaatttcgtgaacctcgggattactggaacttttttgcacgaaatatttgatattgtaacaaattttaattgaatttgactaaattttgacttttttttaaaaaaaatggacaatctgagaaatcctggagagatagttgcttggtggtcggttgcttgatgtatatggacacacatttgaagtattaaatatagactaataaaaaataaattacagattccgcttgtaaactgcgagatgaatctattaagcctaattaatccgtcattagcaaatgtttactgtagcaccacattgtcaaatcatggcacaattagactcaaaagattcgtttcacaatttatatgcaaactgtgcaattgattttttttgtccacattttatgtttcatacatatgtccaaatatttaatatgacagaagaaaaaattggaagtttgaatggatccgaacacagcctagcctatgtaccgatttatcggccttcattttctctctcccatgttatagtgtgatcttgttgcagacttacagttgtggttgcagtagtggtacatatgcatgatggcagtcaagcatgtcgtgttctggataatattgttgaacgccccgatatatgttgaccgctctgtttagatcacgaaaagaatatttttaagtgtcacatcgaatgcttgatcggatattgaaatgggtttttggacatgaatcaaaaaactaatttcataactcgtctggaaaccatgaaatgaatctagcctaattaagccgtcattagtatatgtgggttactatagcatttatggctaattatagactaattaggctcaaaagattcgtctcgctatttaccgtataattagttttcgtttttatctatatttaatgcttcatgcatgtgtccaaagatttaatatgacgtttttggaaaaaaaaatttggaaaataaaacaggcctcagtacggctctacctattgaaagcatatttctccggctatgaagtgtagctaggtttatctgctttaacagtagtttctttgtaaactccgtaatctgttatgaacctttcttttccattaacggaagagggagaagaatagtttcaatgttataaaaaaatccagcgtgaacaagaagcgtcttgtgcccatagtagaaaaaaccggaccgaacaggcagttcaaccggagaaaaccgaaaatagaggttggcatagttcggtcgaatagaaagacaggacatgcaattgaatcgattcagaccactttaaccggcaggttttatgatgaactgggcaataaaccgccttcagtcggaccagactaaggcaagtcattgaatgaatgggcgacaggacagcctagttagttcttaggctcgttttttgggccgcacttgttttttttttagcaaaaatcaaatgaaaaggtgcgttggtggggagtcaacccgtggtcaagggttgcaaggcaactgccgactgccgtagccatcctaccagccagatgtttgtattgtaaaatcaaaggtgtttttgattattattgtgtgatgaacaattgggcattggaaattattggttttgttatttggaatttattcacgaagtggttttggagatgattggattcataggtgatcgcaggattttattattttatgtgaccggtcagaccgggctgtgtatgccggtcagaccggcggtgaccaagcggtcaggccggtcagactgtgtcgttttcggtttcgggttatttgtttggatatccgtgattatttcatgattatggcttctagatggatactatacgtatgtaatactgttatttgctactaatgagtcaagttggagatagcttggtctcggaatatggtttctttgtttatttcatgtgtaggtgactcgatgcctcgggagagtatttgcggtgatggaccgggagtcggcttggggataagacgacgtccgtggtggtcagagatcatgcgggatacttaggctagagttgatgagcgtggttgatggagattccatatggcatacgatggaggtattgtgtgcgtatgggatgcggagtcgaatttggaaggagtccgaatttgatatgattggttatgtaaagtttgtttcttgtactagagggttttctaaggtgtttaggactcctagtatgagtttggttcgtggctttaggctctctacctcgagtataaatagagggggagcgtgaggcttcccggtatcgctttagagagcaattgaattgagttttgagttagggtttcgagtttagtcaaaatttttgtaaggagtgctgttggtgcactttgtaaacacagagagaatcaataaagtcgtcatccactttaagagttcttcgatttgtgtttatcgggtttcggcggtctaaccggcgatctaccggcggtcaaaccggcggcaagcggcagttagaccggcggcattcgggcggtccgaccggcggcggcgacaggcgcggcaggcgacatcggtggtcaaactgggtgatctataccagtcagacttacgacatccacacgatcagaccggcagatcgatctccgtcgatttcaagggtaacttttatttccgctaaaagttttcggtttttgggtataccaaccattcatcccccctctggttggcttagttcttgtgattcgatcctacaagtggtatcagagccttgttttcttctttggatttttatcgatctagagtttttaccatggctactcctgctaagttttcaactaagcctcatgtttttgatggaaaggatttttctcattggtgtattagggtgcaatcttatattatggctgaagattatgatatttggagaaaagtttctcatccttatgtgattcctgaagctattaatactgctgctgaaaaactgcttttgaacaaaattgcaaagctcgcaacattcttttgagtggtatttctcgttcggattatgatcgtgttgcgcactttcgaactgctcatgaaatttggaatgctttgagtaactttcatcaaggaagaaataacattaaagaacttcgtcgtgatattttcaaaaaggagtatattaaatttgagatgaaacctggagaagctttggatgactatctctctaggtttaataaaatttcgagtgatcttagatctgtagattcttcttatgatgctaattatccacaatatgagatttctcgtcactttttgaatggtcttgatatgtctatttgggtgatgaaagttacatctatttaggagtctgttaacatgtctactttgactttggattcactttatacaaaattgaaaacacatgagatgaatgttctttctcgaaaagttgattctaagtcgagtgctttggtttcttcttcttcctctttggatgttgatgcttcttcatctaaatcttcttttcttactgtttttaatgccacatccgatgatcaactcgaacaaatcgaggaggaggatttggctttggttgctaacagaattgctcgagctatgaataatgccaggaacaggaaaagaggtggtccaaatcattgctttgaatgtggttcaattgatcatcttcgttcgcattatcctaagcttgggagaggcaaaagagaagacaaagatggtgagaagaccaacatcaacaacaagccgaagggttcatcccaagggaggaagctggacaatcttaggaaggcttttcaacaagtttgcgccgccttcgagccactaagtgatgtagatggtgaaagtggagatgatgataagggaaagaacatctccgatgtttgcttcatggcgcgtggtgaatctgacacagagtatgaagataatgaggtaggtgcttttgaggaagctattaatattttgagtgcaaaaaataagaagtgtgagaagatgtatagaaaacaggaatttatcactgaatctcttaaatctgaaattgctagattaaaatctcttattcctaatgatgataattgctcaaattgttaggttttaatgaatgagatttcaaaaattagagatgttaatgctgcacatgatttgaaaaatagatcttctcttgcttgtagttttgctttgcacacacgcactttggatgagtttttttaactaaaaagttgttgtaaaaatatataattgcttttcatgctagattgatgtttaacatgatttctgctaaaaagttaaaacaacctcatgatgttttcgattgctcaacatgtaatttgaataagttgaaattgaaagatgctttaggtcgtgttgagtacatggaagatgttgtgaaaaacaatgaagtgctttcttgccccaaatgtcataaaagcaaaagtgtcatggtagattgtgaaaattgtgctaatttggaaaaaagaggtttcttatttgaaaaattctttgctaagattttctgatggtaaagagaacctcaacatgattttggatcaatcaaaggttagcacacataaccgtggtttagattttaatccttatgctcataattctagacatcctcctgttgtgttaggtgttggtgctagaagtggtgagattttggttaaacctgatactaacaaaactgtgtttaaatctgctggtatcatgtctaccttgaatgcatcttcttcaaaatctcctgttgttgcttgtgttgctaagtcttctaattctacgaatgtgtctaatcatcgccaaaaatatacttgttccttttgtggcaaagatggacatattgttggtttttgttttagattagcacataaacagaaaaaggagagagagattgcttttgcaaaatcaaagtggcaaaaatctggttttccctcgaggaaaccggtcagaccgcactaggtcctgcggtcagacctgctactgagcatcggtcagaccggcggtacagaagcggtcagaccggcccccggtctgaccggctgctgtacctcggttagaccggcctcggaggaatttttctgaaaattctaaaattgattttgcacatggatatatgcctattggatcttctggtcgtatgtctcagtactggattcctaaatttttattatcatctaaccccagtactgaggcttcaacttctgcttctgtgtaggctttggtggcaagaaaggagaacgtgtggatcgtggattccggttgttcgcggcacatgaccggtgtcacgaccggaattaacccaacgggcgttccttacgtgcgtgtattattccttgtcccaggaggcaaggtacaccaaaagttgatacatttcagagtttatcaagcggaagcgtaaatagttaatttattatatgggcggcgaaggcccagcacacacaaagacaaatgggaaacagcggaagactagggcaatgaccataggcgcttgacggcaagcacgagctagacaccaaagccttcatcttccaggggttcctcttctgggtttcggaaaaattgagcaagactgagtacaaccaccgtactcaacaagacacacccacaagtgcaggataaatgcaagggagtacaagggggttataatataaagggttagggtttgcagtaaacagcattaagagacacttagttgctcaaagctattttgtaaacacgattccagagctatacgatattattaatcaaggccgtgaacccacacgaacctgccttaacccaaggtctacgatgattcagaccgaactggcaacccgaccctgggtcccagctcgtcccaagccaacccaggccaaccattccatattttagttgttaagctggttttaagaattaaaacactaacttgggtacattgctcggcatgcccataaccgagggcgcggctattcgaatagattatactctgatcagaggtgtacatctttacccacaagacacatcttcctcacgtgtaatcacgtgccacataccaccacggtatacggacggaagacgtgacatagtttccaacccatcctagccatagacaagagtaccgacccaaccccacctacggccggaacccccgggacaggtaggcaggactgaacccctagcagcaggacaccggccctgtgccatgacatctcgactaccgggccgcagctcgtgtagccttcatttgtcctagagatatccatcgacccccgacttcgtccatctccatccgtgtacttttgtttataaccagactgagccacaaactaagccttacccactagacatgtggaagtacggtagtgctttgcaacagaggcccgaagaccggtccttatatggccgaggtgctaatatcaaaaccatgcaccccgagcccagcctaaaaccattttgaggattttgaatagagggggaggtgtgaatccaattccacaataatccaaccattccatagtgtccaggtgatatgaatatcccaaagtctagagttgtaaaaccacctaatgttgcctaattaaccagcgaagcatctacctaaaatcatactagtggtactatgagtagagtgtccactagttggggttttgtttattctagggtgaataaggaaataataacaataacaataataaggtcataacaaaggtaaataggcatggctagataaaacagtaataacgcgggaatttaaataaagcgataatgcaataattttaatcaacataattttataaactgggattcaatatgttcaaggatgatgtgacttgccttgctcgctttcccaaacgtcggcttcaacttccacgaagagcggatcttccgaagctgcagcgtctagacgaccaacggaaaagaaaagtcttttactctaataaactccatataacaagcaggaacaaagcacaaaaatgggttcttgacttcttaaggaaaaattagagacttgaacggtccaattccgaattcaaatggccaagttatggccatttgaagtttatatgctctttaaatgaatatttgcgaatttcttcagttaaattttaattttaaaagggtttattgcgttagccgaggggagggggcgcgtggaccgggtccacgggagtggggcccacgcggcagtctcacggtccacggtggaccgggtgcactcgggctcacaccggccggcgccgtgggtcccacgcgtcagccgcacccgagggcgcgggcggctgacggccgggccccacgcggcagccgctcggtgcgcccgaaggcggccacgtcggcgcggccggcgggaggcggcgcgcccgcgcccctatggtggccggcggcggccatgggcacatcggagcggcagccgagagaggggagggaaagggggaaacgaggcggtggtccaaggctcaccctaggtcgacggcgacgacgaaaaggcaaccggagcggaggaaggcggcggcgcggctcgggtcaacggggacggcggcgctccggtggtcgacgagcgaaacggaggggtggacgaggtcggcgaggatgcggcgaagccgaaggaggcagcgccgaggtgggaggtggtctggggcgacgacggcggcggaccggagctcggcggcaatggcggagagagagagcgacggcgcgagctcgattccggcgaggtggaagggcggcgagaggcggaaacggacggaggaggtgcagggagtgtttaaatagggttggaagggggagagagcggccggcggggaaggaataggcgcgggaggtccggccgccatcaatggcgccggcgagatttgcgggggcaaatccacccgtttgaacgcgagagagagagggaaaaatggggggaaagggagaggggatcacggggagtgattttcccctctttattgcacgcggggacggctggaggcggtgggattcgcggcggcggcggcgctagggcgcgggcgaggcggcgggagcggcgggaggaaggggatgacgggtgggccccacccgtcagcgagggtggcgggcgggcccgcccgtcagcggcgcgcgcgcggggagaggccggatgggccgcggggagaggagagggagggggagtgagatgggctaacccgcccaagatgtaagggaggaaaggggactctttagaggttttctttttataaacaattttaactttgttatttgttagaaatattaatttgggctctgaaattgccctaaaattatttacgcattttaggctttctgcgaaaact

SEQ ID NO: 28397 - DNA, 4308 bp, Oryza sativa
  unsure (1)..(4308): unsure at all n locations
gcgggccgccgtcagggcgcgcgcggagaagccgnnatggccgcggganagnaaagnaggggagtannatgnctganccggcccaagagganaaggaggaaagnngnactttttagagtttttctttttataaaatcattttaactttgtttatttcttaataattattatttgtgctctgaaaattgcactaaaatttatttacgcattttaggcttttaggaaatatacaaaaatcctccaagccttatttaacttttaactttgcacattttaattgttggaggctttcacacggattttaattattctaggcataatttagaggatgtattttagagtccttttgggacgtgacaaccggtgataaaaattggttctcctccctcaagaaggcatgcaagactgaatcgattatctttggtgatgcttctacatgtgccgttctcgctacaggtttggttaaagtaaatgaaaattttgaattgaagaatgtagctttggttgagtgctgttggtgcactttgtaaacacagagagaatcaataaagtcatcatctactttaagagttcttcgatttgtgtttaccgggtttcggcggtctaaccggcgatctaccggcggtcagaccggcggcattcgggcggtccgaccggcggcggcgacaggcgcggtaggcgacatcggtagtcagtccgggtgatctataccagtcagaccggcgccatccacacgatcagaccgagaccaatttcggtcagatggatctccgtcgatttcgaaggtggtgaagtggtggagacgccgcaatcggatgcttgtcccagctgcagttgacactccatttcctagaaccacaagcggccatcaatctaccttcctgtttgagttccggccgactgtggttgtgtggtccagtgcaagcagttatcgacttggtcgcagtgaccatctagtcccctcaaactcgtccaaaagatgatcgacttctttacaagttggtggtactgaaactaggaatgaaaaatttaatttgttataaatttgttttccaacctaaaattgttttccgttttaaattttcttagcctatctatactgcagcgtgacaaatctcttatcgaattcaacgctggttccgggcggacggccctgcctcgtggcgtggcgcggttcgaggatgtaaacgcgtgccataattttcgtggcctcgctccttcaatctcgcgactcgtatggcgcttcgtgatttatctggcaggtgcgatagactcatcgaccccatagagtgtcggcgtgcagcccaatggtccaagcagccatacaagcatgtaagccccaatgaaaattttgacagtgcaaggccctttttttttccctttggctatagcagtaattttatacatcagggaaggagatgcatttgtgaaatttctgaacataataagcaagctttcaacagttgattctctatcatcacatgcttaaccttcttctgaaatgcatatggatttcccactctgctaataagaagcagcaaattcacttaggttgtgtttagatccagcggtaaaattttttaccgtgtcacatcggatatacggacacacatttgaagtattaaacgtagtctaacaactaaacaaattacagaatctgcttgtaaactgcgaaacgaatttattaaacctaattaatccatcattagcaaatgtttactgtaacaccacattgccaaatcatggagcaattaggtttaaaagattcgtcttgcattttacacgcaatctgtgtaattagtttttatttttgtctatatttaatacttcatgcatgtgtccaaacattcgatgtgagtgtgaaaaaacttgccagggaatctaaacagggccttatactccatccatcccatttgaagtgcagccatgattttccgtgctcaactttgatcgtctgtcttatttgaaaaaaattaaaaacataagtcacacatatagtgctattcatgttttatcatctcataaaaacaaaaatactaagtataaaaaaaattccaataagatggatgatcaaatttgggcaaaaaaaactcatggttgcacttacaattggacgaggggaatatcacaacataatagtgtttaagaatttcatttgaagtcctcctgacctgaatgtcaaagcatgctgcctttgtaaaaaaaacacaagatttgaagggattgtgagcgtgttggatattaaacacgggacctgggggttgagaccatatacctcctatgaccgcatatcaagtgtatctcctatgttgcctttgtgacaatttcagtgtgtcctaatcagtaaataaggaaaaacatttgtcagttgattgtttgacatgtttacataataaagttgtttcttcagtagcttagaatttaaccgaccaactttattctgttcactttgacaatagagatacataagatagccggataggtgatgatggatcatataatacttgaaattaacaatcaagacacacattacttggcaattgatttggtagcatagaaataccacaggttggaaaatgtatattatatgttcctttcaagaaacagaatgtatcaatgctatcttatttcctgataacttggtttcacagtatagaatgaattctaaaacgtttagataatatcacataaaatgagtattgcacggtttataaaaccactagtagaaagcgcgtcaactagtgtgcctatcttatattctaatgctgatattgctagcaagctttgattaggccacgtggtgcctttcccttagcaaataagtctctagattatttgagagaaaaaatgacgccaagacatggtcactttgccaaaccatctccagattcccacgttcggctttgtggagaaataaaaagattcgtcaagaaaaannnnnnnnnnnnnnnnnnnnnnnnnnnnactatactgcagcatgacaaattagtagactattggcaagcatgcatatattagtaggtgcaactaatgaaattcgagtccaatatcccctacatactccctctgttccataatatagggcgcaactgattttttgaagtgtaccagaatatagggcgcccatgcacatgcaagcaagtagcattaaaacaaaagtatgctctggtcgacttccgtgcgcatgcatgcaaaggttttcaatgcgtggagttggctcttcatttcttgcatgttgcttacggcctctttctttcttttggttgctttaaagctcttggctcactggccggactccatttacaagctcacttgcattagttgtaacacatcggcgagcaccggcgagcagcgatggatatggcagagaagatggtggagtgcccggcgagcggcaagacgaaggccaggagttgccggcgcatgcggcaacaagcagagatggagttcggtcgtgcgcgatcgattcgtgtccacgccatccgaatgcggtagcgtgcgcaaatggagctcagccgtacccgagtgctttgcgacgccgccgtccgcatgcggcagcaagggcaaatggatatagctcttgcgcgaatggtttgtctccacgccgttcgcatgcggctgcaggaggagcgagctaaccacgtcaatgattgcgaggacagcgatggatgccgaaacctgtgatgacagcgtggttgaatcgacgatcatgggcgaaggtctcgcggccagcgctgatcatttaatcaactccgacgatgtacggtatgttattgattcactagcgaacgacactattgttccatattcactcgaacagaccgatgacaaggaagacagctagaattattgtatctgtctctatggaaatggcaaaactaatgttccctgagtatgtgagagagtatgcacattttctaatttgttcaagatcagttctttattttcaaattgttccatcctctattttttaagttcggttaaatgcaagttctttttgttaaagataaaatgaaatcaaacatgaatactccatttttttagttgttggacaaagcacagttacaagagtaaaatcctaagctatgcattgatgaaatccaatgcatcaagatagatttgcttatcacattgcaaccttattggcagcagaccattactttccaatgttcccttcttcagatgtgggatggcataatgttgccctccttttgcacgcataatctctctcacgcaaccctgttgtgtgagaaacacacgattgatagactnctgtnccatctgatagtgcatngcaatcaaaccctg

SEQ ID NO: 28398 - DNA, 10042 bp, Oryza sativa
tcatgctcaaatggtcatttgagatctgtgtgacttgccttgctggccttggaactcttcaaagtcttctcctgcaaaatcggactctccgggaacgtcggaatctaagcagaaaagagcaaaatcaccaaaacagcacataaacaatcatgaacagtacatgtggatatttttaacatgtagatctcaattttagaaaaatttagagacttgaaccaactaaatccgagcttagatgaattagttatgaatttttaaagattaaatcggattaaatcatttatatagattttaattgaattatgacgcaataaagaattatttttgaaaaggaaaaaggatttattgcttcagcggctcgggtttacggtggaccgggtgcacaggaatggtctacggaatggacggctgagatctaatcctatccaaaacggatggccgagatcaacttgatctaccgcggtctacggctgacgtcgacgatgacatcggcgatgacgtcaccaccgggggcggctcggccacgcacgctcgccggcgaacgatggcgcggcggcgcaaacggagggcacctacgggtagcgggcgacgcggcgaactcaccgcaagcacggacggcggcggacggcaaccagacggcgacggcgacgaggttgaagtgacggcggcgttcggttcgacgacgacggcggtgctccggtgatcttcgacggaaacagaggggtggacgaggacggtgacgacttggcgaacctgacggtggccttcccgagcgacgacgacgacctaagcgacggtatgatccttttgcttcaatgccctgaactcacgcttcttcaaagcaacaactcctacaggtatgtgtgtcttcttgaatgcctcagtgaactccgcccaagtgattggttgtccttctgctctgttcacccggaaatgatcccaccattctgatgcaggtccttgcaactgatgtgaagcgaaaacaactttctcctgatccgtgcactggagcagttccaacttcttctcaatagtgtgcaaccaatcacctgcttccactgggttagtagtactagaaaaggtaggtggcctcacacgaagaaaatcagctagcttgttctgcggcggtggagcattgttgtttccttggttgagctggttctgcatctgctgtatcatcatgttcattaattgagtctgttgagccagaacttgagcaagagttgggttatcttcattgttattatttccacttccactggtgcgagtgttcaccatctgttgcatattagagaagatagaaggagaggggttacactaaagacaagaccttaaccaggttaacactgatctgatgtgtgtagaccattatattgttcaggttgattaagcaagcaacctagtacagttacacactcatcaatgaactactccaatgatgggaatgcaaccatacctacacacaaagcaaacaaacgttctaccctactaactattcttcaaagacactttggcggcataggtttctaaggtaggatccaaacttcattccatcttgaccacttggcacttcggtccttcctcgatccacttgactgacctccataagtagacctcattggcgtcttcaagtttcaacaactagtttcagaactactcaagttgaaagcaggaggggagaggatgataaaacaatttgcaaagaattctagataaggaagaaaggagaaattttcacaaatcatgttttcggaaaatttgtccttaaggtttgaccatttggcttatcctacagtcgagatggctctgataccaacttgtcacgcccggaaattcactagtaatttccgaacttatttgtgcatgaaatcctcgtccaggaatcagccgaggtacacaaattgacaatttaatatacagattcatcaaattaactaaaacgataaatacttacttaagaggcactaagtcctcaccaagaagaaaactgcagcggaaaataaaatctagcgaagctccggctacactcccacaggcagctcaactggggtataagccaaacgtcttctccttctggatcctttttcttcaactgaggttgattgattattgcaaggtgagcatatgacatactcagcaagccacacaacaaatatgcaagtgcacaaggataccaaaggatggcataatataggctcatttgcaaaagcagcatttagcaaaacatttaagaggaataaaatagtggagtagttaatcagaaattttaatcaacactgaacagcacacccatgctgcacaggcccaaccatcctgaacaaccatacccggctgtacagatcaaatctccaaaccaggagctaagcaaattattaccagtataacatcattaattattgtgagaggtgtgagactaatcacgaaaaacattgctcaactcgcccataaccgcgggcacgactattcgaatagttttactctggccagaggtgtaccactgtatccacaagacacagcctcaacatcatgtctaccatgcgtcgcgatactggaaagtacccgaatagaagctgtgacaataccctctgcacaacacaactcacgacagtgcaccattcctggatcataatcacccccttataaaacaaggcatggactccccagcgacccctgtgggcttatctccgccacttctcagtctggtgctccgcaatgaatcatgctatacaaaaggtaaagctgttgcccacgctggcttgtggttggcacgattaatgtttcacaatagtagctcgcgaaccggtccttaattgtcatgagcacgactctcaaaaccatgtactcacaacccaccattatcaagttttagttggcaagtaattaattaaccaatcacgattgaccatcgtgaactatcattaagccatcataataatgagtcataagttatcccaatagtgtgctaatgtttctaagcatggctaagcaatcatatctaatatctagctgaactaatatatatagctcaactagttaagttataatatcccaaggtatcaaggaatagagtaatcaatgcaaacaggccataacaaaggaatagattcacaccacccaatgacattcgaaaataaatacacagttgaaataaatagagaatttaaatataggatcaacatgctcaaaggattgtgtttaggatctgtgtgacttgccttgcaataatcggtcttcaattaatcttcttgaatacttccggcgcactcgcgaacctttgcaatgacggaaacgacaagctaacacgcaaaacgaagaaaaagactaataaaaaccaaataaacaatacatataaagtaaacaaacatgtagattataattttagatgaattatgagacttgaacggcctcattctgacttcaaatgaatttattatgaattttacaagattaaatctatttaaagcccatttaaaaagaattaaataaatttaattcaatttatggaaaattttaatatgtagatctttattttacacaatttttgcaacttgaaccacattaaactgagttcaaatgaattagttatgaatttttaaagattaaatcggattaaaacacttatatggattttaattgaattatgacgcaataatgaattatttttgaaaaggaaaaagggtttattgcgtcagcgctagggtttgcggtggaccgggcgcacggcaacggtccacgggaacggacggccgagatcaaccctatccaaaacggacggccgagatcgatcctatccaaaacggatggccgagatcgaacggtccacgacgggtctacggcagacggccacgatgacgtcagcgacaacgtcagcgatgacgtcagcaccggcggcgactcgggcggctcgggcgcgcatgctcgccggcgaacgacggcgcggcgacgcgaacggagggcaccaacgggtagagggcgacgcggcgaactcaccggtgaccaaagaagcggcggaggaacaacggacagcgccggcgacaaggaagaagcggcggcggagatcgggtcgacggtggtgacggtgctccggcggtcttcggcagcggcgaaggggcggacgaggacggcgacgcgacggcgaccacgatggtgacctccccgagcgacgacgacgactggagtgacggcggcacacggctggagcggcggcgacaacggcggcacgaggcggcacggcgctagggcgctacaagcgacgagaggcgaaggcgagggtggcggcggttagaggagagctcgggggtccttttaaaggggctagcgagcggcggcggaggcccacggcgaccggcggcgagaaggaaagattaaggttagaggagagagatcgatccgaatcaaactcgaatccacggatttccaaaccgaattagctcatgattccataagagaaaagatagaggagatctcaaggatcatttgccctcaatcaatttcacccgatcgggaaagacgcggccgaatttggaaggagacggcggcacggctcggctagggttcgggcggcggcggcggcgcgaggaaaacgaacctgacaggtgggacccacctgtcagcggccgagagagaggaggaaggggcgcggcggactaggccgactgggccggggagggagagagaaagagagaggttttgggccgactttcggcccaaagccaaaaggaggatttaaaaacatttttctatttaaattattcatgaaatgcaattccatttattaaaaatacttccttagctcaaataaatcccagaaaaatctaggaattatagaattaagcaaagtatttaacaaaattttatctagcccaattttatattgagatttagcaaattaaaattagatcttctcttttagacttttaaaatcatttctaataattccttttaaacaacaatttataatttaaggatttttaaacaagaaaaactcttaacaattataattagatcattatttatcaaataattactgaactgttctttgtatcatttaggaattgagctccgaaagatccgagaatatttcagagagtgtaattaaccatggagaatttaataaaaaaattaaatccattcatgctttatatttaggaaattttatttcccacatttaacttcacttgtaaattaaagatcatttaatataaattctattattagtttattaaataatttataaatcctgaaacaaaaatcaggatgtgacagaggcccacggcggccggcggcgagaaggaaagattagggttagagggagaaaattgaatccgaatcgagctcgaatccgacgatttccaaacgaaattagcgagagattccaaaagacaaaaggaagaggggatcccggggatcatttcccctctattaatttgatcggatcgggaaaggggcgggcgaatttggaaggggcggcggcggctagggctcggctgcggcggcgcgaggaggaagacgactctgacaggtgggccccacctgtccgcaggagggagagggggagagcggcggctcggctcggcgggctggatgggcctggcgctagcaggccggggtgagagagaggggttttgggccgactttcggcccaaagccaaaagaggatttttaaaacctttttcaatttaaattattcgtgaaatgcaattctatttattaaaaatacttccttggctcaaataaatcctagaaaaatctaggaactatagaatcaaatgaagtatttaataaaattttatctagcccactttcatattggaatttattatttaaaattagatcttttcttctaggcttttaaaatcatttctaataattccaattaaacaacaatttataaatttggggtttttagggtgtgacatgtatcctttctgaagcaaatcatctacttgcctcttgacctctgctagttcattggctgccattctataaggtctcttatggatcggagtttttcttggtaccagatctattctgaattctatatctctcttgggcggcataccaggtaaatcatccgggaacacatccgggtagtcctgtactatgggaatctcttccaaacttacttggttcagacttgaccttaaaggctcagaaggcaatgcgtaaacagttacaacttgaccgtcattgctggtgagagttacttttctattggcacagtctatcacacctttatatcgggctaaccagtccatccctaggatgacatcaaggtctttggattctaatagaataaggttggccagaaatggtactccttgaatctctattctgacggaggggctacgttgtgacgagagtgcttggttgctgggggtactaaccatcaacggacgtctaagatcttctacctccatcccgtgatttctcgcaaaactcatagacaaaaatgaatgtgtagcaccagaatcgaaaagcactgttgcaggaactgagttaacaaggaacgtacccaaaatcacatctggagcaccttgggcttctgcagcagcaacatgattgacacgagccttggacactggtgcggtggagttgttctgtgcagggacaaccttcacgcgccggggcttcggacacttgtcagaataatgacctggttccccacagttgaagcacactcttggcttgtttcccggctccctcttggcaggctgatgctgggctagagttgcaacaggacgtggagcttggttgcggttgttgttgccagaattgttgttgaagaactgacgctgtggacgggcaaccaacgaagatcctccctgtgacactgcctgaggtcccatagcaagacacggcctctgactattcccctgctgagctttgaagtgagcaatcctgcgtttcttctgctccattcggttgtacttgtcctcctggcgaatggccatatccaccaacttctggaaatcatgataatccccagtcattaatgggtaagagagctcatcattcagtccttccaagaacttctcttgacgctcttcatctgtacgtacatcttctggagcatagcgagctagacgattaaattcatgcaagtattcagtgacagagcgagatccctgagtgagcgtcctgaactccttcttcttgggagacaccactcccgacggtatgtgagttttccgcaaagcagcagtgaactcaagccaagtgattggttccgcagtggtcctgttgagacggaagtgatcccaccactcagaggcagggccatgaagctgatgtgaagcgaaggagactttttcttgattagtgcactgaagcaggtccaatttcttttctatggcgtgcagccaatcactagcctcaactggattggtagtgctagaaaaagtgggcggcctcacacgaagaaattctgctaacttgttctggggaggtgcatggttgttcccctggttctgctggttctggaattgctgcatcatcatgttcatgagctgtgcctgttggaccaggacttgggcaagcgtgggattctctccattgttgttgttgttgttgttgttgttgtttgggccattcccattgctgtgagtaagcaccatttggcataggcaggagcacaagaagagaaacaaggaggaaaaaactacttaggacagggaattgatttttattaacttgacttttattgatcttaactgagtttcattattacacaaaactgaagactctcacacaacttaacttaaactccctaacactcgaaagcaaacaaacgcatgcatttacatcccaacaatgatgtaaaccacatgcaagacccacacacgcaaccaaacttaaacaagcaaactaacacaatgatctagggcaacgacttaacaaggcgttctagatcttccgggcatcggaattgattgaaggctcgttcggcttgcccccatcatcttgagtagctccccactcgacctttgaatgggtgcgcttcgattcttctccatcatcatcacttacgttaacgaccgaaggattcgctgagactgggacaacttcttcttcttccaccacacgaaccttaggcgccaactggtagcgagggacaaatagagctctcttccttgtggtaagacgaaccctggccttttgtggtggtgcttctcccttcaacgcggctagttccttctccaaacgatcaactttgtcctcaagcttacatatcttaccacgattccggtcttcacgatcttgagcagctaacacaatctcagcgcggaactcatccatggcccacagcatctcaaccaaatgccttgtggtagcatcattctcaattcctgcaggttcaaggtagctgccacggtcacttccctggggttggcgaggatggtagcgatactcagtgtcggccaactgatcactgtagcaatcgcgaagctctcctatggcgatccttgccacctcctgacaagcatgaatgtagtttccccctccagcctcgaacatcagcgatgggatgtcttcatgattagtgttcaaggtgaccttgacacggcacttctcttcatcacggtcatgaggaatctgggcatacaaaggggcagtcccaaatcctatggcgaaggacatcgtacgcaactcctggacaaatccctcagtaccgaacaagtactcaggcttgaagcgcggcatctaaagacaagtgaaaggagggagttaagacatttatccaattaatagcacaagtttttggattaatttgaataaagttagaaaatcaaagtaaaaggtaaataaataaagtaaaccaatcttgcaagataagttgaaacagttgaaaacagaatcacaaattttgcacttttgaataacaggtttcaaaagaaataaaataaaagagagttataaaatcaacatgctaaattatattgcaacatgattgaataaataaataaataaatgaaaggttgtaaaatctctgctagaaagtgggccattagtatagtaatagatgtacagtactaacaacacaggaataataaataaattttgaatgagaacaattaaagggactataaactgcatgtgccattagcttggtttaattaaaagagaaagagaggagaacagttctactttttcaatctttttagagggcttctataggtatccatttggcataacctagggtcaatgtggctctgataccaacttatgacgcccggaatttctatccaaaattccaaacgcttacatgtgtgtaaaccctcgtccaggaatcagccgaggcacacaataacaaattgataatagagtgcaataattactctaataaataagcgaatagaaagtcattacagaggtagatagttcctctcaaacaataaaattaggaaaataagataaacggcgcaggcgactccattccacaagcagcttgaccagggctacgcctaatcctccacaccttcagcatcactgtagaactcctatgatgaatgattgcaaggtgagtatatgacatactcaacaagccacgcagcaaatatgcaaatgcaaggcataacaaaggatggtataatatagtctcatttgcataaatggcatttaataaatacttcagaatttaataaaacagtaaagtatttaattaaacaatattaatccatcgctatacaacatacccgttgcataggcccaaccatcctgaacaaccattcccggctgcacagttctatctccaaaccaggaatataccattccaaaccaggagctaaacaagttattaccaattacagcatcatttattacggtgagaggtatgagactaatcacaaaagacattgttagacccgcccaaaaccgcgggcacggctattcgaatagttttactctggccagaggtgtaccactgtacccacaagacacaacctcaacatcatgtcaaccatgcgtcgcgatacttaacaagtacccgaatagagatggtgacaataccctctgcataacacaattcaaagcagtgcaccgt

SEQ ID NO: 28399 - DNA, 6457 bp, Oryza sativa
ttccgctgcttagaactttattgattgagaggaactatctacctctgtaatgacattttattcgcttattaattagagtaatatttgtactctattatcaatttgttattgtgtgcctcggctgattcctggacgagggttcacacacatgtaagcgtttggaattttggatagaaattccgggcgtgacaagttggtatcagagcctctttgaccctaggttatgccaaatggttacccatagaagccctctgaaaaatattggaaaagtagaactgttctcctccctttctcttttaattaaaccaaactaatggcacatgcacttcataatctcttttaatggttctcattcaaaatttattccagtgttattagtactgtacatctattactgtactaatggctcatttaccagcaaaagttttacaatactgttttatttaatcttgctgcaataaaataaatttagtatgttgattttataactttcttttgaaaccagttattcaaaattacaaaatttgtgacctcgtttccaactgttttaatttatttcgcaaagcttggtttactttatttacttacctctttactctgattttctaactttattcaaattaatccaaaaacttgtgctattaattggataaaggtcttaactccctcctttcacttgtctttagatgccgcgttacaagcctgagtacctgtttggtgttgagggttttgtccaggagttgcgcacgatgtcctttgtcattggatttgggactgcccctttttatgcccagattcctcatgatcgtcatgaagagaagtgccgagtcagagtcaccttgaacagcaatagtgaagaggtcccctcagtgatgtttgaagctggaggaagaaactacatccatgcatgtcaggaggtggcaaggatcgccataggagagctccgtgatcgctacagtgatcaattggccgacactgagtatcgctaccatcctcgccaacctcagggaagtgaccgtggcagttaccttgagactgaaggaattgagaatgatgttaccacgaaacatttggttgagatgttgtgggctatggatgaaagtcgtgcggagactgtgttagcagctcaagatcgtgaagatcggaatcgtggtaagatttgcaagttagaagacaaggtggatcgtttggagaaggaattagccgcattgaagggagaagcaccgccgcagaaggccaggattcgtcttaccgcaaggaagagagctctatttgtccctcgctatcaactggcgccaaaggttcgtgtggtggagaaagaagttgctccagctcaagcggatcctccggtcatcatcataagtagtgatgaagaagaagaatctaagcgcaacaattccaagattgagtgggtagcaactcaagatgatgaagacgagccttcaatcgacctccgatgcttggaagaactagagtgacttgttaagtcgttgtcttagatcgttgtgttagtttgcttgctttaagtttgcttgtgtgtgtctcgcatgtgatttacatcagtggtgggatgtaattgcatgtgtttgtttgcttttgagtgttaggaagttggtgagtttagtggtgtgagagtcttcagtttgtaataatgaaactcagttaagatcaataaaagttaaagtaattctctgtcctaagtagtttccccggtttctcttcttgtgccctgtccatgccagatggtgaacactcgtagcaatgggaatggtcccaacaaccccaataacaacaacaatggagagaatcccactctggcccaagttcttgctcaacagacacagcttatgaacatgatgatgcagcaatttcagaatcagcaaaaccaagggaataatcatgcacctccccaaaacaagttagcagaatttcttcgtgtgaggccgcctgttttctctagtaccactaatcctgttgaagctagtgattggctgcatgccatagagaagaagttggatttacttcagtgtactgatcaggagaaggtctcatttgcatcacatcagttgcatggccctgcctctgaatggtgggatcacttccgccttaacaggactactgctgaacctatcacttggcttgaattcaccgctgctttccggaagacgcatataccatcgggagtagtgtctctcaagaagaaggagttcaggtcgctttcccagggatctcgctctgttacggagtatctgcacgagttcaatcgtcttgctcgttatgctccggaagatgtgcgcaatgatgaagagcgccaggagaagtttttgggaggacttaatgatgagctttcttacccactcatggttggagattatcctgatttccagaaattagtggataaggctattcgtcaggaggacaagtacaatcgcatggagcagaagaaacgtcggattgctcaattcaagacacaacagggaaataatcagaagccgcgtcttactttaggaccccagcccatgccacagggaggttcttcgtctgttgttcgtccgcaacgtcagttcttcaacaacaatgctggcaacaacatccgtaatcaagctccacgtcctgttgcagctccagcacagcaacaacctgccaagagggagcaaggcaacaagcccgtggtgtgtttcaactgtggagatccaggacattatgctgacaagtgtccgaagccccgacgtgtgaaggttgtccctgcccagaataactctgctgtaccagcatccaaggctcgtgtaaatcatgtcgctgctgcagaagctcaagatgctccagatgtgattttgggtacgttccttgttaactcagttcctgcaacagtacttttcgattctggtgctacacattcattcttatctacgagttttgcgggaaatcatgggatggaagtagaagatcttagacgtcctttgatggttagtaccccaagtaatcaagcactctctttgcaacgtagcccctctgtcagaatagaaattcaaggagtaccatttctggccaatcttatcttgttaaaatccaaagaccttgatgtcatcctagggatggactggttagccagacataaaggtgtgatagactgtgccaacagaaaagtaactctcaacagctatgatggtcgagttgtaactgttcatgcattgtcatctgagtctttaaggtcaagactgaaccagataactttggaagagattcctatagtccgggagtatcctgatgtgttcccagatgatttacctggtatgccgcctaaaagggatatagagttcagaatagatttggtacctggaacaactccgatccataagagaccttatcgaatggcagccaatgagttggcagaagttaagaggcaagtagatgatttgctacagaaaggatacatcagaccgagttcatcaccatggggagctccggttatttttgtggaaaagaaagaccatactcagagaatgtgtgtggactatcgtgcactaaacgatgtgactattaagaataagtatccactacccaggattgatgatttgtttgatcaacttaaaggtgccactgttttctccaagatagatcttcgatcagggtatcatcagttgagaatcaaagaggaggatatacctaagacaacttttaccactaggtatgggttgtttgaatgtactgttatgtcttttggacttaccaatgcccctgctttcttcatgaacttgatgaataaggtgtttatggaatacctagacaagttcgtggtggtctttattgatgatattcttatctactctcgaaccaaagaagagcatgaagaacatcttcgccttgcattggagaagctacgagaacatcaactgtatgctaagtttagcaagtgtgaattttggttgtctgaagtgaaattccttggtcacgtcatctcagccggaggagttgccgtcgatcctagtaacgtggaatccgtaaccaattggaagcaaccaaagacagtttcagagattcgcagtttcctaggccttgcaggatattatcggaggtttatagagaatttttccaagattgctaagcccatgacacgactgcttcagaaagatgtgaagtacaagtggtcggaagaatgtgaacagagttttcaagaattgaaaagtcgcttaatatcagctcctattttgattttgcctgatccaaagaagggttttcaagtgcattgtgatgcatccaaacttgggttaggttgtgttctgatgcaagatgggaaggtggttgcctatgcctctcgacagttacgtccgcatgagaagaactaccctactcatgatattgagttagctgcagtcgttcatgcattgaagatttggcatcattatcttttcggtactcgtacagaagtgtacaccgatcacaagagtttaaagtatatctttactcagccggatctgaacatgagacaacggagatggttggaattaattaaggattatgacatgggaattcattatcatccgggaaaggctaatgttgtagcagacgctcttagcagaaaaggctattgcaatgctacagaaggacgacagttgccattggaattatgcaaggaatttgaaagattaaatttgggaattgtcgatagaggtttcgttgcagccttagaagcgaagcccactctaattgatcaagttagagaagcccaaattaatgatcctgatattcaagagatcaagaagaatatgagaagaggaaaagctattggtttcttggaggatgagcacggaactgtatggttgggtgagagaatctgtgtccccgacaacaaagatttaaaggatgcaattctgaaagaagctcatgatactttatactccattcaccctggtagtactaagatgtaccaggatcttaaggaaagattttggtgggcaagtatgaagcgtgaaatcgcagaatacgtagcagtatgtgatgtttgtcagcgagtcaaggcagaacatcaaaaacccgccggtttgttgcaacctttgaagattcctgaatggaaatgggaagaaattggtatggattttattactggtttacccagaacgtcatcaggccatgactctatttgggtgatagtcgacagacttaccaaagtggctcatttcattccggtaaagacaacttattccggaagtcgcttagcggaattgtatatggcaaggattgtgtgtttgcatggcgtccctaagaagatagtgtctgatcgaggcagtcagtttacttcaaatttttggaagaaacttcaggaagagatgggttctaagctgaactttagtactgcttatcatccgcagacagacggacaaaccgaaagggtgaatcaaattttggaagacatgttgagagcttgtgctctagatttcggtggaagttgggataagaatctaccctatgcagaattttcgtacaacaacagttatcaagctagtcttcagatggctccttacgaagcactgtatggtcggaagtgtcgcactccgcttttgtgggatcaaacgggagaacgtcaggttttcggaacggatatcctaagggaagcagaagaaaaggtaaagatcattcaagaaagattgcgtgtggctcagtctcgtcataagagttatgccgacaatcgccgcagagatttgagttttgaagagggagattatgtgtatcttcgtgtcacgcctctacgaggagttcatcgttttcataccaagggaaaattggcaccgcgttttgtgggaccttataagattgtcagtagaagaggagaggttgcttatcagttggagttacctcaatctttggcaggagtacataatgtgttccatgtgtcgcaattgaaaaagtgtttaagggtacctaccgaagaagctaatattgagcagatagaagtccaagaggatttgacttatgttgagaaaccaatccgtatcctggaaacaagtgagagaagaaccaggaatcgagttatccgtttttgcaaagtccagtggagtaatcactcggaagaagaatcaacttgggaacgagaagatgaattgaagtcagctcatccgcacctgttcgccagttcttccgaatctcgaggacgagattctgtttaaggggggtaggtttgtcacaccctgaaaattcaaaatatataaattgttgtttaaatggaatttttagaaataattttaaaagtcttgaaaagaaaatctagttttaattaataaattccaatataaaatgggcccagataaaatttcattaaatactttgcttaattctataattcctagatttttctgggatttatttgagctaagaaagtatttgtaataaatggaattgcatttaagaaataatttaaattgaaaaaggttttaaaaagtcttcttttggctttgggccg

SEQ ID NO: 28400 - DNA, 17036 bp, Oryza sativa
  unsure (1)..(17036): unsure at all n locations
tttttcgtgattagtctcacactacccattaatggtaataatgtggtaattaatttgatgcctagtttggaatggataattcctggtttggaggtttaatttgttcaactggggttggttgttcaaatgtggttgggcctatgcaacacgggtgtgttgtatggtgtttatttaatattggttaattatacaactgttttactattctcttaaatatttattaaatgctgttttctgcaaatgaactgtattatgccatcctttgttatcctgtgcacttgcatatttgctgtgtggcttgttgagtatgtcatatgctcattcttgcaatattcattcatcagaagaggagtacttgagtgaaggtgatggtctggaggattaggcttgtcctggttaagttgtctgtggagtggagttgccatagctgttccgtagattgttttagtttaatttttccgctgcgtagaatgttattttttttgagaggaactatctacctctgtaataatttattatttgcgattgttaaatagttatttaattgtactctattatcaatattgtcattgtgtgcctcggttgattcctggacgagggtttaacacacatgtaagcgtttggaattttggatagaaattcagggcgtgacaagttggtatcagagccaccttgaccttaggataagccaaatggtaaaccttaagtagccttcaaaatattttgaaaatagaactgctcttctctattctcttataaattaattaagttggcaacacatgcaaggttatgcacaaaatttatttaattcaacttcttttcttttaatagcaaaaagttgttcttctcaaaatatttcttttttcttattgattagtcggcactgtacatctattatggtatcgacataatcatggtagcactagtactactcatctttcttgtggtgacactgtaccgtgcttaaaatagatcataagtattttagttttgttttagttatttgtcaaaaaaaatatatttgtctctatctaaaaagttaaattctaaaaatatttataaaatagctttttatgtgtcttttcttttattttcttcctttttggtcaaaaatcagttaagtctagttggtgcagctaacttagaaaaaatatgcattaattcttctcttccatgtttctttagatgccgccccattcaccgagaaatttgatcgaggtgttaggattcgtcagggagctgaggttgatggcttttgaggtaggttatgaagttgctcctgagtatcgccagatttcccatgaccccgacgaggagaagtgtcgtgttcgtgtgacgttggctagtgatagagaagaccttccgtctattaagttcgaagctggaggaagatcgtactgccatgcttgtcaagaagcagctttggtggccattggagagttgcgtcaacgttttgaagaagagttggattcatcagctttccagtatcatcctcacaagcctcatggtcaagactatggaacctatatctgtcctgatggtgaagagagtgccactctgatgcatgtggtgcatatgcttagtgctatggatgcagtaagtgtggagcgagacaaagcagctcatgacagggaaaactggaatcgaggcaagatttgcaagttggagagcaaggtgtaccgtctacagaaggaattagctgaactcaaaggagaaacgccgccgccaacacccaagcttcgcctcgtcgcaagaaagagaacctgtccgccacctcgtctccagttagcttcgaagattcgcgtgatgggtgaagctgtgcccgatcgtgctgaacctgtcatcgacatcataagtgatgaggaagaagaggaagaccctgaagaaagagagccagctactccagaggaagaagatccatcgcttcgttccgacgcaaggcgggattagtcgcttagttagatcgttgccgtagttcgctgtgttagattgcttgtttaagtttgtttgtgagtgtgtgggttttagttgttgcttacatcattggtgggatgtaacagcatgagtctagttcttttgcttgtcagagtgtaagatagttggtgagatagtgttaatgccacttaaatgtaatcatacacagttaagagcaatatagaatttaaattaattaagtaactccgttctaagggtgtctctctgtcgttctttcctgttgtctctgcttatcatcagatggtgaacacgcgcactggcaccggaagtggaagcggaagtggaagtggaagtggagctactaacaatggaggagatcccacgctagctcagattctggcccaacaaacacaactgatcaatctgttagtgcagcaggcacagaatcagcaggcaaacaatcagaatcagaatccacccccacctccccaaaacaagttggcagatttcttacgtgtgagaccccctaccttttcaagcaccaccaatccagtagaagcaggagattggttgcatgcggtggagaagaagttggatttgatccagtgtactgagcaggagaaagtttcttttgcttcgcatcagttgcatggacctgctgctgaatggtgggatcattttcgccaaggcagggctgaaggagaacttatcacttggcaggagttcacgactgcttttaagaagacgcatataccgtcaggtgttgtagctctaaagaagagagaatttagagcactcaatcagggatctcgttcggtcaccgagtacctccatgatgtcaaccgtttagctcgttatgctccggaagatgttcgcaccgatgaagagcgtcaggagaagttcttggagggactgaatgatgagttgtcttatgccttgatgtctacggatttccgggatttccagcagttggtggacaaggcgattcgtcaggaagacaagtataaccggatggagcagaagaagcgcagggctgcccaattcaaggcacaacagggcagtaaccagaggccgcgtctcgttactggacctcaagctccatcgtaccctcaaggaggatcttcatcagttgtccgtccccaacgccagttctacaataacaatactggtaatcgtggcaatgacaaccgcaacatggttgctcgtcctgcagcaactccagctcagaatcagcccgttaggaaggaacagggaagcaagccagtgatatgcttcaattgtggtgatccaggacattatgctgataagtgtcctaagcctcggcatgtgaagaacgctccagccccgaacaactccaatgttctagcaccgaaggcacgtgttaatcatgttgcagcagcagaagctcagaatgcaccagatgttgttttgggtacgtttcctgttaactctataccgcaactgtgctttttgattccggtgctacacattcctttttgtctaaaagttttgcgagcaaacatgggatggaagttgttagtcttgggagacctttactagttaataccccaggcaatcaagtattttcgacatagtattgtccttctgttactatagaaatagaagaagttcttttcccatcctcgcttatcttgctagaatccaaagatctagatgttatcttagggatggactggttatctcgtcacagaggagttatagattgtgccaaccgtaaggtgactttaaccagtagcaattgggaaaccgtttctttctttgtgtcctcccctaaatatcatggtgtgaacttaaaccaagttgctctacaagagattcctatagtacaagactacccagacgtgtttcccgaggatttgccaggtatgccacctaagagagacatagagtttcggatagacttggtgtcacaccctgaaaattcaaaatatataaattgttgtttaaatggaatttttagaaataattttaaaagtcttgaaaagaaaatctagttttaattaataaattccaatataaaatgggcccagataaaatttcattaaatactttgcttaattctataattcctagatttttctgggatttatttgagctaagaaagtatttgtaataaatggaattgcatttaagaaataatttaaattgaaaaaggttttaaaaagtcttcttttggctttgggccgaaagtcggcccaaaacctctcttctctctcctcggcccagctggcccagtcagccgcgcgcgcgccctcgctgtcgctgacaggtgggtcccgcttgtcggtcgtcgtcttcctcgggccgaaaccctagtttcgcgccgccgagctgccgtcgccgccgctttccaaatccggccgttcctttccttctccggccgatttgttagaggggaaatgatctccgggatctcctctaccttttctcctttggaatctttggttaaatcgctttggaaagctttggaatcgagttcgattcggatcggttttccctctctccaagccgcgagtttccttcgccgttgccgtcgccgtgggccttcgccgccgcctccgagcccctttaaaaggacccccggtgtctcctctacccgtcgccaccttcgccttcgcctctcgtcgtcggaaaagccctagcgccgtgtgccctagctttgccgtcgtcgccgtcgctccagccgtgcgccgccgtcgtttcagccgtcgccgtcgctcgggaagaccgccgtcgtgctcgccaagtcgtcgccgtcctcgtccgccccttcgccgtcgccggagatcaccggagcagcttcgccgccgtcgacccgaagagcttcgccgcttcctcctcgtcgccgtcgccgtccgttggtcttccgccgccgtttaggtcaccggtgagttcgccgtgttgtcctctacgtcttggtgccctccgtttgcgtcctagtgccgccgttcgccggcgagcgtgcgccgttcgagccgtcttctccgccgagccgccgccgctgtcggtgacgtcaccgctgacgtcatcggggtcgtccgccgtgagccgccgtggacccgatcgatctcggccgtccatcttggatcggttaaatctcggccgtccgttcgcgtgaaccgccgcccgtgcgcccggtccaccaaaccctagcccgctgacgcaataaatccccttttccttttcaaaaataattcattattgcgtcataattcaatttaaaccgatataagtgttttaatccgatttaatctttaaaaattcataactaattcatcttagctccgatttagttggttcaagtctctaaatttttctaaaattgagatctacacattaaaaatatccacatgtactgttcatgcttgtttatgtgctgttttggtgattttgcttctttttgcttagattctgtcgtttccggagagtccgttttcgcggaagaagagtttgaagagttccaaggccagcaaggcaagtcacacagatcccaaacaaccctttgagcatgttgatcctatttaaagctattgtttcttttcaactattgcatttattttcgaatgtcattgggtggaattaacctattgattgttatggccctttcgtacttgattaccttattccttgataccttgggttatattaatttgactagttgagctttatttatattggttcaactagatattagatataattgcttagccctgcttagaaacattagtacacttatgggataactaatgactcactattatttcatgatggcttattgatagttcacgatggtcaatcgtgattagttaattaattaatgtgccaactaaaacctggtaatggtgggttgtgggcacatggttttgatggtcgtgctcatggcaattaaggaccggttcacgagtttcggttgtgaaacatttatcgtgccaaccacaagccagcatgggcaacggctttatcttttgtatagcatggttcattgcggggcaccagactgagaagtggcggagataagcccacgggggtcgctggggagtccatgccttgtttataagggggtgattatgatccaggaaggtgcgctgcagtggattgtgttatgcgaggggtattgtcacaactcctttccgagataccgtggtggtattgaggcacatggtgacatgatgtggggttgtgtcttgtgggtacagtggtacacctctgatcagagtaaaactattcgaatagccgtgcccgcggttatgggcgggtctaacaatgtctttcgtgattagtctcacacctctcatcattgtaaaagatgcttaaactgataataatttgattagctcctggtttggaatggtacattcctggtttggagatagaactgtgcagccggggtggttgttcagaatggttgggcctatacaacagggtatgttgtatagcgttggcttaatattgtgtaattacttaactgttttgttaaaattctcaaatgtttgctaaatgctgcttttgcaaatggaaccctattatgccatcctttgttatcctgtgcacttgcatatttgctgcgtggcttgctgagtatgtcatatactcaccttgcaatcattcatcagaggaagagttcttcaatgaggctgatggtgtggaggattaggtgtagccttggtcaagctgcctgtggagtggagccgtctgcgccgtttatttaatttccgctgcttagaactttattgattgagaggaactatctacctctgtaatgacattttattcgcttattaattagagtaatatttgtactctattatcaatttgttattgtgtgcctcggctgattcctggacgagggttcacacacatgtaagcgtttggaattttggatagaaattccgggcgtgacacttggtacctggaaccaacccaatccataagagaccatacagaatggcagctaatgagttagctgaggtgaagaaacaggtggatgatttgcttcagaaaggatacatcagacccagtacttcgccatggggagcaccagttatctttgtggagaagaaagatcatactcagagaatgtgcgtggattatcgagcgttgaatgaggttactatcaagaataaatatcctctacccagaattgatgacctgtttgatcaactggaaggtgctacagttttctccaagatagatctccgttctggatatcatcaacttcgaatccgtgaggaagatataccgaagaccgccttcacaactcggtatggtttgttcgaatgtaccgttatgtcatttggactcactaatgccccagcctttttcatgaatctgatgaacaaggtgtttatggaatatctggataagtttgtcgtggtgtttattgatgacattcttatttactccaagacgaaggaagaacatgaagagcatcttcgtctagctttagagaaactacgtgagcatcagctttatgccaagttcagtaaatgtgaattttggttgtccgaagtgaagtttcttggtcatgtcatctcgtctggaggagtggcagtagatccaagcaatgtggagtcagtattaagttggaagcaacccaagacggttacagaaattcgtagtttccttggacttgcatggtattaccgcaggtttattgagaacttttcaaagatcgctagaccaatgactcgtctacttcagaaggaagtgaagtacaagtggacggaggattgtgaacgaagtttccaggaactgaagaaaaggctagtgactgcgcctgtgttaattttgcctgattcgaggaaaggtttccaagtgtattgtgatgcatcccgacacggtttgggttgtgtgttgatgcaagaaggaaaggtggttgcctatgcatctaggcaattacgtcctcatgagaataactacccaacgcatgacctagaattggcagctgtggtgcatgcattgaagatttggcgtcattatcttttcggtaaccgtactgaggtatatacggatcataaaagtttgaagtacatttttactcaacctgatttgaacatgcgtcagcgaagatggttagagttaattaaagattatgatatggaaatccattatcacccggggaaagcaaatgttgtagccgatgcccttagcaggaaaagttactgtaatatgtcagaaggtcgacgtttaccttgggagttatgccaagaatttgaaaagttgaacttgggaataatcagtaaaggttttgtggctgctttagaagctaaacctactctgtttgatcaagtgagagaagctcaagtgaatgatcctgatatacaagaaattaaaaagaacatgagaagaggtaaagccatcggttttgtagaagatgagcagggaactgtgtggttaggagaaacaatttgcgtcccagaaaataaggagttgaagaatactatcatgaaggaagctcatgaaactttgtattccgttcaccctggaagcactaagatgtaccaagacttaaagcaacaattctggtgggccagtatgcgacgtgagatagcagaatatgtggctctatgtgatgtatgtcagcgggtcaaggcagaacatcagaaaccagccggtctgttacaaccgttgaagattccagagtggaagtgggaagaaataggaatggattttataaccggtctacccagaacgtcggcaggacatgattctatttgggtagtggttgatagattgactaaagtcgctcactttataccggttaaaacaacctatacgggacataagcttgcagagttatacatggccagagtggtatgtttgcatggtgttcctaagaagatagtgtcagatagaggtagccagtttacttcgaagttttggcagaaattacaattagaattgggtactcgtttgaatttcagtactgcttatcaccctcaaacagatggtcagacggaaagagtaaaccaaattttagaagatatgttgagagcctgtgttctagattttggtggaagttgggataagaatttgccgtacgcggaattctcatataacaacagttatcaagctagtttgcaaatggctccgtatgatgcattaaatggtcgaaagtgccgtacgccgctcctttgggatcaaaccggtgaacgtcaagtttttgggacagacatattgcgacaggcagaagaaaaagtaaagattatccaagagaggttgcgcgttgctcagtcgcgtcagaagagttatgccgacaatcgtcgcagagatttggctttcgaagaaggagattatgtatacctgcgggttacgccgttacgaggtgttcatcgtttccaaaccaaagggaaattggcaccgcgttttgtgggaccttttaagattgtgagtcgaagaggtgaagtagcttatcagttagagttgcctccgtcaatggcgggaatacacgacgtgttccatgtgtctcagctgaagaaatgtttacgtgtacctacagaggaagcagatcctgatcgtatagagcttcaagaagatttaacttatgttgagaagccagtcagaattttggaagtaagcgagaggaataccaggaatcgcgttatacggttctgcaaggttcagtggagtaatcattcagaagaagaagccacttgggagcgagaagatgaattgaagtcagctcatcctcatctgttcgccagttcttctgaatctcgaggacgagattccgtttaaggggggtaggtttgtcacgccctaaaaatcgattaaattaaaaatgcatattttaaatcatttttagaaattattttaaaagcctacaagctaaaccctaattttctaggaaaattttcaatataaaaatgagttagataaaattttattaaatactatgcttgctcctctattttctagaattttctgggaattatttgagcaagggaagtatttttaataattgaaacaacatttcacaaattgttttattcaaaaaagtttaaaaacccctccctaagccgttgggccgttttcggcccaacatcctctctctctcgcgcggccgaaccggccaatgccggcccaagccgacgccgcccgctcccctctctcgtggattccgacaggtggggcccacctgtcggatccatctcctacctccagccgccgaccgagcccgagccgccgccttccacctccaaattcgcctcaatccgactccgattccttcgggtttttgaggggttttgttcctctcgttctcctctttctttttccccaagaatcaaagagaatcgttgaggatttgatccgaatcgagttcgttttgattttatccctaaaaccgagttttaatcttttccgagccgattcctctcgtttggagttcgatctcttcaatccgagcttatataaagcttcccctcgtcgtcctcttccgtttgccccctctcccgagctctcccgtgccccgtagcgccgccgccacgtgcgccaagctcgccgccgccgccggccgtcttcggcgtcgtcgtcgcgccgtctccgccgtcgccgccgcttgccgtcgccgccgttaggtgcgccgtggtgagaggaatctcggccgcccgttccccttcgccgccgaccaccggagtcccctcgtcgccgtcaagccgagccgccgccgccatcctcctcgtcgccggccgccatcgttcgtcgtttgaagtcggggtgagtaccatcgggttcgtctcgatgtcctctacgcgtaggtgccctccaatcacccggccgaccgccctagctccggcgagctcgcaaaccctagccggccgccattgccgacgtcagcatgacgtcagcatgacgtcatcatctccttttctttttctttttcccgattttctaatagattaaaacttcggaaaatcataactaaataaccgtatatccgtttcaggtggttcaagtttctaaatttttctaaaatcaagatctacatgttaaaaatattcacatgtgctgtttatgcttgtttttgtactgttttgttgattttgtttatttgctttagtttccgacgttccggaggagagtgtttccgttgaggaagtttctgacgcgtttgtggaagcccaaggcaagtcacacagatcccaaacgaccctttgagcatgttgatcatgtttaaagctattattttattttaactatgcattgttttcgaatgtcatcgggtggtgaacctttcccaattaattaatggccgaagatgactttattttcctatgggttataatttgattagcatgaaccttatatattggattggttcggctaaatgctatatgtaagtttgcttagccatgcttagaaacattagctaacaaaaggagttaaatataaattatattacataattgttattattaattagggttatattcaatggtagctcacgatggtaaatcgtgtgatgttaattaattgataattaaaacctggataaggtgggttgtgagcatatggttttgatggttgtgctcatgacaattaaggaccggttcgcgagctactgttgtgaaacatttatcgtgccaaccacaagccagcgtgggcaacggctttatcttttgtatagcgtgattcattatagtgcgcccgactgagaagtggcgagaagtccatgggggtcgctggggagtccatgccttgttttaaagggggtgattatgatccaggaaaggagcactgtaatgggttatgttgtgcgaggggtattgtcacgactcctttccgaggtaccgtggtggtactgaggcacatggtgacatgatgtggggttgtgtcttgtgggtacagtggtacacctctgatcagagtttaatctattcgaatagccgtacccgcggttatgggtgagttgagcaatatttttcgtgattagtctcacaccacccattaatggtaataatgtggtaattaatttgattcctggtttggaatggataattcctggtttcgaggtttaatttgttcaactggggttggttgttcaaatgtggttgggcctatgcaacacgggtgtgttgtatggtgtttatttaatattggttaattatacaactgttttactattctcttaaatatttattaaatgctgttttctgcaaatgaactgtattatgccatcctttgttatcctgtgcacttgcatatttgctgtgtggcttgttgagtatgtcatatgctcattcttgcaatattcattcatcagaagaggagtacttgagtgaaggtgatggtctggaggattaggcttgtcctggttaagttgtctgtggagtggagttgccatagctgttccgtagattgttttagtttaatttttccgctgcgtagaatgttattttttttgagaggaactatctacctctgtaataatttattatttgcgattgttaaatagttatttaattgtactctattatcaatattgtcattgtgtgcctcggttgattcctggacgagggtttaacacacatgtaagcgtttggaattttggatagaaattcagggcgtgacaaatattgttatttaacttttaatcgggtaatatctatcattggaaggcagccgattaggctaaataccaacgttgacctagattatataggatatccaccaccctatgaaacattcaacggcttgattgtctagatattatccttcttttcatacttatagctgcattagttgagtttgaccttataagtcgtgattagaatctcaatctctagcctactttttggttgccgattagggtagtatcggagtttcagccgatcttacctgatttaactcttttatatcttatgtgcttgattgacatgttaaatccgctctttatgttaagatcttgtcacaattaggtatattaagcttcctgtttgatatattttgcttgctttaatatcttaatatagaatagtataggagtattagccgatgcatgctggatctatttgatcggctatgccataaacgtctataatcttcttgttaatatatatatcgatgtaagtgatttatactgtctcgatcacttgatttaagtatatatcgacggaagtattatataccattgatattgatgtgaccatggctactacggacacaaccattgctcacatcatggatgaacagcacgatattaagttcaagtcctccaagtgctggaatccaattcggccaccagctacactgctgttttcaaatggccgccgaatctgcatacgaccttcgtttttggcccgtgagtacttgatggaaagctcttggagccttctttccaacggatctagcctcatcgccagattccatgtcgtttggccgcaatcacataaacaaggtgctgcgtcacctgtcttgtgcctctgggcttgtaactttgtttgggacccctacccaagtggggcccatgtggggtgcgccccaaccaggtggaggacgacccttggcaccccttagtcgtcctcccacccctataaataggtaggtaccccttcagggtttcttgggttttgtttggatgaaagtttagccattgctacttccttgcagcgcgcgtgtcggctagactgtccgtctgcttgtatttgaaaccccaacttatcattcgtattcaactcctatttgcatttcagattgcttttatcttgttcttgcttgtttcttcgatttgcttgcaggaataaggttgatttgcaccggcaacatcaacaacccacggaaaggtgtatcgatcgctaaggcgcaacgcaacgtcttgtatggttgtagtcgggtcgtcgacgtttctcccaaatcgtagttatcatcaactcaccgaaagatcgggccaacaacagccgtgagtgtcgagaggaactcagggttcatcagatatctacagccggtcgaatagatttagttctttcttgcctatttatgactgctgatcaattcaaatatgacatcggctcaaagataaatgatatgtcatcggcggctggccgatcggctatcgtttatggatttaaccactatttttctatcattatttcttgttgattgcaggatcaaatcaactggcacgctgacgaacctaaaggtaagatttttggacctgcactgaagttaagcagatcttccaggccagtgtgtatttttcgtatcaacagtcctggacttgttctggttggtagccatgtcgcaaacgtcgcactcagtcaaaacgagagttatcctctcaccagaagatcgggccacgagagagagcgtcatcagttggtatcagagcttcggtagcatggtgaggatttttttttatagatttattttccatacctatcaatatacaaaattaccgcaccacttttccctttaccaaacataggtttgtgatttgcaaatttcattcagttttgtgtctttgaatgctggtccgttgtcgtctctagtgctggcttcgtttagttcttagttgtggtttgagttttgcttttgattgcatgcagatcgggtcccgtttatcttggtagcatattatttgttctaatcagattgtgtcgtcgtccttgttcctgtcgcttgcacttaagcccagaaaaatagaagatctgtggtttccttctgatcggtggatttgtttctgaaattacgaggttgttgcacgaccgtttccctctggccgcgatctcctgtactgcttgctattttactggacaagcatgtatatctcttgatttatttggttgatctactcgattgtctatgcatgcaacaaatccttgttttcctctccagatctgcatgcatatccactgccgactgcctacatgcatgcacgatatttcctctatccattgccactgataacttctaggaattaaattctatgcgctgcaccagctccactggttttttgagttttagtcttgtttcacgtacagccgccgtttgacgggctgccataaggaactcggcactcaggtgtggcttgtcgaagtaccaggaggacatcggctatagggtattagctagtgtattagttaacaagaatgtatgtatgtatattagaagtatagaaatagatttccttttctaatttctttccacttagcttagataatatattctcagtagctgatgcttgtttatcagtctacatgattttcccatgggataaaataaatacaatacccttggaatactctcgagtgaaatgctacaatggtatatccgtgcgcttgtggatgaactctgtaaccataatataccagaagtatttctgtgccattgctgggaattatatttctagtaatgtcgttaagaaataccaacaaacatttctggcgccattgccgaggaagattcgtaatagagattacctgaactaatagcaggataaccttggttgttttcgcttttattgtgaaaacagggtagtgcatgactggtttcaacttgtcggaaaacttcaaagaaaatccaaaagctttcgtccgaagcgtcagaccgcgagtcgttgctctgcagaaaactctacgacatagaaaccagtcgtaccagcaccaccaactttcaggactatggctgacaagacccttcacgagttcgctgctccctctactgacaatgtggccattgggccgcagatcaacatgggagacgtggatttcgacttgaagtccaatctcatcacgatggcgcaggctagcccattctatggcaagcctaacgaggatgcctgttggtatttcttacgaccacagataaatccgcaagcgcacggaatactgctgtagcacttcactttcgggtgaccccaaaaggatatcgaactcagggaatgtgtgtaatctacctaaggctaagacgatctaaggacaacaaccgatggtcggcaggcttgagaggactttctatgtggcttaactatctaagctaagcaaaggtaatttcctatctgttgcatcaggcaccgacccctgctggtctgccagcgtggtttcggctatagctctatgatgcatccgaacgtggagattactaggacgggattcagggctgtcaccacctgccgtctacctctgacaaatccatgggatacacaacaaacaaaggtaatctctaacctagacaccacgcctaagttattaattactactctaatacttgcgcaggaacttccttatttatctagagtcctagtactagagcacttagtataaatactaaacaatgaacccgcaaagatggaaatctatcttactcaaagaaagtaattaaataacataagaaaggaacacgaatgcttactttatagaagaagttctccgaccccagagcagagtgtatcaaaagctccggtactcctccagaattcctcctacgaagctacactcatcgaggtagaagtcagataagtgccaaacttccgggcactcctccaaagctccccctcactctctaccttattctaatgtataaaagatacaatagagtctcttgtaattcagctcaaagttgtgtgtattggaatgagatgaagatctccttatataggctccaaatgacggttaggggtatgggaaatggccaaaacaccctgcaactgccataggggagaaatccaaaccgtccacatgaagccagatggcgggaggcgccaggattggttcggncnnnntnnnnnnnnnnncnnnnnnnnnannnnnnnntnncgnntntnntttnnncnnnnngttnnttattgggtcccttccatnttgcccatggttttgcccaatccttcagggctttggttgacatatgggccctccaatccgtgttaatgcgtcttgaatgcgcagaggtgcattttgtcgcatgacggatgtgttttctcctcaaaatacctgcatacacatatttcaccaacactagtggaaatgattagtaataatacctaccactaagttggataccatgttttattccattatatgtaggcattgacggtcaaatattatgatttaaggaccgtcaacagggtactcctaatgggcggt

SEQ ID NO: 28401 - DNA, 6424 bp, Oryza sativa
ccctcccctttactactttacctccccttcttctcttactactacaccatataaatttgaattaaaattcaaatttttaatgtgtacgtaaactttttacttataaactttgggtctataaactaatatttgaattcaaattcaaattcaaattcaaatttgaaacgggtatgtaaacttttgacctataaactttgggtctataaactaatatttgaatttaaattcaaatttgaatcgggtatgtaaacttttgatttataaactttgggtctataaactttaggtgtataaactttagatgtatagaaatactatatatagaaaatatttaattcaaattcaaatttgaacggatataattcaaattcaaatttgaatcaggtatgtaaatttttgacttataaactttgggtctataaactttaggtgtataaactttagatgcataaaaatactatatatatattttaatatttgaattcaaattcaaatttgaatcccgatataattcaaattcaaatttgaatcgggcatgtaaacttttcacttataaacattgggtctataaacttcaggtctataaactttagatgtatagaaatcctatatataaaaaaatatttgaattcaaatttgaatttgaatcggatatataaacttttgacttataaacttttggtctctaaactttagatgtgtaaacctgaggtgtataaactttaggttcataaatttactaaaataggaaagtaatacggtgccaaaaaaggaaaccaggtggagggagggagggggaagggggatcgatcgctacccttgtcgccgggcgatcgatcgcccattagcacttccgccgtcaacaatgccaacattcatctgcaacagttcctggagatctgtagcacatataccatcaagggcgtcagtccagacgccgtcaggctaaggctgtttccattcttccttcttgggagagcgaagcagcggttctatgccaaccatgctgctgtcaacacatgggacaagtgctctacggcattcctctcgaaattcttcccgatgggcaaaaccaatgcccttcgtggaaggatttctagtttccagcagacaagggacaagtctattccggatgcatgggaacgactgcaggagtatgtggccacctgtcctcatcatgggatggacgattggctgatcctgtagaacttttacaatggactcaccccgatgtcccgcgatcacctggacacggtgtcacgccctgaagttttcccccctttgcttgctttaaaaattggctaaataaatcgtccgaagaaattatcttaattaacctagagctaattccttaattaataaatgcaattaataattgaattcggcgtggtggaatttttcttgagttccccatgctccaatgcattaacaggatttttagtggaattttcagagccttggaaataattttttaccaattaaaaatcaccaaagtgcaatttttaatcccaggaaaatccttttttctctttttcttttcttttccctcctttttctttgttgggccgtcggcccatccctctcccgcggtcccccctccttgtgggccggcccaagccgcccctccctcctctctctcgggacgccgacaggtgggccccacctgtcggtcgtctcccacctccggccgctagagccgaagctccaaccgcccatgtcgccgctgcctcctccgctcttcccgtgcccacgccgcgccgctcccgcgtcctccccacgtcgccgcctcttcccccgcatctcccggcccgcgcgcgcgctcgagagggcgggattcgatttcgaatccacctctctcactctctctcctccccacgtcgccggccaaatcggccacctccccggccacgtccgccccctcccgcacctataaatcgctccccgcgtcttcctctctcgtttttcgcactcgccgcgccctcccgtgcttcctatcgtcgccgcgccgctcgccccttgcgccgccgcctaccgccgtctccggccacgcgccgccgccactatagccaccgccgcgccgcgcagtcgccgccgtcgcgctcaccgagcccgcccgcacctcggccgccgcttcattgccgcgaatcaccgccggagcccttttctcctcgcgcgccggtgagaccctctctcccctccgtctccggccggcaattcaagccgccatggtcgccttcccttccctaacccctctatgctctctcctagggtgccgccgccgcccgttcgcgccccggcatcaccggtcgtcgccgccgttttcttccttcgcgccggccgtcgtgctcgccggtgaggaatcccctttcctccttcctttcctctcccccgtgagcgccgccgccctccgcgcgtgcgccgtcgtcttcggctgccgccgccgccttcgcgccggccgccgccgtctccccgcgccgccggtcaccgccggcggtcgtgcgccgtcgtcgccttgccatggccggccggcttgagccgtgccgagcatgccgccgcccactccttccccctagagccgctgccagtggggcccgcttgccagccgccccctctccctcccttagtgccgctgaccagtggggcccgcctgtcggcgccaccccctcccttccgctgacgtcagccctgggctttattgcgcaataaattgattaaggacttttctttattagtaaaaacgcagtttatcttctaaaattcataagtaattcatccgagctccgtttaagtccattcaagtctcagtaaatcaagaaaaatgcaaagaatccattaaaaatagttttgtttcctgtttcagtagtcttatagcatgttttgcttgtgtgctttgtttgtcgcgtaggtttcggccgtttcgtcgatccgcggtttctcgaagacgttgctgaggtctcgtcagttcgagagcaaggcaagtcatgcaatacgtttgatcatattgtacccaatttacaaatatcccgcatttctattaaatgttgcatccttttacaatgtcatgtaggatgggtcctattcctcagccatttattgtttaccttatgccattgataacttaggtatcaaaatgactagatgttggtttaggaaatgcttagccatgcttagttcaactagcacacaaatggggatcaccttattacatagactttgtctattggtatagctttagattggtgccaccgcaatggtgttagttaattaaaatacactgaatggtgggctgtgggtgcatggttatgctggtcgcacccatggcagttaaggaccggttcacgggaaaccctgggagacttaccgtgcttaccacaagcgggagtgggtaactgcttgatctgaagtatagctcgaccctttcctaggcaccggtggcgagggtgggcgtgatggagttgggtcggccggggtgtccggttgtccagctgccggattcaccgcggcgcaagaggggaccgcccactgccttttgaggggtgggggtgaaaccttagcgtggtgtggatggttaggggagggttatgtggagggtcttgtcacgatttccccctttgcagtatcatggtgatacttcggggcatggcaacatgtgtggaatcgtgtcttgtgggtacagttgtacacctctggccagagtaaaactattcgaatagccgtgcccgcggttatgggcgatcaaccagattcaccgtgattagtctcacccctagtttagcttaatgaactggtgtagttcaggtggttggttgggcctgttgcaacgtggtgtagcgttggacagtgtttggttaatattgattaattactacaactgttttactgctttcaactactgcttttaaatgctagctttatgcaaaagaacctctagcctcctttggttatatcctgcatcatacctcctcttccggtatgacttgttgagtacagtgggtagtactcagtcttgctctcttttcccccacaccagagctgaagatcttcctagttgaagctgttttgtcaaagttggtttcgtcgctgccgtcaaggattgcctgtggagtggagtcgctcgctgcttaagtcaagcttcccggtttatctcgcttttatcttttccgctgcatttgtaatcttttctatttttgtaagacgtggatctgtatgtcaacaattgtcgtttgtgtaccctggctggtcctggacagggatttaatgcacattcagcttagaaattctggttcgagaatttctgggcgtgacaagttggtatcagagccgactttgaccgtaagacaagccaactggaaaccctaagagccctctgaaccccttttttcatctgcatatgcctttttgcacctggaattgtttcgggaaaatttggagttttgcctctttggtttgcgggaaaaatcttggtcgttcattcggatcggattttttttttaaaaaaaaattattagctcagtctagggctttagaaaaattttagttggagtttattcgacagtcagtcgggaatttattgggggttatgcattaggtcgtgtctatattcgatgggggcaatgttatgcgcatcattttctatgcaactagtctatgcattaatttattgtttagttgcattagtgtctttatttgagttcatgaaaaatgttctatgcataaaaatcatcatgctcggttatttatttgagtcttcttttgcttggtttaatttggatttgagcatgaattggttcctatcccttgtctactttagatgtcggtcctatccctcgtttgcaagcgccgccccgagcttcagagtcgccgcccttagctttatcgccttcttagtctgtttgcttgctagttttcgtgtttaggtttgttgcttgtgggttagtcggcggtcgatatcatgtgtcagtggtatgactgcctcaattaggagttgcgtgcctctttttcagtgttttaatcaagattaagataattgcacttaaattcataagcaagattagtttctgagcccccctgtttttcctccttttctcatatttctacctatccccttcagatggagataaggaatggttcacgcgactcgaacaacgccagtggcagcgaagagccgaacaatggagcacgtgccaacggtgcatctgacaacagtccgtccccaccgcccgagaacccaacaattgctcaggtgttggacaatcagactcagatgatgacaatgatgatgcaacagatgcagcaacagtaccatcaggtgttgcagcaggtgcagcagcaagcacagctgcagcagcagaacctgcagtttggtcctccacctcctcagtccaaactgttagaatttcttcgtgtcaagccgcccaccttctcaagcaccaccaacccaatcgaagcccacgactggcttcatgccattgagaagaagctgaatcttttgcaatgcaacgagcaggagaaggttgcttttgctacacaccagctacaaggtcccgcttctatttggtgggacaactacatggtgacccgtccagctggggcagaggttacttggacagagtttcgtcatagtttcaataaagcacaggttcccgagggaattgtggcacaaaagaagagagagttccgttccctgcaacaaggaaccagaacagttatagagtatttgcatgagttcaaccgcctcgcgcgctacgcccctgaggacgtgcgtaccgatgccgagaagcaggagaagtttctgtctggtcttgatgatgaattgactaaccagttgatctctagagattatgaggactttgagaagctggtggataaggctatccgtcaggaggagcacggtaacaaaataaaccgtaagaggaaggcagctcagttcaggactccccaggggaagagtcagaagcctcgtttcacgatgggacgtcacggtggaccttccaccatgattatccgacagcaccgtccctaccacccgggtagcttcaacaagaaccaccataatggcagtcacaacaacagtgagcagcacagtctcaaccctactccgagttcactaaagattccagctcaatcagttcagccagctctgccagaacagcccaagaggttgggagaaaaacccgaactctgcttcaattgtaacaaacccggacacacggttggaaagtgcccgaagccaagacgtgctggacccaagttcgttcaggcccgtgttaatcatgcatctgcagaggaggcgcagtcagcaccagaggttatattgggcacattccccgtcaactcgacaccggcagtaatattgtttgattctggtgcaacccattcctttatttccaagcgttttgctggtgcacatgggttatctttagtg

SEQ ID NO: 28402 - DNA, 968 bp, Oryza sativa
  unsure (1)..(968): unsure at all n locations
cgtttgcattgcagggatcatctaccgcgcgtcacggttggtacgatatcgtttgtggtgtagcgattgcatggcgtcctggactagttctggttggtagccacgtcacaaacgtcacactcgattaaagcgagaattatcccctcactagaagatcgggccacgagagagagcgtcatcactcgttccccgtcgtgggccacgccgctgtcctcctccacatggcgggccacacgctaaaaatctatcttcaaaagtgcatattgaacgcaacttaagataacaaagctaacccaacaatcaagagaacatgtatagttaggcactgttcacttctaaataagatgtaggttttatcttagtttgcattatcacgctatttaaacggttaaacaatacatttcgtacgaaaaccttttaggcaaaagttattttaaaatatcaaataaatcgatttttaagtttaataaaataattaaaacataattaatcacacgctaaagatttttttgttctgtatgcttgtacttaatctttttttatcttcagtaaacttataaacgaaaacagaagcctctactttatataggttcagagagattcattcgccgcctcggtcggtataggctggctttatacagggccgcggtcgcgccgtcgcggccgcaccagccaccacaagcagccgtcctgggtcacacccgacctgtcccggccgaccccaccgctgcgagctgcggcgcgcgcaagcgggatttacagccacccacaccaccaaggcaccaacgcattcatccaaaccgccggccgccggccgccgggtcgtcgtcgtcttcacgcttccttgccaccgcgcgccctcccgggctagcccgccgggccccgctgctaccagagagggcgatggcgacggcgagcggcgtttncacttccctgcagcttccctccacgcggcgggtgggcggctg

SEQ ID NO: 28403 - DNA, 521 bp, Oryza sativa
gattcatctatgcattcttccatttcagggatgtgtattcactaaagatatcaacaaagcgatcatgatcagcgatgcgatggagaccggaaccgttcagatcaactctgcaccggctcgaggacctgaccatttccccttccaggtattgttaccatgccattgactcggcttgccatcattttgttcaatttaccttttgctttcttcagttgtttgtaatttctatggggtttggactacagggcttgaaggacagtgggattggatcccaggggataactaacagcataaacatgatgaccaaggtgaagagcactgtcataaacctaccatctccatcctacaccatgggctgaggtgttccatatagatgatcagatttctataaccacatgagtacaatgtagagaattcaaatgttttgtaaccacgtgagctttgtacgctatttgcaccacagttctccctgtatgttgttggctcttttacaattaagaataatgcatgttgaagtatga

SEQ ID NO: 28404 - DNA, 530 bp, Oryza sativa
attcatcagctaaacagggtgatgccattgaaaccggtagcatcatcaggttgcaacacatgaggacacggaaatggttacatagccacttgcatgcttcaccattatccggtaacctagaggttggttcaacatgaatatcccatgtgatatctggcaacatttagttcctaaaatttcataggacctcagttgttatattctgagtttattttttcccaaaagcttgagtgctcttcaaactgattgagctctcttcaaatgattatcagtaatagtacatgggattagaagacctacttatccttccctatctgtggacatattgtgtctagctgatctcatattgttgtacacaccagctgaaagatgacagcgtatctgccaatttgatatgtattttatccgaaaccaagaccacaaaccaagaagcaatagtacatcattcggccatccactgtctggatttgctaatgttcatgaattacatggccaacagtgcctagaattgctttgcaactaatgagact

SEQ ID NO: 28405 - DNA, 677 bp, Oryza sativa
  unsure (1)..(677): unsure at all n locations
ctgtagacagagttgtcatcaatttttaccattgaaacaaagcggaaggttgcaagcagcagttctgcctgttactccacctttgttagatgatgaagaaaaacggaagcaaatgtgtgaagattatggattcaaacaaattggagaacagttgccagataatgttactcttaaagatgtaatggatagtctgcctaaagaggtatatgagctaccaacaccagctatgctgctgtggcttcctatacacaaattcctctaatgtaaaatttcttgtctgctaggtatttgaaatcgatgatctaaaatcttggacttctgttttaatatcagttacttcttatgctcttggtattttcttnnnnnnnnnnnnnnnnnnnnatcttcttcccttagcctgggcatggactggtacagcagttacgggggtaagaaccctcccctccctttgtaagcttatataagtttgtgttcctttcatgtgctacatgcttgcttgctgttttgtctattgtccactatttaattgatgcctttgtaaagttctttgtcataggtcatgattgtgcccacaaatcattttcgaggaataagctggtggaagatatttgtggaactctagcttttttggcattgatatacccctatgaaccttggagatttaagcatgacagaca

SEQ ID NO: 28406 - DNA, 600 bp, Oryza sativa
gtagagttaggactgtgcatgctgaattgtaattaccatggttagttcagcagaatttgcaaaaagaggccaccagaattagacaatcgtcatgaattaatcaaggtacaaaccaatggttgctggtacatcagtagcaaatggctgtagcactagcgtgcccatatttatattccaagcctccaaggtatacaatacatatttgatgtaccgaacaactgaaaaaggcgcttggtttggaagcgcactatttttaaatttataggataacttctgacagcctttcttctaaatgaacttttggcaaccgctctgaagccgtgtaacacaatccaacaaagcaatttgcagtcaaaatttcgggcatgtgccgttctagttagaatttaggatgtgactcactaagtaattgtgattgtttctctatgcaaacaccagccaacagtattgatttcatcatgcataatctggcatgaccttcttgaggaatttaattggttgggattcctcaggcgcaacctcatcaaagggaacatagtatctatccttgtcgtaaacatggcatttagtcagtattgtcttcatcaagcgccagttcca

SEQ ID NO: 28407 - DNA, 1632 bp, Oryza sativa
acggccctggacggacgaccgagattgctgctagctagagttttgctatccaatttccggtcattggaatgaacaatttaaattggctgtttaggtttataattttcgcggttaattcgttttatcacccctggaacatcgtgcgtatcacctagttgttcggcggacgtggttaccaacagaagccctaggaattagtgatcacttcgtcgcgcgcgatgaataattaacggatgaaccaattaaaacagctcgacgagacgacgactgcgagctctagctgtgcatgcatcagcaaacaagatagttatactgaccaaaacaagatttctatctaggattctggcaacgcagttggcgtttagatatagggacttaactttaatctctatatttagacactaatttagagtattagatatatactacttacaaaactaattacataaattaaagctaatttgcgagataattttttaagcctaattaatccataattagagaatgtttactgtagcatcacataggctaatcatgaattaattagactcaatagattcgtctcgcgaattagtccaaaattacggatgggttttattaatagtttacgtttaatatttataattaattaatgtccaaacattcgatgtgacctatctaaacagggtctcagacatgcagtttggcgcgcgctctctctctcttcgtcggtcgctttcgcatctctctgtctgatatggctattcgatgtacataccttcctataaattcactcatagatttagccgcagcatcgatcactgacaaccatcgtctttctctggttgagctagctagctaagctagccaggggagagctagagagatcgccggagatgagccagaagtcgtcgtggccggagctggtgggcgtactggcgacgctggcggcgacgcagatcggcaaggacaggccggacgtcgccgtcgaggtgctcccgccgggcgcgcccctcacgccggatttcaacgacaagcgcgtccgtgtcttcatggacgacaacggcatcgtcttcaaaattcccgtcatcggttagcttaaatgctccaatagctagcctatgggctatggcactagctgatctcccatggctgatgcatgcatatttctcctcgtcttatcacatctgttacatatgcagcgaaataatggaataaatggcgccgtgtacgttcatgtgtttttgctccttcatatgctccatctattccaaaataacttaatctaagatacaaaatgacacattctaaaccaacgaatttgaatttatcgttggtctaggatggatcacatcacatcctagattaagttatttttggaatgaaggaaggaaactttagctaaggatgtattcttttctttcctttctagtaacttttattccctcgttttttacatttacgctttccaaactgataaacgtcgtgttttttaaaactgctttaaaaaatatattaatctattttttattttttatttaatacttaattaataatacgctaatttttcgttccattttgcatgccaagaggaatgttgcgaccccaaaaaaaggcagcctgtatccagtgaatttttcgctgtaaatggtc

SEQ ID NO: 28408 - DNA, 1238 bp, Oryza sativa
cctgaagcttattgaaccggagctaatcacaattgctaggaactgaaaagaggtggaggaaacaactgtaacctgtgtaaggtcttgcaatatctccatatgacgagtcaatgtatgagaaaggacttctgagcctcctgatgatacccatgtctgcatttgagaatttacttgctgaagttgcttcagcgatctttctatatcggactcgatatcattctcagaaccatcagatttcatggaaatcaatttacggtaagcactcatttggtcatctaactgagcttctagcctccttgccttcaatgaaacaaaaggcacaattacttaaagtaaacaagtaatgcaaaaaaacgtcaacgaatctttttaacacattaaaccaaaatccaatattttcagcaaatgaaattgaactaagcaagggaatgcatcagatgattttttttcctcttaaagtggatggaacggagaatgtcatggagagatttaataataagaaacaaagctagcagtgccaatgtcccaagataactgctccaattcgtagatctgacagatccgtttcattctgttttcagttacacagtcagtatcacgggtttacctttctttttccattttcgagcgtgattcatggcaactatatgcgaaaaaaaagaagggtttggtaatgcggtatgaattctttcctaacacaggcttgtattgggccgtcactcgtttactttgtgcagaaacatccagtgtaaagtcagaacaccgaaatgacgctcatcccgcatgcatcatccatgtcaacaagtgccaacacccaacagccaagtcatccaaaactccattggctctatgtgcagtctaaacttagccgttttgaatttcgattgcatcacagtatcacacaccaatgataccccccacacagtaattagaaactacaaaaggatgccacagcctcataagctacagcaactagttgcgcaatgcacttcgcagcactagacagatagtgaaaatacatgccacaagtgcacctcaacatggagctttgtatgaattgcagcaatgttttcgctccgacaccatctagatcacgccttctgctcaagccttcacaggaaggaacaaattcccatggtatacaagtacaaccctctcttcagcgggaaattcgcgcccccgcaccggtcgaattcgcagataaactagaaaaagtacaactccgaggccaaccaaca

SEQ ID NO: 28409 - DNA, 6487 bp, Oryza sativa
cccccccccccccccccccccgcgcaaaagcccaaatgtaacacgcaactccgacgaccagccagatctcgagcttcagcgagcgggcaatcggagccagcgagccacgggtggggaggtcaggtcgacgagagccgagactgtggagagagagagagaggcgggggtggggggaggggagttgacggctcacctgcttgcggagggcgtcccaggaagacgcctccatggcggcggcggccgacggggcgcggcgcgcgggggatctcggtgggagagcttgggcttggctgctgccgctgctggatctctcccctatcggggaaggaggggagagaatcggagagagtaagtaggacgcaacgcagaggggaggacgaaacgggaggggtggttagttggagcgttggacgaagacgacgacgatggacgagcagagagcaattcgggtgccgaactggcgaactgggccgagaggtgccgaattcggccgccgagcgcccgagccgcgcgctcgtgcgccaacaatctccgaagtggactgccgtaaactctttttttttccagttttgctatatatttatcgataaattttctcccacaaatttgacagatgtcgtagtgtaattatactgtaactataatgtaagttgtatgcaactttcaaaaatctctctgtaacatattatttcgataaaatggaggtcgtggaacaaattctttcacatatgtgtgtgctgtgatttttttcttcctcaccagaataaatcttgtaatagatctaacgattcaaaattacgtgaaacttacatacaagttacactatagttacatacaagttacagtgtaattacattacgattgtactataattatatctgtcaaatttttagaagaaaatttgtcgacaaatgtataggtggcccttttttaatctactttgtaaagggagaaggggatctggggttggctagatttcagtcacctaaaattctcattgttttttttcctttaaaagaattctcatttcttctgttttcatttaattttcaccgagacttggagatcatgccctttttcttctccgacgacaatgctagctagttagattctaaagtcgagaaggtggttataagagttagagacagtgttttattttatagggatagcttggaggacatgcacagtagcgacagggcggtggtggcactggagctatgggtgaggagggccaacggtgggtgaggagactaacaaattagaaggtggaggaaaagggtgacacaagtcacaaaaacgccgaagaaaatataatatatgatgtctcaccaataagagagagagagcaccgcggaaaatggtgagacggaggaattgaagaggcaatgaatatcttcctcactagatcattcttggaatcgtattgtttgatattttatagggacgttttagtgtgatattatgtcaatctaatccttccattctaaatcaatggatatagattaatttacatataactaatcaacggattgttagttaatgggtgaaagcgaaaaaaatcatttcactattatcctttgttggtgctaaagcaatatacccgtctctattaggattaggacaccagaaacatcattataatcattattaacaagagtgtcatgctcagaagaaaagaaatattaacacataaaagttgtggcacaaggaaaccaatgcacatgattcatttattcaacagaaccatatgctaatagcagaataacttcatgttaaaatctaaatgttgttacatgctagttgtatttacaattcaactatgtttgtatccttgagctttcacgagaagtccagcactaattataagctgagaataaccgctagacatatgttgtttcgatgcaatgagtgtttgagctgtcaactaattgcatcgagatgatcgttgatacgcgtgtcggccgccaattgcatttgagataattatgatgaatgctgcaccgttgggttgattggtctgatgttgcaccagaaacatcatttattatgcatagtcttacctaaacaaggagctcaagttagcctagtggtgtaggcgacatggttgcatttggccaaccagggttgccttttttttttaaaaaaagttgttcgatccacccacccagttcataccggatggatggttcttaaagaaaaccgatctgatgagaatgttgattatggtttcttgtgattcaatcaatagaccggtccaatttttttttagcaacgggacaatgcatcctcctccttttacaactaaattacactatccttacaaatgtcgcccaagtaaactccaaaaacattgttcattcagtgatgagtcagagcaaggtcaatagtgcatccggttgttagctccaatatctcccatgtcatcttagagttaatactagcactagctagtacactaggttggctgttgtgttgatataccttatcaatcaaacaattaaatctgcattcagatatcaagtgttgacaatcaaaagtggctatatccatgcatgtagctagttgtgttatgatgtgagctaactgcttagaaagaaatcaccaaataacagatagtccacatattgtatcaatgtgtatgatcaattttggctcgtattttatctctgaagcaaggtggtgcttgcgcggtaccgcgatgatgccgtacaacaagaagaagcacatatatccatgctgcaccattgcgaaacagcctccacgacagcgacatcatggcctcgattctacctcacccgaagtctaccttcgaggggccaaggtgtcgccatccgtgaatgcactcacgccgcggtgcacatcttgaaagccgacgagctctacttttatttttttatttttttttgcaggaaagccaacgagctcttattgattatggattcacggtagctgtgttcatcgtttgcctcccgatgagatcgttggcagttttggatggaaatttcgcgcacgtgagcgagagagactggccaacgtggaagaggatcgtgagattataggggttgcgaccattcaatctagcacggggaatgaaatttttgggacagcgaagaaggaatacgagaatcttggggacggaggcattgatctgtgagggcggcgaggttttctcgtgggcaaaagagaaaatccttgcaacggcatgtgtcgaccccgcatgcggcgggcatggaactaacactggagggggaggggaaagcagaacggggcgggagcatgggatcggatgaggttggtgtgggccccataaattgtgttttctatcgcagctagcgtggtaaaccgtgctatcgctgggtggtagattagtcactcgctttcttctctctccttgtttctctcccttccatacaggaatatgatgatatagcatattttggagcccgctgaatcaccctactgtaactgctttcatgaacttcatagggcactcacagtgcgtcctaggtttttgaggagccaaaactgccacctaaaactaataacttcgtaagaaccatcctccacaatgcatgtgacctatttttttccttcccagtgggttctacccgttctctctcctctctttctctctgcctttccccacgggttcggagcgtccttctcaatggcaggagcaagatcggcggcgcggtcgtccttgcggagccgggcggagcagcgaaggcggcgggcgccgacggcctgagcggcaacagcaccgggcgactgtcgctgctcgggcggccgggcaacccgggacggatctagcggaacggccctctccccgcgggtccctgcggccgcctctcccctctggcgcttgcctctccgccccttcatctccccctccggcttcctcatccagcggcggtggaggagcccccagcgacgcgactggtggggcacaggggtaggccagcgaggtccccggcaagggcacgcagcggcggcggtcgaggacgtccccggtgatgcggtcgacaagctccccgagctcacgtggcggcgcggtgccttctctctttcctccgtctcccttccccctctctgttcacaagtggcacggagggggtgtaagcccacttctgcgaggaactggtggcaaagtttgcctccctgttcctctgttggtcacagcagatgctgagatggcgtggaatctcctacttggattggtgaggctgaagtgaaccgtagaatgattccttccccgttggatggtttctggacatgagtgaggaccaccaccaacttctcgccaccccgtcacgacgaagacgtttgctccgcggcacaccccgcgactttgcgtccgcaaccggcaaattcgcctgcgatccgggcccgagaaccccccgaattgaaacgcccaccgaaacacgaagcccttccttcctaacgtatcgcccacattcctccacgtctcccgcaccgccctttatttcccttctcgattctcatctctatccatagttccataccctccccgttgcctcgcctaaacccatcaccccacgccaccacttcgccaccgccgcagccgccgccgccgacgaagacgacgatgaaggtggtgcggaacctcgacctggagcggtacatggggcggtggtacgagatcgcgtgcttcccgtcgcggttccagcccagggacggcaccaacacgcgcgccacctacacgctcgccggcgacggcgccgtgaaggtgctcaacgagacgtggaccgacggccgccgcggccacatcgagggcaccgcctaccgcgccgacccggtcagcgacgaggccaagctcaaggtcaagttctacgtgcccccgttcctccccatcttccccgtcgtcggcgactactgggtgctccacgtcgacgacgcctactcctacgcgctcgtcggccagccctccctcaactacctctgggtacgcatccatccatccaccgattcatacccaattcaagtatttagatcaaccattcaatctctcatctgcatcgctgggtgtgtgttgtgcagatcttgtgcaggcagccgcacatggacgaggaggtgtacggccagctggtggagagggccaaggaggaggggtacgacgtgagcaagctgaagaagacggcgcacccggacccgccgccggagaccgagcagagcgccggcgaccgcggggtgtggtggatcaagtccctcttcggcaggtaggtaggtggtcgtgccagctgccatgccgtccagactccagagcttgatgccaccatgatcgtgtacattattattgcttcagttcaaaggctagttggtgaattctgttcaactcgtcggcctcggggaatcccccaagctgtgaacctgttcgttttctggattagtgtttaatgtgtccgttttgtgatgaattgtggatatctgcaaagactattgtgagttcagcgtgattgtacttagggtgtgtttggttgcaagccacactttgccacagtttgccacgcctaaggttaggcaaatttgacaggtgtttgtttgtagccacagttgtggcaagattcccctccaacaaattgggtcccacgtgtcaatggctcaaaaaagtgtggcaagattctcttaggcttagtaagttgtggctaacaatttgaccacctcaccttaggcaaagtgtggtaatttttgttggcaagtaatggtaaagtgtggctgggaaccaaacagtcccttaatttactagaagtactacagaatcagacgagtatttttgctccgaaggccacatgagtatttgctccgagggctacaggtgtttcgcaggatatttatccatgatagggtatgaaaacggttggagacgatagagtatttctacggagatgattttggtgcaatcaggaattttctatatacataaaatttaactatttggtgctaattttaatatgacacaaatagaaagtagaaaatctaaattttatagtcggaaataattgacaacgatattgtttttaacgaaaacgatatcctaccgttttttcatcctactgcaaaacaccgtggcaccagctcctgccttggtagtttaactgcaaaggacctggatacttagagcaaagttaataatatagtctattgccagctccaaaaaatagccatgtgtacacagtgtagcgctaatgtgtattatagaagcactgtagcataaatattttattatattagtgggacccatatcttcatatatctcattctctttctccatctcatccccttcctttcatgtcgtattgttctccagtaagtccagatgatgttcagtggcgctacggcggtgtggatgcaggagatggcagcagccgtgcgacgatgaggaagatggcggcagccgtgcaccggatgtgggtgatgcccgcagcccggcatgatgagggcgcccatgcggcggacgcgagatatggcg

SEQ ID NO: 28410 - DNA, 15898 bp, Oryza sativa
caaatagaaagtagaaaatctaaattttatagtcggaaataattgacaacgatattgtttttaacgaaaacgatatcctaccgttttttcatcctactgcaaaacaccgtggcaccagctcctgccttggtagtttaactgcaaaggacctggatacttagagcaaagttaataatatagtctattgccagctccaaaaaatagccatgtgtacacagtgtagcgctaatgtgtattatagaagcactgtagcataaatattttattatattagtgggacccatatcttcatatatctcattctctttctccatctcatccccttcctttcatgtcgtattgttctccagtaagtccagatgatgttcagtggcgctacggcggtgtggatgcaggagatggcagcagccgtgcgacgatgaggaagatggcggcagccgtgcagcggatgtgggtgatgccggcagccgggcatgatgagggcgcccatgcggcggacgcgagatatggcggtcggtgtgcggataacacgggagatgagcaggacgggggtggcggtcgtgcggcagacgcgggagacagcgacggttgtgcggcgggcatggaagacaaaggcggccgagccagatggcgacggtcgtgcgatagacgcagaagatgggggtggccgaactggaaggcggtgacggttgatccagacgactgtgaccgtgcggcggacgtggaaggcgccgccaaccgtgcggataacgcgagagacgacgatggtcgtgttgtacgacggatgcatgatatggtgtcggtcgggcggaatgagagcggtggtgacggctgcaaccaaggtggacgagggaagttgctgcaccggacaagggtgatgtctacgacgtgacggccatggccgaggcggacgcaagcagtgacatccgcagtagctgaggcagacgtggccgacggggggcgaggtgggcgctggactcaggtgacgaccgtggcgacgagggaagacgaaggcatgtggctagcgcaggggcgccatcgttgtggcgagcgggcccacaacctcgggttgcacgtggagccgagcgactaattagtccccgctcattctctctcttcaactatctcttctccacatcagtgaaaaatcctacgtggtgctcctatcgtcaattattgtactcgctcttatagaaccgttctatcgctgaatatcataccctacattagtagtttaattgtagaggacctggatccttacataactgttttttcaccgatcactctcatgaacactttgtgagcggtattttcgataaccgtgaaccgtgattactgctcagttaccaaggaaaacggttgaattcagagtttcagactaaatttgacgatgaagtttgattttcacttgagatttttcaaaacttgagtacttgactggtttggtggtttgccaaacggtttctagattcatacctccactacatcaacctaataaatatttgaggagttactatatccgtctcaaaataagtttattttcactaatcttgcacatacaaaatgactagaatacccctaatttatcaaatcccaatgtaactatttctcattttatcttctccaaatacaaatatcccatattttcacaaatttcgatgcaatgattattctaaacatgaacttactttgacacaaatgaaagaagctagaaatgcacttattatgaaaccgaggaagtacatcgcatttgtaaaccttgcatagaaaaacgtatcccactattgttccctagcagcaaaaggattctcgcctgaacaaacaccaccaaacttactcgtcctttgaaatatggaattttattccgaattctgcgaaaattgaattcggctgtgtagaacgtctgcggatctccatctacagcccattttgcagcccattacgcacagagcccagcccaacttcccccaccacccgacccctaaattctcgttcggtgattcgcagcgccgccgcgctgctcaccggcacctcgcgccgccgccgccgccgccaccaccaccacctcctccgcctctcctcagctgcgtccatcagaatcccgcctcgttccttccgctaccgccggctgggatagagaggccacgcagctctcgtcgtgcgcggttcaggcaactcagcccgcgcaggcccggatatggcggcggccacgcgcgccgcgacggcgtcggcggcgaggcaggtgacgaagcggaacttcgcggaggccgtgcaggatctggcggcccacgtggaggcgtgcgactacgtggccatcgcggcgcagaggacgggcgccccgacgggctggcggcgcgcgctgccggtggacaccccggagacggcgtacctgaaggctaagctcgccgcggagtccttccagccgctccacttcgccatctgccccttccgcgttgatgccacatccccttcgaccctcgtcgcctatccgtaagcagctctctctccctctctccatcctgcataaggattactatggcagctaggattttcgacaatgcattttgtcgaacgtcttgcgcgatttctgtttgcaacttgcttgcgatcaaaatgtcagcggcgtcttcgagcaatatgaaatgcatctgactcttgccttgcagagtgcatcagaatgccatacagatgagaaactacctgtgttgtcaacatttttcctagtttggcgaggagttattgaaagttgtatctccacgttacatctggaactagtttaagtagtgaaaccaggggaaacgaatcgtagcctcgtaggcaagcttatcacatgactagttaattttctttgcagtttttatgctgggccagtgatgaaaaaaacatgagcatgaaggctcatcccaggatgtaaaggaagactactctatcgtcctgggttcgattcttcacgctagatgtttagttgaattgtcaggataaaataatgctagaggctgtggacagccaacgatatatattatgtaattcagtagagaggtggtacaaataaagatagaagtgtccacttatccatgttgtgaggaaattaaatgatgtatttgaaataaatagcctgttataaggacaagcaaggtgttaatccaggaaaaaaatgacatatggtttgttggctcattgccatttctagccttacaaaatttttttgccagtgacaagaattggtaattgccaacttttttagtaaaattggctaggtctttgtttggtttggtgccaattaccaaagttgtacttgccatccaactaagcatatgccaataatttggcaatgccaatttttggctacaaaccataaagatgactaatattctgtcaccgtcaatgattttttggtttggttgagtttggctacaaaccaaacagacgcataatctatggaaatcgaagatgggggtcctttagcatagtgtttgaacttttccacagttaatgtagagcaaggcaggtccaattgtattatcacacaaatgggataaatgatagaataaatcagcttcagtgcttaagtatggaccaggtaatcaggtaataactgaaagcctttggctgtactgatatcctctgtcattcaatgaactgaatcagttgacagtcaaatgaaatataccatataaactagcaagcaacccaccaaaattatatgtgctgtttcaacttgacgtcctatttgaggaactgaatcagttgacgtcctatttcaacttcctggggatatagatcaaccatttgaggactggtggctagcgatgaggcaaaggtttgcgaagcaattaagaagagcattcgattctctatgtttgatattaagttggcttgtgtggaaggaaaggaatgccagaatttttgagaatcgaaggaagtctccatcgcaactgtttggcggtgtcttagaggagattgtggtgtggagagaagcgggagtgttcaaagaacctgctgattagctgttgtctttagtggatgtggttttggcgacttgtctgccagctccaactgaagctagcctgtttcttccagatatcgacagtgttctgttgaggaaaatatgctggcgttaatgtaaacttaactttattgcatttcctcttcaaatcttaatacaatcggttggtcgcttctttggccaacctggctaaaaaaaatggtatgtgctattgcacagaaattaccatatttaaggacaacaaagttgctttgaaaatctctatatctcctggagtagctcttgactccgacctgtttctattagaacaacaatttaaccatactaaaatcttctgcttgtgctactttcaaagaacagtacttgtattgacattcatttatgcatgacaattgaaaccaccctgttttgcatattttactagtttgttcataacagttaagttcatttatgaccatggccaatcaatttatccatttttattgtctataaatgttagatgcagttttgtatggagttcacaaaaatttctagacaatcaattcaaaatttttgtccacttgagagtaccatgttgtgctctcccttgcttcagtccatagtattttgtattccctgattgttgctgatgcttttgtctgtattttggatgtacaggtacaattttcatttatttcccagagatgagttacagttgggaatgcctgcttacagtttttcctgtcaatcatcttatttatcatctatggctcatagtggttttgatttcaatatgtgcatttatgatggtgagtattataccatgtactgtgatgaatagcaagttgtattattttttatagacagcctaattttctggtggccatatgccaggtatatcttatttatcaagggctcaagaatccttggcaagggaaaggatatttatccctcatgttcgccaattatcatcgtcaccaagcacatccattgctgattccgtttttctgactagaattaaatcgagaatagagcattggcgaaaaggatatacaaaaccatgtaaaacagctgatggtaggttattatagataaatgttcagtctaattctagtctattggccagtcctgacatcgcttcttactgggcaggttctctagtaaatacccttaggcaactgattttgggtagtgaatcgtatggttcaaggcccagtttcagcattgatgtttgcagtgatcgccaagttcaactggttttggaggtgtgtttttacaagttacatttgctttctctttcttcaaatatgatttcatcaattattcagagaatcatagatttcatcaagaaaaaaagatgaatttaggttgagcctacttatgttctgaattttgtttcactattgtattggttttgagtactgatatatgaaaataattcactgattttgagaactgatatacgaaaagaaatccactgatttcatgaagaaaaatgaatttaggttgagcctacttatcttctgtattttgttttactattgtattggttttgagcactgatatatgaaaagaattcactgatttgtaacagatgctttgctttagatttaacatttaatttcaataagccgatccttatataaagtataaataaataaaattgcaacaagcgaaatggattgttccatctgttacatcacgattatgtaagctgtaaagttaaataataagcctgtttacctgtgtaatatttgattgttttgagctatgctgcaggcagcaaatcatatctctgatgaccttgtacctcttgttgttccggacaaagctgggacagctagggcagtgcgtgtgatcttcactagttctccagaggataagaaccttctcctggtttgtatctcttcagattggcagcatgtgcttgtataaaataaaaggaaggtgtcacgtattcaggatccgttcttatggaaatcattttcagatggacataaaaaaaatggaggatgaacataatttgaagttccgtggttttcgagaagttattgatctactatcatcttcacagaaaccaattatatcttataatttcttgaatggtaggttgatgcataacaaacctgcacaattttctgacatgttaatcttttttgctcttgatttcaacatctccctcttatcccagatttcacaatgatacactccaaatttgttgcacctcttccaccaaacttgcatgaattcatgtgctccttgaggatggtattttctaatgttattgacatcagtcacatgtggagagaaattggccctttgagaaaagcgaagaatatacaaggtgctctgagttacctacaaagacaatactttgtgccgatggatgtagaaatacctcagcaaggtatagtttcagctgcataattgacatgccatgtttattcataaaccatggatcatttccttttcaatcgtgtttgggaaaccaaatgaagtgtgggtacaaaatcgatgactaaatcttaaattcttcaagctactgaactctcactttttattctcttttgcagatggtaacaacagtgtcaccaaaagtggggaaaatgttctgagaataacaaagttgtttgctaaactaagtaatttactgaaaatcagtcccaatggtcaaactcactctggtgataagtgtcacacagttgaggaatattcttacatattgtatccgagttgtacggctgaagaatctgaagatgataaatccagtaatgagtcaaataccaccagatcagtgagaactgataatgttgttttcctatgggggtttagggagacatctgtcaaagaactgagatctcgccttgcaagcttgcatcatgccttctcaaaagattttgagctcagattattggataactcgtgctcagctttgatattccacagttctgatacggcaatagatttactaagagaaataaactcggaaagtccctctctgaataatttcttttcggaaggcctgaaagctgcaggctttgatgcctacaggaaggtttgcaggtcagggctttgggattcagatttagctgaggccctggatggtgtttcatctgaaccatctacttcaacgctttctgggcgtggcacctctgagatatgctggaatacttcgctgatgctagatctaaaggaatatctggaacgctaaacaacatatatttttatggaagtcgcctcagattaataagagtttccaggtctgatcaaccacaaccagtcagcattgctggaatcttcagttaagctcctatgaggagaacatcacttacacgatgattatgttgcttgactgaccataaatgggcaaggtgtttctattcgtggcgcaatcatgtggaacagtgatattgttttcagcttcagcacaatggttgcttacattgcttactcctcacctgacatggcatgactacatttttcgtaatatcagctaacccaggtttctcttgtctttacggagcttccacagaaaacccaggcactccgaggtgaaggtcatccttgtacacaatcagctggccattgcttcgtttgatggacgacttgctgctgaagaggaaatcagttacaccgactcagatccccacatgaggactacctcaccgtattctgatctcaaacgattcgtaaaactagccttctgtggccatgagagagcaacgcaggactcttctatgacaactagccagttgcagcacgcatggaatcgtcaaagtcaggtactcaggtggggaattagtattggaacctaagcccgaaagtcagtcggtcacagcattgtgaacgcatgccatcgtgttcctgcctaaccacatggtgactcctggcctgtagagcaacaccgtgaacacaagcaacgccaaagtctcctttcgacattatgtccagacatttgcagtgggaaaaaagtatgctttaatctttccctgcagtgttatcccctaaccaaccgaatgaagagactgtttcaagtgacatggtatcaagggagtaaaaatttgatggaatagaaggcaattttagtcgacttttctgtttaagaacggtctgaagaagaaatatttgtgctctcagagcatgagcactccagaaaagaaactagatctttagatctttgatgtgatacaaattctcatttatagatcgtgagatggttattttctccttttggcagtagggcttcttattggctatgtattttaacaccaaaccataaccacatgataccaaaattttagcaataccaaatcgtgtattaaaccaaacgagcccttcaagtctcatcgagggacatcaaagcagaaaattgtgaagatgtgatggtagttggatatacttcatggtgaaaacacactcgctctaatatactcatacaaccacttacacctagtcatgcaaactcaacaaccaaatcagcgaaataatattcataataataaaaacatttaaatagcttttaaatggcgttacacaaagtcaccaaccacaaagtgaaagaaccatagagagagaaaaacccactagaaataggcattgaatgaatgatggagtgacgaagtaacaataagcaactcacaagttgaatgtgaaaaacataagaaaaacaaataaaaaaaagatagtcgtaccgctggatagggttggatatggttgaatgagtaaccgagtaataagatcaaataagtaatagtaatatggcattatgtttagcttaaaaaaagtatatgtatacatttatagggtaggctcaacttggttccactggctcactgccctatctagcactttcccccctcatcttcttcattgcccctctataggctcttatcatttttctatttttcaatttttcgcgtgacctcaaataagatcataaaaatatcttagatatagaaactagagatagttggatgattcaatgaagttactttgagtatacttactaagttgaaaaaagatactgaaaaaggtgtaaagataaaataagtttaatataatagatttctaaatttcacacacaatgccaataaaatgcatgctagcatcacaattgtaccaattcaaactaatgaataatgttggatgtacggttgaatggtgggggcgaataagtaaggggtgtgcttagtatgaaagagcatccatacacgcttcaaggatgaaactttacccggttttactggctcgccgcactattaagtactcacttttccctcgttttctcctttatccctctataggctcggggtctgttttcatcttttcgattctaattgacctcgcactaaaataagccaatgataacacttggatgatgtgctgaagtaatcccgagtatataactagtttaaaatatatgcatccgaaaaaaccgtaaaagataaataacgcctaagaacatcaacaacaactttctaaatcttacttactaaatgctaacctaatattaccattgtaattgtatcaactctttttttttttgacattggccctgtttagattccaactttttcgtcacgtcgaactttcccacacacacaaactttcaacttttccgtcacatcgttacaatttcttcaaattttcaattttggcgtggaactaaacaaagccattgtaattgtatcaactctagccccgaataaggtgttaaaagaaaagagggagggaaggaaaaaaaaataaaaaaacaagtctaaccccaaatagctttagatacgcgaaatggggcaaaaacaaagcgatggccgaacacccgtacacgtctgaggggtgggcccgacccggttccgccggctcgtccccccgctttcccctcgccttcttcatccccctcctccctctccattcctggatctcctccgcctccgcctccgcctccgcctccctcgcaaggggtctcccacgcatcgccgcccgccgctgacgcgtgggagccaccccttgcccccccccccacaccacccgccgcttcccatctccgacaagcgcctacaacggcgtaagtagccctaaccctaggtcgctggatgcgccgatggccgccgccgccgcagcctgcgtatagagccccgacgagggcgtggagatccgggaggtatgggcggggaacctggaggcggagatcgcggcgatccgcgacgaggtcgaccggtacccgtacgtcgccatggacacggagttcccgggcatcgtgtgccgccccgtcggcaacttccgcaccaccgacgagttcaactacgccaacctcgaggccaacgtcaacatgctcaagctcatccagctcggcctcaccctctccgacgagggcggcgacctcccgcggcgggggacggggggcaggcgctgcatctggcagttcaacttccgcgggttcgacccccggaccgacccgtccaacgccgactccatccagatgctccgcacctgcggcatcgacttcgatcggttcgccgctgagggggccgacccgatccgcttcgccgagctgctcatgtcgtcgggcgtcgtgctcaacgccgacgtgcagtggatcaccttccacagcgggtacgacttcggttacctgctcaggctgctcaccggccggaacctgccggacaacatgcccgccttctttgacctcatcagaatctacttcccggtgctctacgacatcaagcacctcatgaggttctgcagcaacctccacggcggcctgagcaggctcggtgagcttcttgatgtcaagcgtgtggggacctgccaccaggccggctctgactcgctgttgaccctcgggtgctacaacaagatcaaggaggtgtacttcaaaggatcgaccgagaagcatgccggtgtgttgtatgggcttgttattgaggatggggtgaacagaccaccaccaactcagcccaatgaatgaatatggttagttaaataaaacaatctgaaatgggaaaaaaaattgaaactttcgttggtgaatatatgttgtctgatctgatctgatgatttgcttatggtttccatggtagtttgttgtgccttgctgttactatttgttgtagttgagttgctttagttgttttgtctttgactctttgtgctgtgcaatcatctttcattgtttgcccaatttttatcgctgactgcactgtttagttcaagtagcaagttcttgtcatgatgaattagtgcgaaagatagtaggatagttcaaattatgtttagggactattgcattagatatcttggacagcttgtctggttaattttactgcaaataagcgattgcttcgcttccatacaaaagtatgtatttaatatctgatcgttctttttgatgttgttccctgcctgtgcaatcaggcagttcgtcatggtgttctgaaggtacaatactctcagcatgacaattcttttttatgttgacatgcctgtttgtgtggtggttgtccttcgtttctcagtgggtacttctttatatcactgcttgtagtatgctgatgaaatgcaaaatcttaagtggtcactagctagactacgaattatgtttgtttcaaaatgttttcatatgtctattgtatatcattgtttgcatgtactggtgcctagctagcacctttacattatcatttataggggtgctaatggactggatttaagtgggctgaatgggttggatctaagaacgggttggctttggttgggtccgactggattgatttaagatttggcctggatcgatttggggctacaagtgaagcggtttggattggattggatctggctgaagtgtttttggttttaaaatggattgaacccatggaccccaaccagtacattgccttggatcctggtcgagtggttgcgcaccgggtgtccgagcgtaggaggcgccgctgtccctcccctccccccagtcatcttccgtgcacgggctgcaggaggtgccaccgctgtcctgcctccacccaccctgggcacagtcgcgccgactgttagaacatcgacctgagggtagtgaagtgaatgaggtgagcagagcaaagaacaacatcgagcaaccaactgggagtaaaagagatgagattctttggttgaaatctcaaaaattggaaaaaaaaggggacattgaatgcatgatttcttgaagatttcttgaggatttgttgtccagcactcagcaccttaattttaaatctgtctgtcgccatttgttcagcggcttcatgtctcagttattgtcctcgccgtcactgtcgcgtgggtgccagcagacatggtgcagagtgatgtcatcttctgtcagcggtggcactttctcgaaaccagccatgctggggcacggtgggagacaccgaatgtcgggttgccttgtctgtggcaacagtatggatttcattttctctaggaatggtctcagaatgggttcaacctattattttgcatttggtttggattagcttttgtgttggggtgggttggcttggattctacaagtgattagttgatttggagtggactgggaaatatgcaatacagacaaatggggcggggtggatttggaatgggtttcagtccactggcacccctaatcatttgatggacgttctgcatatcggtaacatgggggaactgaaaagattaacatgatctggtttatggttgagagtaaatatagattgttttactagctagcttgttttagcttcgtaacatgaattttagtattcatatttttctatgttgtttattggttacaaatgacaccatttcatcagatgatgagctttaacaaatgcttcacttgagtttggtcatgtggtctgatatcttcttcaatttacatttaacatggcattcctctatcgcaactgcttgactgaacttgctatcaatcctatagtttttctttactaaatattgatgatgacattttttattccttatactagatatttgatggtctgtcatataaaattcaattgaaattaattagacatctataggaatgtattactttgtgttctgttgaccagtttctgcagttgtgcatttagctattcattgtatggctgtttcgtttgcttttatctctatatgtccggttgttgactgtttatgtggcctttgggaggacttgcactctttctgtttgatgtttttcttcctgttacttcagcaatacctatgtatgaatgctaattatgtttaagcatttctctcgaaagaagagaggacttataaataactttacatcctaattatccagtaaagaggtacttctgtttgatgtttttcttcctattacttcagcaaaacccatttagacatgccaattactttaagcctttctctagaaagaagagaggacctgtacttgttttgcatgaatagtgttcctttttgaaacttagtagtattatggtaatgaacttctggcttggtttctgaagtttcctgcattggttatggtcttggtttgccaatcgtcacatttctgtacatatggcagaacacttgttctacactgacgacagagctcctgctcttatttgaggtcttcccaacagagaagtttgagtctgctcatttccttttactgtattatctgatttggtctactctgtgcctgtggtttgatatttcattcccaatggtatgatcgattgcctttgtggtttgatattttatcccaaggcaggacctgctgcatcatatatatgaatccagagttccattgccgactaatgtggatgatcctattaataggatcaacacaccaaattgtttggtttttgtactaagtaatattgatatgagccttaaagatcctttttgtttcctccctacactgtttggatgatctaataggatcaacacaccaaattgtttggtttctgtactaaggcctggtttagtttctaactttttcttcaaacttttaacttttccatcacatcaaaactttcctacacatataaactttcgtctttccgtcacatcatttcaatttcaatcaaacttctatttttgacgtgaaataaacacaccttaagtaatattgacatgagccttaaagttcgtttttgtttcctccctacgctgtttgcatctgcttacaatgcataccagatgcttatctgctgtcagaagcttactctttgtttgactagttggattagaaatcaaaatggaattaatttactggcgttgaatgcggctatgcataactgcccatggctggattgatccctatcattttggctactccctccatcttataatatagcaatctaaaattagatggaacactttatagtacaacgaaacgaatcgaagtatgtcttaactctctggataggaagtatgtatgaactcgttgtactattaagtatctcgtccagtactagattgctatattagggacggaggaagtatcattttactcttaaatataggagtagtacaaaagattcctctgctgccaatcaggttggcacggatttttcctttttttgtttataggaggtaaaatcgattgttaccactactacgcctcgatcacaaaccttgagtcggcgaagtgtatattttgacctcacacgcggaagataaacttcacagagcttaagagaaaaatactttttatgaacggaagcttctattaaccactagctcaagccgtcggaccaaaaatattttcctcggtgtgcacaacatgccatttattgtgcactactataaatatgaacacccattttataatttagaccactaatccataggtgatgcctaaagttttttctatttagttttaaagtttttagggatgccagtgcatacttggaggcctcggtgcctctaggcgaatccgtgaacaattataaagcttggcgccaggaaaatacatagttgagcttgccattgattttttaaggaagggttaagtccgatttaccccctagactcttacgaaagtatgctttaccccctaaactatgataccagacataatacctcctttaactattcaatttggacacttaaccccccgcgaccaatttcggctggttttacccctttggtctgacatggcactcccatgtggcaaatgatgtgccagttacataaaattatccctaaatagtctaaattatcctctctctccctctccctcgcgaaaaattccccacccaaacccctaaccctagcggcgcaggtggatctgggcggcgcaacggcgtggtgaagggctgcactggggcgtggtgaagggcgacgtaggcgaggctctgcggcgcgagcggcgcgcgctgcgcaggctccgacgctcacacggcggagcgagacacgcggcggtgcgacacaagcgcagcggcgaggcacacgcgcagcggcgcgacgctcgcacggcggcaaggctcaagcacgggacggtgcacaggtatgccacagagctcaagcatgtcactgatgcaaaggtgcagatggaggccaatgttgctaggcacaaggaacagatggaagcaatggggaagcaaaaagatgctggaaaatgctaatctagttgctaaaaataatatattagataagggaagatgtgtgcttctgtatgcatttgtagcatgtgtatttgtaattctggggttgtatgttaagctgtgatcttcctgtatatgcaatgtactagcatgtaatcactgcatgtaatcagtactgatatatgtcatggagaggctatttgaaccagcatgtttctcaatttgtgatggtcatgttttgtgcaataaagtgtgtgcacagttagtataaatcaatcaaggaggctattttgaatagcacaagggaatatatgcttcagtg

SEQ ID NO: 28411 - DNA, 18095 bp, Oryza sativa
aatagaattgtggttgctacacgaaaactaattgattttcccatgcaatttacaaggacaatttaaatagaaatgtgtttactacccaaccctataaatagaaatgtgatgacatcgccgttgacagtgttcacctcttgatttcatggaaggtgcgtgaggtgggatgatatggagagcgagggcttccataagataatggcctactttcccgacaatttggtgaatctgccgcctgtccctgatgaggtgcatatgtgcatgtcacaaaccatagatctattctccccactatcctcaccagtgttaaggaggatggtgaccaagctgtttaatagccccactgtgtgggcaccatcacaacggccgccaccattctagcgctaccactgatggtggagcttgacgcctatgtccactacatcatggagtctgtcggggagctactcctcgtgagcatgctctagcactagcatctggtacacaaggtggacaccgtgacaaggtgtttgtcccggtcagaagccttgacaaccgctccctctttatcagctagatcaggagtttctctgtcgaagctgacaacttgcctactgtcgaggctggctgcatctacttcatgaaacagaacctggcaaacaacaagtatttttgtctcacactcagatgattggaggaggccatatgcatggttaatctacgcaatgttgctgaagcagaaggttgcatcctccctctcaatcaggagcaagtcatgctaaattactatatcaacaatgagaagtcaacaatgctcaacttattagcaggtgataggtacataacagagagtagtctagtggcgcagaaaaaacatcactaagaaaaaaaagtttgatggtttagcaaggcaacacgtagaaaatgatgcacctttgtggatggtggatggtgaagtcggaggagatgaagggatggcagaagcctgattgagtgaagcatgttgggcctgacattttcccataatttctctcaagataaaatgtgtccaacccacttattctaaaatagtatgatggtggctagggtttgaaggaaaagagggtataaacctagattagcggcataacacgtacgattgatattcatccaatggttacaaattgagtagccaattacaaaacatgccagttaaaaccaagatccctctttaaatattagcgacaagtagcgctgctcatacagtcacatgcattgcatgtggaagtgcaaatccatgcacataggaacaagcacctacgagggtttagatcttgtctccactggccgatcaaccatagtggtaatggcaactgactgatccctgccccctcctccgacttcatctatcacgtcagtgactgtctcttagcttccgaagacttcgacaactacgacactttgcgcctcatctgctccaagtggtgtctggcaccaccaaccctaagacgacggacttcgacgatgcagcttcctcaagaagctggccattctcgagctcaacggcaatagatacggggacgcctccattgccacattcttcaaacttgacaccggcagcttcgtacgcaaatgtgtcctagtgctacgtgactacctcttcatcgccaacatggccattggccttgtcatgatcttggagatgacgccaccccataagaccagcatgctcaacccctttcatgcgtaaggtcgcccattctagggagctcatccatgcggaggaggtcagggaggtggccacgacgaactcaccattgatggtgttcacctcctggttccatggaaggtgcgtgaggtgggatgatcaggagagcgagggcttccataaggtaatggcctactttcccggcaactttgtgaatctggcacctatcttcgatgaggtgcatctcaccaaccatggatccatcctctccattatcctcatttgtgtcgaggaagaatgcgaccaggctgttcaatagccctgctatgtggacatcatcatgatggctacaaccattccaactctaccgttgatggcagaaaaaagctcattaagaaaagaaaagtatgatggcttagcatggcaacatgctgaaattgatgcacctttgtggatggagtatggtgaggtcagagaaggtgaagggatggcagaagctaggctttaatttggaggcaatgactgagtgaaggatgttgggcctaacatttttccataatatctctcaagataaaatgtgtctaacccatttattctaaaatggtatgatgatggctagggtttgaaggaaaatatggtataaacctatattagtgaaagaggacgtatggttgatcttcatctagtgtctataaatcgaatagccaatcacaaaacatgccaattaaaaccaagacccctctttaaatattagaaatgtgtagtactggtcatacactcacctgcaccacctctggaagtgcaaatccatgcacctaagaacaagcacctacgagggtttagatcttgtgtccactagccgatcaaccggtagggaggtggctgtgacgacctcgccgttgatggtgttcacctccgggttccatggaaggtacatgaggttggatgataagtagagcgatggcttgcataaggtagcaacctactttcccggcaactttgtgaacctggcgcctatctccgatgaggtgcatgtcaccaaccatggatccatcctctccactatcctcgcttttgtcgaggaagaaggcgaccaagctgtttagtagccccgctatgtggacaccatcatgatggccaccaccattctagcgctatcgttgatgttcagagcttgacgcatatgtccattgcatcgtcgaatatgcctgagagctgctcctcatgagcatgctctagcgcttgcacctggtacacaaggtgaacaccatggacaaggtgtttgtcctggtcagaagccttgacaaccgctccctctttatcagctagatcaggagtttcgctgtggaagccgataacttgcccaccatcgaggctggttgcatctacttcgtgaagccaaacccgacaaccaatgagtatatttgtctcaccaactgatgactgtaggaaaccatactcatggttaatctactcaatgttaatgaagcagaaggctgcatcctccctctcaccctagagcaagtcatgcagaattactatatcgacaatgagaagtcaacaatgctcaacttattaggtggcgatgggtagataatagtgagtaaaatagtgggtaatccagtggtgtaggaaaaaatctcatcaataaaagaaaattatgatggtttagcatggcaacacgctgaaaatgatgcacctttgtggatggagtatggtgaggttgaaggaggtgaggggatggcagaaactaggctttaatttggaggcaaagactgagtgaaggatgttggtcctaacatttttccataatatctctcaagataaaatgtgtctaacccatttattctaaaatggtacgatggtggctatgatttgaaggaaaagagagtataaacctagattagtgaaacaggacatacgattgatctttatctagtgtctacaaattgagtagccaatcacaaaatatgccagttaaaatcaagacgcctctttaaatattagaaacgtgtagtgctgcttatacactcacctgcaacacctgtggaagtgcaaatccatacacctaaaaacaagcacctagaaaggtttagatcttgtgtgcactagccggtcaattggtagggaggtgattgtgacgacctccctattaatggtgttcacctcttggttccatgggaggtgcgttaggtgggatgatcacgagagcgatggcttgcataaggtaatggcctactttcaccaaccatgaatccatcctctccactctccttgccggtgtcgaggaagaaggtgaccatgttgttcagtagccctgctgtgtggacaccatcatgatggccccaaccattctagtgctacccctgatggcgaagcttgtcgcctatgtccaccacatcatggagtctgccagggaactgctcctcgtgagtaagctctagcgttggcacttggtacacaaggtggacaccgtggacaaagtggttgtgcctgtcagaagcctcgacaatcattccctcttcatcatatagatttggaatttctctatcgaagccaacaacttgcccaccatcgaggcttgccgcatctacttcgtgaagccgaatctagcaacctaggagtatttttgtctcatcaatagatgactggaggaggccatgcgcattgtgaagcagaaggctgcatcctcccctctcaccctggtgcaagtcatggtgaattattatatcaataatgaaaatttaacaatgctcacattattagacagtgatgggtacaaaatatttacttatccagtgctatagaaaaaacctcatcgagaaaagaaaagtgcaatggtttagcatggcaacatggaggaaagatgctaaggaggatgagggtgatggcgactctttgacaagcaagactagtgcataaaaggttgcacctttgtggatggtgcatgttgaggttggaggaggagaagggatggtagaagctagggtttaatttggaagcaaagaatgagtgaagcatgctgggcttgagattttctctgaaatttttctcaagatgaaatgtgcctaacccatttattctaaaatggtataatggtggctagggtttgtaggaaaagggtataaaccttgattagtgaaagaggacatacgtttgatcttcttccaatggctacaaatcgagtagccaatcacaaaacatgccagttaaatccaagagcccaattatgtcctaatgatatgatccctctctacatttcatgtcgtttgcttaatagtactacttttgttcgatgagatactgtggtgaaatcatttgctttggcttccaaaaagatatgttgctcccttcgttttttcatatatgacactattgactttttgagatacgtttgacccattcgtcttattaaaatattatataattattatttattttattttggtttgatactttgttgtgtcttgtttattgctaaaattttcttgtgttaccatgatttgagagttcagttgcttatgtggcatcacctatttaattattccatcatctagaataaaattgtatttgattccaattagtagttcactactcaaaaacctgtgcgctgcatgggatagtattttaattacatttttactatcatgttcaagaaaatgactttcaaatataaataactaaaattaattccaaatcagatattaaagttttaattatttgtaggcccatattatattatggtggtttgctttactttttttttcaagtgagctctaatagtgtttagtacacttttgctaaaactcatcagtttttttcctgggttatatcttttcagaagaaactgggagacccttttctgtttgcatatgtggttttactctttttttatatatatagatatgaagctaatatctttcttcctctaacacaatgtagattttcttttagtggttggggggaaggggtaataattctgtccattagtaggtttcttctttcctctaagtgcttcttggcgtttgaaagatcttattagataaactagtgagcagtccactttatgaaggttttgtccaactggtcataggtgccggatatcctaaccggcacctttgatttgttggtgtcggatctacaaccagcacctataaaacatatcggtgcccattttatgtaaagaactggtacctatactgccatataggtgtcggttcttaaatcgactgccacgtggacaaccttataggtgccggttgtactagttcttgaatacaaccgacacctatgagaagtatataggtgcttgttgtagaccgcgtaggacacatggcaattttataggcgcgggtttgtaagaaaaattggcacggcacctatatcttggcaagaaaaaaatggcaggagctccaatttcacatacaaatcacacaataatagaacttcacatcaattcacacccattcatcaacatacaaccacattcacattcatccaaaatctattcaattccatatccatcatcaacatacacacattcgcattcatccaaattcacccattcatcaacatatgcacgtgcctagtccatttatcgtaaaactatatgttggtggctagggtttggaggaaaagagcggatgagagagttaaatctagattagtgaaataaagactatgtatgctagatcttgatccaatggctacaaatttaagagtatgcacattagatcttgatccaactggtgcagtttgagtggccaatcattttgttgtgtgatttcgtttcaatgagatattgtgtgatcttgttttgcttttgttttgaaaaaaacttgttgtttggagattatactcgcaagccttctttatcattttgattggaatttgcctaatggaacaggcatatatgagctagatattacagaaacatatggggtcactgcgcatcgccgaactgagcttttgctcaaagctactccagtgtatgcatgattggtcggtacacctagtcagatatgtactgtcaagacaaatgtctggtctcttaaggccctctttgtttaggcttaggcttattggcctagacttttaagtcagcttattggtttatatgatttataagccagtggatttaatgtcctaagtttagtggtggagtcatacatctatctcatataagccaaaaaaagcttctccaacctagcttttggcttaatagtgttagagtggcttatggcttaaaaaagccaaatgaaaaagctacttgtttattttggcttagacttttcgacttataagttggcttataagcctaatcaaagagggcctaaacactgtccatgtttgcctacttttgtttatattataaataagaaatgcaaaatgtggccacagcgagtcgatttgagaccctgaagatgtacccaagtttgatgtttgctcaatatagcactcgcaagtcttctctgccatttcaactaggagttatcgggttgtgaaaccaaaaggagctagacatgagtgaagtggtctgaaagcttctcgacacactgatctttgcctagaggcaactcctttgttgccacagcctgttggatcttacgatatttcttgtaggagcactggaacagctagccacgtatctttcagaaagaacagctaaacggtgtgtttgcaagggggtgttcccaacactttcctctcgttttctgcgcacacgcttttcaaactgctaaacggtgcgtttttttaaaaaagtttatatacgaaagttgttttaaaaaaatcatattgattcatttttgaaaaaaaaatagctaatacttaattaatcacgtgttaatagattactccgttttccgtacgcactatacatgttcccatcctcccgtagcaaacacagaagctgctttcgggaggaggggttgggaatctccttcccggtacgcaaaacgaaacatgtattattgcatgattaattaagtattagctttttttaaaaaaatagattaattggaattttttaactttcatatagaaaatttttgcaaagaaacacatcgtttagcagtttaaaaaacgtgcgcgcggaaaacgagggagataggttgggaacttaaaggtaagaacacagcctaagaaaagctccagattacccactgcaggtggtattatatttgtgggtcacaaaccctgggtcagcatcctgcgtataattccagacttataccaagcttaacataattgcacttagcttaatagtaaacaaacatagttgataggtgtgcttgctagcgtcagcatgaagagcaaatacaaattatacaacagcttgtcgttctgaatattagaaagtaaattggctacatgaaacgtttgtatatttctcattttctgcacatcgtcatctataaccaacaaaatactcgggactcagggtttaggtcccttctttaaatttaaaagcattagcagaacaaaatgtcagtaaaattctggtgctatgttaaccttggacgcacccatgggaatgttgagtttacttgcttttgttaacgggaaggtagacgccctctgttgccaaccaaatattttcagctcgcttctctctaacgccacatacctgcaagataaatgctacaacttagcaaacaaatttccaaccaaatcacacttggtacctagagaattttgttttcacatatggtagcaaacctacatgatatgctttttttttttactttgttccaactaatacatactccctctagatttgagtttttttttttttggacagagcgagtacaatacacggtaactaataaaaagatgtgatagatacaatatgcattgaattaactaaaagttcataccaactattaagtaaaaatgtcacatccacaaacccagtcactcaaatatccctataaagtttttgcaataccatacttgtactataaccgtgtaatgatctaggattagtttgtttctgctaatctaccatctaacacttactcataatctggaggcaggaaataaaccatttactaaactcacctcttgctgcccaccaccaagcctgttgtacttcttgttgtgactgtgcagataacctccagtatcaacatgtcggagtcttactttctgatcctgtttccatagctttccacctccctcaatctccagcctgcaggacaccccaaaaaaaaaatccactaagccatactaaccaaccaaatggcatttatattgtgagccttaagtaattgcacctccaataatctccagtatctgattgtccatccccaccaaaacagctaacctgtaaaatcacacatacaaacctcagggattatatttgagaagataatgcaaaagaaacgcaagacatagaacttgcaatattatcctaatttagcagtgaactaataagtacggtaatttcttcacagtaagataaatcgatatatattcgtaacatacttaatcctgacatactcatacttaacatgcactgtaatgtggtgtgaccattgtaaaccactttgcttcagatcagcaatgttcaaacttcaggacaaaattagctctaaaacaaggacagcaacaactactggttattcaagttaacaaagcaccgtactatggaagatatactaatggtagttttagtctcattagttgcaagcaattctaggcactgttggccatgtaattcatgaacattagcaaatccagacagtggatggccgaatgatgtactattgcttcttgttttgtgttcttgttttcggataaaatacatatcaaattggcagatacgctgtcatctttcagctggtgtgtacaacaatatgagatcagctagacacaatatgtccacagatagggaaggataaagtaggtcttctaatcccatgtactattactgataatcatttgaagagagctcaatcagtttgaagagcactcaagcttttgggaaaaaataaactcagaatataacaactgaggtcctatgaaattttaggaactaaatgttgccagatatcacatgggatattcatgttgaaccaacctctaggttaccggataatggtgaagcatgcaagtggctatgtaaccatttccgtgtcctcatgtgttgcaacctgatgatgctaccggtttcaatggcatcaccctgtttagctgatgaatctggagagggccgcacgatctgcagatatacaagtaatcaaatagcatcagaaccctgattatgtctgattggactactcactacttgaatggcaatcatattcacttcagaatgtaactgctaattcttcagacgataaataataaagttttgttatttggggttgagatgtgatccatcatcctacacatataatagcagtaactacataaatacacaaaaattcttttgggcagtttccataatttgaacaatataggtgccattgcttacatatctcagtttgataattagtgtttagatattctattgccagcaggattctacaccctcaaatcaacactgttgagcacatttttaaaccgtcacaactcccaagcatatttgcacactgaactcaaatcaatgtgtaccatagaaaaaaatctattaatgtgagtagatacttgcattcagatcaatattgaatggttggttcaatcacatgttggcttgtacaaataggtagggatcaaatcaagagccctattataacatgaacgagaggaattacggatctacagaatgagacgcacccagtagctattggaatcatcgacttcggggaagccagtgacggactgctggccgctgcctgagccatacggcacatcgtgcgagtgcagccggtgcttcgtcttctcgtgcatcagcttgatggtgctcccataagccacctgcaacgccaccacacagatccagatcacacccgaacccctaaataaataaaaaaattcgcagatctcgagatcggggggaggcaggaggcaaacctcgacgccctccgccgccggggaggcggccgcggcgcccctgtcgaccccgtagccgctggcgccgaggaggaacgcgacggcgagcgcgagaacggacgcggccatcgcgacggcggccgcgctacgggacccctgtcgcggatgcggcggcggcggcggcgaggaggatgaaggcgtcgaagaggcggaggaggcggagctggctgtgcctctcctcttggctgctgcggaggcggcgccggctgaggccggcggtgccgtggccgcgggcggggaagcgcgaggcgctcacggtggcggtcgatctcgatctctctcgcgcgcgcggcgggcgtggggtgggcgtgtgcgtgtcgcggccgttgggaatcgggattttgccgagtcggggacggggggaggaggaggagtctccgtgggcgtggagaatgggggaagtggggaagctatacgcgtttgggtcgctggggactggggcccagagcccctccacgtgtagtgggcgaatggagggacggcacgtggcacggacacgtcgaagcttggtgtgcagaccgtaggatgcatgatgggcgacttggatgcagcgcggttaaggtcgcatgcgttaatgggccgtggctttttggtctgtactaggatccattcttgaaagggataagtctattttaccttgctcaacttatgcgggagagctaattcacgcgcgtgcgccggcggcgcgcgtttaggcccagaaagcccagcgccagcgcgcgcggggacagcgtttctttttttttttcgcttttcttttttttccgtgattttttcctttcctttccttttttcgattacttttagaaaaaaatttcgccttcttttttccgtgattttttccgctttttattacttttttttaatcttccaacaacacgtgttttttaaatgttttgtgttgaaagtttttaaaaattaacttaaaaatttttaaatctcgagctgaaagttttcaaatctcaagttgaaagtttccaatcctgagttgaaagtttttaaatccgagttaaaagttttcaaacccgagttgtcagggttatggataccacatacctaatagtagttgactaaatctcggtaggacccaccacataccatatcttatacggaaacaactttcggatataggaagagttccgcataaggaaggatgaatagacttctacatggaaacgacaaggactactccaattgtatccatattggtttccctagttctacttggacaaggggacacctatgggtataaatacaaggccccctaggagtagagaggacacaatcaacatacacggaacaacataagccaacatacgccaagacaagacgccggatattgacttcagagataaacatggctagtcccctacggtgcctacggataccgtcaggagagacatagcactgtctttgatctcgccggacacgaatttgaggaggaagaccactttgttgtcgactacgtgatgatacttcaagccgctatatcgacaacagatagataggctacctcaaatattgtactagtgtgattatggtgaataagagcaacgaccggcttcggccaacaggatgtagggctattacctgataattcaggggcccgaacctgtataaaaattctcgtctctgtctcttttacctaagtctcgcatatatcctggtaccaacgatccccatactgtgcaaataccagaatcgcgacatcaaacgtcgacacgagttgaaagttttcaaaatcctgagttgaaagttttcaaaaccgagttgaaagttttcagaatcctgagttgaaagtctttaaatccgagttgaaagttttcaaaatctcgagttgaaagttttcaaaatctcgacatgaaagttttcaaacccgagttgaaagttttcaaaatctcgagttgaaagtttttaaaccctagtggaaagttttttcaaatttgagatgaaaagttgaaagttttcaaattttggcttcaaaaattcaatttccgagttgaaaagtttttaaatatagactgaaagttttcaaaatttgacttcacacatagattttttttcaatctgttacttaaaaatatcttctagaaaaaaagtattatcttaattaccgtcgttatctaaaactaacatgttagttacgttagatatactcatcgaaaaaaaatccaccggcatacgcgataaaaaaaaccacaaaaaaaaataaaaatccgaaagtgaaaaaaagagtaatagaaagaaaaaaaaaagaaaacctaccctaggggctgcgtgcgcgttgccggcgcgcacgcgccaactaggaagcccccaacttatgccctgattgaatcacatcccttaaccgcaaaaccggatataactcatccctaagtcccaaaattgttacaaatcgactccccggcggtttcgtccgacatggtatctttgaccctgttgactggctgaatcagcttgtgggacccacatgtaagtgacaaggataaaaatgaaaatggtggggcccactgatcagctccaccacagagggatgggatacggcttggcgcggctcctcctcgtggcgctcgccgcgctctcgctgctcgccatggggggcttggacgaccaccatgccggccttagcctcgccgcgcttccgcgtgatgggatgagcgagccggctggtccagctggagaaggtttgtcggcatccatgcaagtaaacagcgagggtgtgcgcttgccttgccaacctcggtggcaacgccgttcttaccgtctccggtttccggtgccgccaccgagatagaggctgaggcgataagggacgatggaagggggcgcagaggacagcgatggtcatcgaggtgcttcaccatctgacgacgaaggagattgacgagggttccggccgccaccatgtcggaccccttcttttttgccattgtcaaggccccacccatgcttgaacggccagatttggtgccctgctcgagctaggacgaggggatgagaggaaaggggaggcgacgacactgagtcgagctgggaagagggtaggagagggcagggatggcgtcaccacagcaccaccacctcgacgtccattgtcgccacaggcccgcaaaactccaccgacggctgatgatctcctccccacacgcgttgcggttggctgacgagctcctccttccatgcgcggccagctggctgccaagctcttcccccgtgtgccgtcgccaccatcctgcctctatactaatgaaaggtgagaaaagatgaagagatgaaagagagagagggcgggaggagagggagaagatgggatgaggtgcagggcactgacaagtgggtccacatcggacgaaaccaccttcgaaactgcttggggtgtcgatttgcaacggttttaggagttgggggacgagttatatctggttttatggttaaaggatgtgattcaaccagtggcatgagttgagggaggcaaaataaactaattccttcttgaaatgtaatgttctctataataggatggcccaatgaataggtagtttctctatagggataagtccattttacccactcaacttattgcgtttgcatgaacaaaaaaacgtccttttaactccaaaatcggatataacaaaacccttaacttttaaaacaattatatttaaaccaccccccttcttgcagcgcacacacaccctcggtctcaaccaaagtaatttttgcctacgtggcattgacatggtggcccaatcaacctttaagtttaaaatatagcagaacccaccttgtagtgaccatctttctccacctcctccattttctctcgatctctcctcacagtcccgtagtcccgttgcacccaccacctactgttggtgggcttttcgcctcttcccgaatagccaccactgtcaacggggctcctctttgaggaccagccatctcatcatagaaagagggaggggtaatgatctagcggcagggattgtgcggcggcgttgatctggcgagcagatggtggcgttgatccgtgatggagggcttgcatcagcctgatacggtaaagggcaacactactctaagggatatcatgatgaaggaaggagttaatctggtggagagcacgtccacaaccatgtagcctgctggtagagtcggcatccctcctagttgtagggtgctatctttggtggtggactaggccataatgtcgaggcctcagtagtagagaaggatgtacggttgccgctgacgtgtggctcccatctttgtttatttgttttgatgttgaatggattgtcatgtcaacaccacagttaaaaaccacgttggtttagaccattagggttaaatcgaaaggttctaagaattgagggtgtgttatacctggtattagagttttttttttagagttttgggctgtttttcaatatattaacgtaatactaggtaagggatgttaaatgaactcccagagtcaacgttatggaaacatcaggctcccacagagttaaatctggtaagtcccacagtgcacaggggagtattattaatgcagcaaccgggaaaacattgggctaggtacgtgccgatccacagagaggaacatttaaaagaatcgagatcaatggtcatgtactgctcagcgatccacagacagaccacctgcagacctgccttggcttggctgcttccctttccagcgtgctgaagctgagcagagctaccgacgagtccaagattcagcacacagatcacacgaccgtgcctacacttcaacacttgtacctacacttcaacacctgtactagcagcagccagcaaagtgcccgagcgatcaacctgccacttctttctggtgctactagtaacaaggagtaataaagtggagtacacttcttccatccaaaaaaaaattaatctaaaattgaatttaacataatccattataataaatctggacgaaacttctagattgaatcttttagggcaattacaaatttaccactattttaaatcgttattgtaaaattatcaccagaaaattacaaaaatgccactagaattatcattcgagttgcatccttgcaatattagaaaaaccgatgacaaatttgtaaataccccttgatcttttgtgggacggataaagtaattcagacagtgggtaggtgccccttggtttgctggtgttagcctttttcatgtgaagaatcatcaaacgtttggatcattcatttcaacagccggctgcccgaccggctgccgatgcgactacgcaactgaaaaatctgtactcctacctggctgcagggcacagcaggtggcaatctcattcttcgggttggtcacgagacctgcagctatctacggcttggaccaaaagagttattggcattcgggtgcacggcgcgatcgcgggtggttcgctgccgctcacggcgcccggccggccgcgtcccaatcgggacgacgtggacgccgccggcgccatgaacggcagcgagcaaaggcagtagtgggctgtggccaccgcccaccggtggtccgagtcggttgggctgctgcacctgtattcttagggccctttgaatcataggaatgagaaaacgtaggaataggaaaaacgtaagattttggtaggaatgcaagtgtaaaacagaggattacaaaacaaaggaaaaaatacaggaatgaccattagattggaccgaagaaaaaacacaggaattagaggagagataaagactcaaaggaaagtttccatgaggttctaccttatattagaatttctccaaaacttgcatagcattagacattccataggaattttatgggattccataagatccattcctttgattcaaaggactatataggaaaatttcctttagaaataaaattctctaaaattcatatgaatttcctttgaatcaaaggaggccttacttcccggacttgtgtggctgccacagatcgaactgttgttttgctttgtgtaattgtgttggtcccgtacgacggtacgtacaagagatgaaagtgatcagaacccgtctttataagctccattgttgttggattctaggcgtggtgtgtgtgcttgtttgggggagaaaaaagggggtgtgatttatattttcggatttgagaacaaaaagggatgtgatcaatgtcgtattctttgaggttgtagtgttgttctcacactatggtccctaattaagcactgagaatatgcggtttgtggtcgacatgtcatgtatacgtcgatttggattagccggccggtttcagagaaacaatagagcaggcagcagttgcaatggccaagacaagtatactggggcagctcatgtaaccgcctgatcgaggcacgcacggcccggttatgcccctcgtgaggatgtgtgagcctcgttgaaaccagaactactcggaccgagtaaaaaaacgtgaactactcgcattttttgggtcaatatcgaaccgaattttattatgacaatatttgttgggattttattggtttttatcggtttctcaatggtttatgtgaaatcagaagatatcgctcgtgagagtatagagagcatataatagacttatacatatcaattattgatattattttgaagctttgtccattatttaaaggactgaatatatgagtaaattgccaaccatatgaacaaccaatgttatcaattattcacatagatccaactaaaagtcgagcacttctacttttgttatttttttactcccccaaacgttgtctcatgaactattttatgcttccctagtacctcacaattcatgttcgtgccttatttttacagatacttgcgagttgcgacatatttagtagagattcagctccagctctcatgcagtttgagcacaactaaacaattttacctccatccaagataagagtagagctggagaaagtgctatcacaaaataaactagagagacagagctgaatttaaattactccacaattctactctagacctagtccttagagctaaatttacgagtccaaatttagcccttagatatctcagactgctccaaatttacccagtccaagaaatcattagatatctcggactgctcctgccacgtccaaattattcaagagaggtttcacgttgtttgtgtggtacatagaggtactagagatactacaacatggaccattgatcaagaagaggagagcaagatacaaaattaaaattatttgattccaatgaaattgttaccttagcatataatgtctttttttctttagtgtgctatacctctatgtatctaacctgtggtcaattatctccagtaaggtcttaaaacttctttatct

SEQ ID NO: 28412 - DNA, 12558 bp, Oryza sativa
  unsure (1)..(12558): unsure at all n locations
tgtgctatacctctatgtatctaacctgtggtcaattatctccagtaaggtcttaaaacttctttatctccttcccctcgtctgtatgttgccttgatctaaagtttaagggtgtgtttagtttttagccatactttaccatcacttgacaataaatattgccagcgtagaggatgagatctcttatgcttattttacatagtgagttatttattatctacgggattcacgaatcctgtagacacaagggcctgcattggtcatgcttgatttttcccccttatctacacagtttagtagtactacttgtttatggaactagataaatatccagccgcgttgttgtagaaaattaagttgcataatatgtataaataagatgtaatttgattattaaaactaaaataatttgatacaattttgagactaaaaataattgagattagatgtttttaagagagaacaaagaagagacaatttggaccatacatctatcatccaaaagttagaaataattagggtgatgtgccttaatgagagaagagagaaataacattataaatatttggtaaggatgaactgtataagtatatagaattcaagattcactcaatcaattcttgttaatggaatctgcgaagcagatccataatatccataagaatctcctagatctgatcattgttcccttggtgaatcccttatcattctggagtctatgctcttccggcaacatggattgcagaggtgctcgtgttcttgaagacctgaggagaccaacataacagatgaatgctggtgctaacgaaaaaaaaagattgagaaatgggacttcaggttccctggggacaaaatgtaaatttgaaaagtaacgcataaagaaaacataccggagcctccttacagatatactgtgtaaaacgcagacactcacccctatgaacacacttacagatataatgtgtaaaacgcacactcacccctatgaacacacttacagatatactgtgtaaaacgcagacactcacaacgcatgcgcactcacccctatgaacacacgcacgcaaaccctatctctatgagcatcttcgaagaatgggacagcaaatcgtgaagagattgacgaagaaccctacctctagagcattttcgaagactgggccggcaaatccaacaccattaaatcctagaaaattcgctcacatagagagttgaacccaggacctaaggtgctactgagactcttataaccactagattacaggccctttcactacatatatcaatacttaattgcatttttctttatatatttaaattatgaagctttcgatttttaccttttatgatctacgagctgactattcaatcttgctatctccactattgatgccacttgtcactttgccacctaccaccacaaatgatcttcctcttaaaataactccaagaggatcatagtgagcctcaatattgttttaagaaaaatcggataaaaacatatactactcgattctccaatcaagttttttttaagaaaaaatcaaactgaattttatttttttatagaatttattcggcttttatagggttttatcggtttattaactgattccgcatgatctgatgataccgctcgaaaatgtgaagccccgcacaccagtaccacacacggccgtggtccgccgcagggggcagctctcatctcagcctctcaccagtaccaccaccagtcagtccaccaccgtcccaaaccacacgcgcacacgcccacgccaagagagcgatacagccatagcagcttactccctccgttccaaaataagtgcagctataatttttcgtgcccaattttgaccattcgtcttatttaaaaatttgttaaaaaaattaaaaacataagtcacgagtaaagtactagtcatattttatcatcttataacaacaaaaatgttaatttaaaaaaatttcaaataagacggatgatcaaagttagacgcgaaaacttatggctacaattattttgggataaatattactgctccgtgccaagagagagcgagaaaaaaaaagtaaataaaacgaacaggacgcgaagacgaaaacccccctcgcctctcgtctcttttcgtgctcctccgaatccggtgggtcccacctccctcaccacgcgtccccggccgatcacttcgcctcctcctcctccgctctattaaaccctccttcggccaccgcgcctcctcccctctccaccactcgcgcccccatcaccacccactccactccctcctcccccgagcccgagtgcctcaccgccactagctagcagcagcggcggcggcggcggagaagaggaggagatatggcggcggtggcggggacgggggtgttcgcggagatcctggagggggaggtgtacaggtactacgccgacggggagtggcgcgtctcggcctccggcaagtccgtcgccatcgtcaaccccaccacccgcctcacccagtacagggtgcaaggtgggtttcgcttgcatgcttgctgctctgagctgctactactctgctgctactgctggtgggatgattgccttcccggcttatagttgatcggctgggtggatattggatatgattgattgatcgacgatttgacggcgaccatccctttcgatatttacgaagttaattacggctaagttgatcggcgccactaattaactggagtaactgcgtgcgagctcgccttctttaattctgatagctccccttacctaattggttttccctttggattctcaattgctccctgatttggtgaccggtgaatttcccatcttgtcggcgcaagaacatgcctcggattcatcgccggcttcattcttgcggctgtaattcgagtgttgctacgaattgcgaaacgagttgactttgaacctgatatcacaattagctgagaaaatttgggggtccttttgtgtgtccagcatgcacccaggaggaggtgaacaaggtgatggagacggcgaaggtggcgcagaaggcgtgggcgcgcacgccgctgtggaagcgcgcggagctcctgcacaaggcggccgccatcctcaaggagcacaagaccccgattgcagagtgcctcgtcaaggagatcgccaagcctgccaaggacgcgatctctgaagtcagtggcaatttcagtttgtacttggtgaattttagtgccattcttcatctgaagcgaagctaactgacaaagatggcttgttgtgttttttgagttttgacaggtggtgaggtcaggggatttggtgtcgtacacagctgaggagggtgttcggatactgggggaaggcaagctgctggtgtctgatagcttcccgggcaatgaacggaacaagtactgtttgagctccaaggtatgtgttgcattgctagattcagtcgactttcggttaagtttgtttgccatgttgtttctgtctctcattttgactagaaatagcgatgaaaaaaaagaagcttgtagtatttcagtgtttgtgtctggtggctgttgttaattgatcaacgggcctttgttgactggcagattgacaaaaagttgatgccttggaggcacctgtctaaatcaagttttaatatgtgttacctgtatgataaaatgaggttgatataaattatgcagctaattgacacgtataatggaatatggtattatggaatattccttggatgctagtggtactagtagcccatgtcattctggtttctttatcgtcatgaggtgacctctgaaattagcacttctccctgagtctaggatcactgatcgggatgggcatgcagtgggactgcatcttaagggtcaagattatcagttacagtaacattactacagtaaactatggtacagtagagtctgcagtacctggataaatccactcgaagctgacacatactcacactaccgactgcagcaaaaccaaatccctgagtctgtgtctttcccttgctgatctttctcctctatctgtctagtttttggatattgaacataaaagaagtgcttctgatacttgtgctcatttggccaaagttaaacaaaattgggcaggtgtcgacgtgactagccataactttggcaaaattcgctgtaatccagaccgaccacagctcaaacaagcttggaatgaaaccattccgtatttgatactgtcttcaactggaaatctaggattgccggttacttgtgaggcctgtttccactggttttcaaaatctgaactctcaactgaatatattcttgtattttccaatgatttgcagaagcataaaaattaaaatataggttgtgattctgtgaacctttgattctttgtgattggtatacagtagttatccccactttagtttgttcattgctattttagttgagttatagtaatagccctgtggtgaacttgaactaatcattgagtttggtgtgtaagtgtaactggtactttctaaatgaacttccgtggcccattttatcgttgatgtcgtgaaattagatacttctcatagaaacaaagtattagatgacaggaaaacattcagctatggttgttgctcctgggtccttttcagagattgttagcattgtagtgtgattagatctttggccatctgactctgtgcattaaattaaacatagtttcaaagtcattattccttagtactaattatcaatacctggatggttttgagatgtgaatatgctgctatatttcttcaataggattttcagtgatatggtttgttcaagaaactaatttccaacgattgtgattttctgatcatctttttttttaatctttagaagataacggattgttgaaactgagtatcatgtactctattgcatgctctagaatgtatgttcaagaaaaattttcatgagtcctaagatgaatattatggttgatacatttgactatcaatgctccagtgaatttacttaatatcctgaaattgatgatccatcattttgtttccttcggtatctaattcagtgtcctattcatgcaggtacctcttggagtagttttggcaatcccaccatttaactatcctgtcaacctagcagtctccaagattggcccagcactaattgctggcaatgctcttgttctgaagcctccaactcaggtatatattcttttatgtaaaaagacttgcctatgtttgaagtaaaacatacttaaatggtgtactactgttcaaccagggagcggtggctgcactacatatggtgcactgcttccaccttgctggtttccccaaaggcttgatcaattgtgtcaccgggaaaggttctgaaattggtgattttcttacgatgcatcctggagtcaactgcataaggtaataatcatccgctcctatttctggcatatgcagattcaataagacacagactaaacagtaaacacttatgccatgtagttttacgggaggtgatactggtatagccatttcaaagaaggctggaatggtcccgcttcagatggaacttggaggaaaagatgcttgtgttgtgttagaggatgcagatctggatttagtggcagcaaatatagtaaaaggaggcttctcttacaggtactaaacaatgaatttgattgatcgatctatgggttagaacaacgtttatcgtgttgtttcatttgatctattagatatttggacatgtcaaaatatggataccacaattccttaaaaaagtgaaatcagccacgggaaatcataaaaactttcagataagttttagctaacagaacatgacgtgtggcatccaagtagtgtcatcatgcatatcagataatgttgccatatgcttttccttgcttccatccttgtaccatactatattatttaaatagttctatacacccatatttcatctttatgtgccattttcttttgcttttctattattttccatgcttggccctagtaactatgcgaggacagaagtcttaactgaatttgcatcaaatcatactctggatttctactgacatttcttatgatcaacgtagtggccagaggtgcactgctgtgaaagtggtgctgatcatggaatccgttgctgatatcgtggtagagaaggtgaaggccaagttggcaaaactgacagttgggccacctgaggctgactctgatatcaccccagttgtaacagaatcctcagcaaattttattgagggtttggtcatggatgccaaggagaaaggagcaaccttttgtcaggagtacaggagagaaggcaaccttatctggccgttgctactggatcacgtccggcctgacatgaggattgcttgggaggagccatttggccctgtcttgcctgtgattaggatcaactcggtcgaggaaggcatccaccattgcaatgccagcaattttgggctgcaggtgcacactcacatacatgatagaaatggacattgatgtttgttacaacatgaatatcattgtgcatctgattcatctatgcattcttccatttcagggatgtgtattcactaaagatatcaacaaagcgatcatgatcagcgatgcgatggagaccggaaccgttcagatcaactctgcaccggctcgaggacctgaccatttccccttccaggtattgttaccatgccattgactcggcttgccatcattttgttcaatttaccttttgctttcttcagttgtttgtaatttctatggggtttggactacagggcttgaaggacagtgggattggatcccaggggataactaacagcataaacatgatgaccaaggtgaagagcactgtcataaacctaccatctccatcctacaccatgggctgaggtgttccatatagatgatcagatttctataaccacatgagtacaatgtagagaattcaaatgttttgtaaccacgtgagctttgtacgctatttgcaccacagttctccctgtatgttgttggctcttttacaattaagaataatgcatgttgaagtatgagtcttcctgtttgcttctccttgatgatgaaacgctgctgcatcaactgattatttttcagagaataaacgataaacaaagcacggtgaagtatcgtgtaacccaccataagtggtagagccgtagaggtaggactgtgcatgctgaattgtaattaccatggttagttcagcagaatttgcaaaaagaggacaacagaattagaccatcgtcatgaattaatcaaggtacaaaccaatggttgctggtacatcagtagcaaatggctgtagcactagcgtgcccatatttatattccaagcctccaaggtatacaatacatatttgatgtaccgaacaactgaaaaaggcgcttggtttggaagcgcactatttttaaatttataggataacttctgacagcctttcttctaaatgaacttttggcaaccgctctgaagccgtgtaacacaatccaacaaagcaatttgcagtcaaaatttcgggcatgtgccgttctagttagaatttaggatgtgactcactaagtaattgtgattgtttctctatgcaaacaccagccaacagtattgatttcatcatgcataatctggcatgaccttcttgaggaatttaattggttgggattcctcaggcgcaacctcatcaaagggaacatagtatctatccttgtcgtaaacatggcatttagtcagtattgtcttcatcaagcgccagttccagctggcttcattgatgtactgcaagtagaaggtatcaagggaagagaaatgaaataactatacaaaaaaaaaaaccagtgaaatgcaccccaaaaaaatgggagaaatattgaagtaccttgccccagttctgttttatggaatcataggcagcacgaaggttataacttggaattcttggagaaatatggtgtggaacatgtacatttatgtcatgacaaagtatctctatcctgtaaaaatccattagtcagatacaatccaactctacagaagcatgtttccaagataattttgacaaaaccaagacagtgattcagcttgctccagttgtacaaatgttgacacttatacccgtatgaacacttcatgacaaaatattcacatcatatcccatatttaccacatgcactttactgaaatatatttatcctatgctagtgctaaatgggagtagaactagactcaattgagctattaaattaaaaaaaacatggtttatatgcacctgtggcacattctacaagatatgaaacttatgtgcaatccaggaaaacagtacaaccacatgatggaaaagtttcttaatcctcaaagatacaaataaacaataaatgaattgtcgctgtcattttattggcaaaatcaatgatttgtcatgtgatattaactagcccaattttttactgggattatagtccagtgaaagttttatttgctataattctacatagtatataattttgtttttcatgcagtttcaatacaaaagtgttctaatatccaatcaatctataccattataattaggaccccacccaaatcagggtgtagatctctcttttctgagattttatgtagtactttttagtccatgagagctttcctgtgctaatatccaatcaatctgcactattaaaacaactgaaaagtaatagcatctatcttttgattaataacctattttattgatataaccgataggtcccatgtgtgacaaaaattaatatggaaactagcttgtttaaagatggttaacattacttagcaacttgatagaaaatattataatatgtaagaaaagaaagatgtaaaagaaaacaaaatgcgtaccaccgaggatagtcacagtgaactgtgccgtttaattgtgcctgtgcagcattccactcttctgatgtcttgaatggtatatgaggagcagtgtgatgtaccatcgtaaaggtgctcatctgaagagaacagcttacaggataaataaaaatatttgcattatacaagttaatcaacaatgcaaagcgaacaactttgaacaaaattattatatgtttaggtaagtgctcccttgctctgtcaaattggcagaacaagtatatcaaattgtggctagtttaaacagtgatttaaagcgagtttattccatgttagtactgacgaatggatgcttctgacccaaaatcatgggttcatgagaaaaaatggtaaaccagcatgtactagtaaattggtggagaatgaaatcatatctgttgctagtttgtgaacagtggaaaggaacataataagatctgaaaatatgtagctcgactgcttacgtactgctacaaaaaaaaaatacaatgatacactattctccgaaatgttaccttgtaatgtaaccaaatactgtaataaaaactaaaactgagtcagatccattgccaggagttgataatgcacacagagtagtgatctgaagcaatccaaatatcttcgggaatacaaaagcttaaaatatataaactcttgaactaagaaaaaaaatggtaacagggcaacacagaagtggcatataagtgtcacaaaaggtcagtagcctgtcatctggttggctccatgggtcagagctatattatattcaaggactaattatccaattaacatgagtttctactttctacttgcaatatatagcaccaatatgctctaatagctaaacatttccatgaatttggaccatataaagcttagcagtaaatgatgttgacagaataagaaatattacccaaaagtgataaaccatccatggcatgaaccagaacttgaaccatccagctattcctgatttgagaataatcagtggccatccaattgccatgaacgctagcacagatgctaagcttattttcacccttgggagctcatttggtctgaatttttttagatcaaagtgccaaattaacctgacaagcaatcgtagtgaacagcaatgatattgcttggagaagttgaaggaaaataattcctaaagaagatgtccatgttatatgaaaaggtgttcgaaaaagaaataccagtgagcaatagacatccatggcctgataggaccataagcaaatatcattgctttcctcagtaaggaatttgttctgaactcctttgaaaaaacgggttgccatgcagtatcttctatcaacctggaggttatgcaggaggtaaagatttgaatgaccaaagttcaacctggttggaactgtttttaagtcttttcatattatcaaatggcttttaatacatatgaacacagacttacagataactcaaaaaaatgttgatcatgttgttatgtttgttttatttgtacaattgtttcaacacttgacatgtgaactataattaaaaaagcggcaagtaaaaaactgttttggtatgccatatcccatatgtatttaagcatgatgaagtgcatgagtgttcttacaatgtaatgcatgaccgcactggaaagagcgttgtctgagatttggagaatattggagatgataatatagggtggtatgtacatacatgtttgtcttggcatgatgtctgtcatgcttaaatctccaaggttcataggggtatatcaatggcaagaaagctagagttccaacaatatcttccaccagcttattcctcgaaaatgatttgtgggcacaatcatgacctatgacaaagaactttacaaaggcatcaattaaatagtggacaatagacaaaacagcaagcaagcatgtagcacatgaaaggaacacaaacttatataagcttacaaagggaggggagggttcttacccccgtaactgctgtaccagtccatgcccaggctaagggaagaagatnnnnnnnnnnnnnnnnnnnnaagaaaataccaagagcataagaagtaactgatattaaaacagaagtccaagattttagatcatcgatttcaaatacctagcagacaagaaattttacattagaggaatttgtgtataggaagccacagcagcatagctggtgttggtagctcatatacctctttaggcagactatccattacatctttaagagtaacattatctggcaactgttctccaatttgtttgaatccataatcttcacacatttgcttccgtttttcttcatcatctaacaaaggtggagtaacaggcagaactgctgcttgcaaccttccgctttgtttcaatggtaaaaattgatgacaactctgtcctttatatacagaatctctcttcaaaaaaaatgtacctggtgaaacatgataatgtaacatctaaagtgctgaacggtattgccaaataagcacgacagtaatttaatcaatagttttcattgcgatatacaccaatgaacacactaataagtaatcgtttccattattcttctaaaatacaacttaatataacatctttaacattccatgcttccatgatatatatcatccagtcccggcagagaacacctaactggaccgcacattgtggcatgccgtttcaggagctaccaggtcatggaatttctagctgtcaccccaagattaccatttacaaccaagagcccatatgtaagactgaattaactagtcggctactctgctccagtccgcacctctcgaaatatttatgcttagaacgaacaacacatcccaaatcccaaaagcaccagggaacaccagcacaaaactgctaccgaaacagggccatacctgccggggcaccaccggctgctctccgcgggaacgcgttcttgcccggggcctgcgcatcaacagccacagataaaacgacctctcctcacacaggcattcgaacgaacaggtggtgggcattgcaagtaggaggagcgtaccgggctgccggggcgggagcagcagccgcccacccgccgcgtggaggggagctgcaggggagtggagacgccgctcgccgtcgccatcgccctctctggtagcagcggggcccggcgggctaggccgggagggcgcgcggtggcgagggagcgtggagacgacgacgacgccgggcggcggcgggcggcggtttggatggatgcgttggtgccttggtggtgtgggtggctgtaaatcccgcttgcgcgcgccgcagctcgcagcggtggggtcggccgggacaggtcgggtgtgacccaggacggctgcttgtggtggctggtgcggccgcgacggcgcgaccgcggccctgtataaagccagcctataccgaccgaggcggcgaatgaatctctctgaacctatataaagtagaggcttctgttttcgtttataagtttactgaagataaaaaaagattaagtacaagcatacagaacaaaaaaatctttagcgtgtgattaattatgttttaattattttattaaacttaaaaatcgatttatttgatattttaaaataacttttgcctaaaaggttttcgcacgaaatgtattgtttaaccgtttaaatagcgtgataatgcaaactaagat

SEQ ID NO: 28413 - DNA, 9910 bp, Oryza sativa
cccatgaagactctaggtccatttgaagtcagtactgtctccggaggccgagctggacttggacttggaattatcattggaacgtgtgaagttatgagcgtatccgacgaagtgatgtcctcatcatcctccccttcttgaattggagtcgtcctcgactcaatcccatctttttgattgtgtgcactctctcgtctagtggccatccttggaggtatctcatcttgaaaaacattctcatattcctgagtaacagtgggtggcaaagaatataaagtactaggagcagtagcgaatgtgagtataggatctttgcaaaatagagcatagcaacaagaatctggctcatctagtgcacaaatattatatttagaagccaacgaagcacccttcaacttaatttcattctttgtggtacttggttctattttactagttgaagcaagatgtttagcaataatctgattatcacttttcactttcttttcacattcaagtcttgcaagatcatctttcaaagcagcggctggagtcatagaatgcaaaacaactcttttaccatcgaacataaatttatatgtattagtcctaccatcaaaaacaacttctctatcatattgccatagtcgccccaaaataacagaacaagcttgcatatgcacaacatcacattcaatttgatcatggtaggagcctatagaaaaaggtattttaaccaagcgggttaccttcatcttaccacatgtattaaaccactgaatataatacggatgtggatgtggataggtagtcaagccaagattcttgaccatctctttacttgctaaattgttgcaactcccgctatcaataatcattttgatggtatggcctttcacaagaactttgctttggaacaaattgtggcgttggttttgctcttcacacttctctttagcactaagtgctagcttgacaattaggctaggatactgatctagcgactctggatgcaaatggacttcctcgatgtcatcgttatcttgtcctcctgcatggtcagtggcagctaaagcatattcatcatcacaatcactagcagaagtatactcaccatcatcattcacaaatagagctcgctgatttggacagttgcgggcaatgtgtccaatgccatggcacctatgacatgtaatatcacgggtacgtccagtggaagctaccgaagttgcactcttggttggagtctgaactgaagcgtttttgcttggttcttgagcatgggatggcgtggaggtaggtggcgtggaggtaggtggacgaacggcagtagtagattgacgtggtgttgactgtcgtgtgaaagtagcacctgcaaaagaactcctatgcttgttgcgtctctgcacttctctttcagctttgcaagcaaaatggaataatctattcatggtattgtattctttatattcaagaatatcccgaatctctctattaagacctccatagaacctagaaattctagcatcctcagtttcttgcaaatcacatcgtgacaaagcaatcatcatctcttgatagtatgtttctacagaattggaaccttgtcttaaaagatgcagtttatttaacatgtcacgagcatagtaagaaggaacaaatctagacctcattgtacgttttatatcatcccatgttctaggtctaagtcctctaccacatatatcattccaccatagagatgtaaaggaggtaaattcactactggcagctttaactttcttattatcaggaaaatcatagcaagagaatttttgctcaacagctagctcccagtctagataaacagaaggctcaaacttaccatcaaaagaaggcttagtaaattttaccttagataaaggatcatctttatccctaactcgacgtcgtcttctatttccaacactctcgtcttcctcctcatcgtcagcaacagattgctcttcgtcttcatcgtcatatctttggtgtcgatgagcagtggcacctgcaccttcttcacctgcagcctcaagtaaaccaatgtgtcgcacaatattttcatgtccaatattcatattctgaatattttcagttaattgtttatgtgattgattcatttgctcaatttgatccactactttcaccaggctttcacttaaggtttttaaatgtttatctgtgctttcattgtatgatttactattacgcatcaactcttcataccaattttccatgcccttcagtttatgcgctagattctccagtgttggttcgtcggaacttgtacctgacatcgttagcaagcaaaagaaactcacaagaaagtgtcagttcctaacaatatatagatatgtggagcttttgaaggcactcaacactaaagcatataccaaattcttataatattctcaaagaatgcaaaacaggtcaatcaccatggctgtttcgtggcacaatgacacgcttgatgagtggagcgattgcaaaaccggacctgtaaaggttagtagtatgtggatcttggtaggctttactatatcacaaggaatagcaaaaatcaaacagaaatacgaaaattgaataatagtccaaagtactagtcaaaattactggtctagcctagactcaatcctagcttaaccaagcaaatgatcatactcggacaaaacacaactagctataacaagcaactctctctccaagattccaacaaaaaaaatatcacactttctttttctgattttttttcttctcttttatttttttaattttttcccttttctgatttttttggtgcggctcttttttttcttctttttttttgcacctctgatacctttttctttttttccttttttttttctttaacaagtggcaagtgcgtgcgcgcatgcacaaatacaagcagctgctagctattactgtaagaggagttcacgtgcatgtatggaacttgcatgcatggctaaacaaaaggaaacacaccaaggtaattagggagattaactaccgaaacaaagaaactgaaatgcaagaaaaccggacttgcatttgcatgcacgagataacacgggacccactcagtttctgtgttgcgcacaacaggaggaaaacaatacagatattccccaactaaatggaaaccgactcaaaatttagaggaaacagatctctataattccttgcgcaagcaacaaaccaaatcatgaatggatcgatctgctatttttttttccttcaacctagcacaaccgagatgcaaactcaaaccaggatgaaactaggactaaagccagcactccgactcgacagtggacagaaactcaataaagcaaaactgaatgaaattgcgtggctcaaaactaatgtttggtgatggaaaaaaaatggtgtggctatatggtagacaatgggtaaatgaaataaaattgcaaactaaaatcctcaccaggcaaccgatgctctgataccaactgatgacgctctctctcgtggcccaatcttctggtgaggggataactctcgctttaatcgagtgtgacgtttgcgacgtttgcgacgtggctaccaaccagaacaagtccaggacgtcgtgcaatcgctacaccacaaacgatgtcgtaccaaccgtgacgcgcggttgatgatccctgcaatgcaaacgagagaacactgcaagaacaagataagatgcaatctaaatattgcgaataggtgatgaagcacaaagaaatagttgcgattgaagtggtagatctaatcgacacggaaaatcaacacaccaactattgggggctctgaatctacagtcgtcgactaatcgagcgaggactagagacaaggtgaatggcacttggcaaaattcaactaaacaaaacccaattatttttgaggatgtacaaagctatttgtagaggaaaataaagctagggttaagtgctaattcgtggaggtggagggagacacttccgagatggggctagtctattacaaggtccaaggcccaagttcggttttagcaacagtactgtcttattttggcgattcccgttgactcgagatgaatttggacatgagagtggatgcgtttgaaaggtagcgagataagctttccacgaagtccaagatcacccaaatcagagttggcatgaagacgctaggtccatttgaagtcagtattgtctccggaggccgaactggacttggacttggaattatcattggaacgtgtgtgaagttatgagcgtatccgacgaaatgatgtcctcatcaaggaggatgatggcgtggcccgtggcggcagaggggcgacgaaggatggagaacgactattagagtggagctcaacgacacaagtcctgcgatgagcggccacttgcgacatggaaaacaacggtcgagcgtgcccgtattaacccggcgcgactgccactctgattgggatcgatggatgtggttgcgttccggtgtgatttggtagcaagtgagggcggagcaagctctgcctctatgtggcagggctagggtcttccggcgacgaggcggctcagggtgagcagcccgcaggcggccgatggggagaagaggttgttgtcgagcttgcttgggtgggcatccacgggcggcattatggttgggggcacggctaggcgaggggaagaggagcccgagcgtccgcgagcaacattatggttgggggcgcggctaggcgaggggaagagggcatcatggttgggagagagccgactttaaggggctgggatgacgatggaccggaggacccgcgtgggtgctaggagtggcagagagccgactttcccacggtccgagagcagtttgtggcatggtttggtctagtagtcacaagacagcgaggcatgcggcagcagtcgtcctccctcaacgttctgcttctctccatcggctgcctcctccgtcgccgccgtgggccacgccaccatccttcgccgtgtggtcatgtggatgagggggatgagagcactggagaaggggatgggagagagaagtggaggcctggaggagatgagggggaggaagtaggcccactgacatgtgggtcccactatttttaattttattatttgactaaaaatgctcgtgtgttgcaacgggaaaaacatgagaaatttaagaaaaggttaagaaatatttatattatgtaattaattaaaatataaaatcacaactatacatgtatactatgttgaagaaaaaaaaaagttcataagaatcaaggtaaatgtggaaaataaaattttccaaataaactatagctggatttaatttttattaaactctccatgattactccctccaggttgataatacttatcgttttagacaagggcacggtctccaaaaaacaactttgactattattttctattataatatgtataaaagtgttaacaaatatatgattttactaaaatactttttaagactaatctatacatgtagtcaccatatttgaaagacatatattttaaaaatgattcataatcaaatattctaaagtttgacctcaacattgtctaaaatgacaagtattatcagccccgagggagtaattacactatgtgaaatttctttcagtattttcagagcaccattgctatttttaataatacaaacgtcattttagcatttatttaaatgtaaaccctcctttctccctaggccattttgagcccattctttttttagcccgtagccgagccggcccagtaacctgacttctcctcccttccacctcggcctacaagcgcgcatccagcccatcaagcaaccacaaagtctaatcagcgtcccttctcctcctctcattgtcacatgggttccagtactacaaggtcgttccctacctccgtccgattccgcagcttcccaacaccgccggaaaccgtcccctccgtgaaatccgtccgcatctacggatataatccaaaattgattgaggggttttgattcttattttcttctctttctgtttttccaagatatagagcaaaatcgcatcgtatcgaccttgaaattaagccatatagcaaaccctagagttgtccgtttcgcgtacagggagggaatcggactgtgcctagagacgatgtacgaagaaagttggtaaaaacatcttaaacttttataataggtaaagataaagattgatatgtgcgcccattttattttatttattaaattattaaattttgcttcatgtgctacgtcaaatgccacgtctgatgaagatcgagtcaaattagccacatagatgtcatgtcagctaaaaaggccatctaaaccatcatgggccctatattgcaccggttttgacagttgaggggcgagttgtatatggttttgtggttgaaggacaaaatcgaattcattcacgagttaagggacctcagatgaacttatcccgcctgacaatttacatgaggcagtccaatgattcaaaccaggccagccagcccaactagacggctctaaatcagacggcccgttacatagagcccatttgccaaggtccacccaaggcggtcgcacggcccgatcgaaattcacccaagtccagacacagccgacccgagtgcgcaacgggccaagagcgtctggcttgattggtctcacggcctcacgggcgatccacggctccacgctgaaccgccgatgacggtgcacgcaacgtggtaggctgcggtcgctgcgattctgggaaatcgacgagacaaggacggcgagaaggagctaaaagacccgccgcacgactgcacaccgagtgtccgagtgcgacgtcgtcgatcggcgccgcgcgcggtggcgcaaaaatacacgatcgacgcgtggccagcctcgcctcaccttccggagaccccgacgcgacggcgacccgacccggccccgcgcgtcgtcgcgttttggaggctaactaacccctccatccacaaccagcccgcgcgccgatcgttcgcgcgcgtgcgcgcggtggcgacagcgatcgccgtgacacttgtcgccggcgcgatggcagcggccggggtcgcgagaaaactgaaccgctggccgcacgcgcgccgttgccagccgcgacaaagcagctgatagatcagatagcgcgtctcatccagagctcgggttggggagggcggcattggccgttggccgttgggccgttgctcgatcgattagggatgcggtgcgccgtgtaggggcgtgtaccaccacacgtacggccgcatggcaaccaaattctcgtcgatgatatctctcgatctctcgttctctcattttcacggctccattatttctgtagctggagggtagcgatggccgggcgggcggcgaaagggtgtgtttagttcacgctaaaattaaaagtttggttgaaattagaacgatgtgaaggaaaagttggaagtttatatatgtagaaaagttttgatgtgatggaaaagttaaaagtttgaaaaaaagtttggaactaaacacggtaaaagtcattgcattttcaaggcatggaacacgggtaaaacatggttttgtaatatgtacagttcgcggcagccggcaactgcgatctgcaacttctagtactatacattgactgccgctgtagttttactgatgtgagagcgtaccagctcaggatgctcatgcctaggtaggcttgtagccttgcagctcggttcgatatgtgagagcgattgacttgcgaactcttgggacagatgagccgaatcgcattatcctaatcgatcattatcacagagaggaaatgccggttgaattctccggcgacttgttactcgtagctataaaagccaaagctgaaattggtaacgattatttgacgcggctcataagagcaaactcgatcagtgctgcatttcgaattaagttgtgagtttctaaaagaacctcatggtaggccaaaacgatgtcagctcaaggatggaaatgcttggtcgaagagttttacttggacataacacgatgttgttaaagttttattatcattatctaattatatatgagaacatctatagtatttagaagtatattattacttattagtaattatcgtgcgcgaaggtagcgtaactcaactggctaggtttcttgtagtggaaccaaaccacccaggttttaagtcctaaacttggcatgagtgctcgtatttatccatcgacagtgagatactcgtgatccatctacagcgagatactcgtggtgagttcgtcaatctcatgatataccggttcagtttttcggagatgttaatagatagcaagacactacggttaattattttttcggtggtaggtggtgtatccgtcgacaacgatatactcgtggtgacttcttcaatctcatgatataccggttcagtttttaggagacgttaataaatagcgagacactcatggtgacatcgtcaatctcatgatataccggttcagttttctggagacgttaatgggggtagggtgtgcgtgtgcatattcataggactagtgagtgtcagggcgttgcgagcgcatacatttgtattttgtttcttaaacaaacaattataatgcgttataatacgcagcaaaaccgattgtatctaagatagatgtttattggaagttgcaccttcaacaaatcgaaatgacacaatgaatccagggtctccgagcaaacaaacgatgcctccgctcctacttgcaaaccatcatctgtgcgctagcagccagcaggcacctaacagaagccttgccgccttgcgtgcatgtgaatgtctctagcttagttaaggaacaacaaacaaaacatcatgtacatatctctttatcagcgtgacctgctgccgccttgaggtgagctagctaggatgatgtaggaagagcggtttgatgaggacgaaatgagatgccaacatctccaccaaaaaggatgaaccgaaaacgttaggataaatgatcaatttttctctgccaaatttgccaagcaatcaatcaccttaaaaatgtacagagagaaaatcattattacaattcaaatcagggtattctaaaatcgatctcaatagttaatagtatgaacaacggtagctagaagataatttttcctcatataaccaaattaaaaaaaaatcttctcctttaaaattctgatacgcggtgaaaaatgaaacagattccgcacctagacgcaaaggccaaaacaatgggctaaccgcttggagagatacgagtatacgacgcgttgcgatcatcctgcccaaccgttgcataagcccggaccacggttttccccgtatgcccccacctcgtggcgctaagatccaaatcgggccgtccatccatctcgcgtcacacggtccaccaccaccccgcccttcaatcatagagcccgtcgcgcgtcgcgacaccgccgcccccgccgtccgatccgcatccgacggcccagagacggggagaaaccgtcctaccctcctagggcgccgcagcccagggcccctacgagtctagcccccctacgccaccgcgcacctccctcctccgatataacccgcgcggcgcagcgggagggcaacggcaaatcacgagccacacgcgcatcgcaagaccaacgctgagttatcgcatctcggcatccgcatccgcgcgacgacgacgacgaggaggacgacgccgacgccggaggccgtccggggcaaggggaatgcggagcgatgaggcgggcacgaggcactgacgccggcgtccagcgcaagctgcgcggcggccgcacctgccaccggaagcacgtcgaggacgggtagatccatctcttggtagtagattagtagtagttaggtagattcttgaggaggaggaggaggatgatgcgccgcggc

SEQ ID NO: 28414 - DNA, 17773 bp, Oryza sativa
cgacttctgccactcccgcggcgtctaccaccgcgacctcaagccggagaacctgctgttcgacgaggccgggaacctcaaggtggtcgactggggccttagcgcgctcgccgaccacgcccgcgccgacggccttctccacacgctctgcggcacgccggggtacgccgcgcccgaggtgctccgcgacaagggctacgacggcgccaaggccgacctctggtcctgcggcgtcatcctctacgtgctcctcgccgggtccctcccgttccccgacgacaacatcgtcaccctgtaccggaaggcccagcgcggcgactaccggtgcccggcgtggctgtccaccgacgcgcgccgcctcatccccaggctgctcgaccccaacccgaccacccgcatcagcgtcgcgcagctcgtcgagacgccgtggttcaagaagacgtccatctccaggcctgtgagcatagagcttcctccggcctttgccgatcctgctccggctaaggaggaggccgagaaggacgagccggagacgctgaacgcgttccacctgatatcactctcggaggggttcgacctctcgccgctgttcgagggggactcggccaaggggaggcgggacggtggcatgctgttcgcgacgcgggagccagcgagcggcgtgatctcccgcctcgagggggtggcggcgcgcggcggcggccggatgcgggtgaccaagagcggcgcccgcggcgtgcgcctggagggcgcggagcgcggcggggccaagggccgcctcgccgtggccgccgacatcttcagcgtggcgccctccgtcctcgtcgtcgacgtcaagaaggacggcggcgacacgctcgagtaccgctcattctgcagcgaggagctccggccggcgctccaggacatcgtctggggcgccgccgccgacccaacgccgaccgccgccgtctgatgccaccattgttagcgtccaaagtcattgtgtcacagtagccgatgctgttcttcctcctcctgtgcttgattcgatagcgacgtgcatgaactagtatcgctgtttgggtggtgggggcagttggcaagaacaaatctgtatctctgcctcaaaagcaacagcatttttttttcttttgcacaagttgcaattgtttttgtgatggtctttgcttacatctgaatattccgtgtcttctctgggacaatctctgctgcatgattgatggtctttgctgtttatatgtattcagacgccgtgcaatactgtatgattggaatggttcacagtttcagtgttcagtccaaagttgtttcgctttgacatagatttctttaccaaaaaaatcggcctggccattgattaaaaggatttccctacaactcttgaatgatagatataagaaggtaatttaaacagtaaatgtgttgtgaaagagaacgtagtctagtggttgcaacgagggtaaaaagacatcaaatttacagtaaatagttcgtagaatggatcggtaaaaaaaaaaggtagttcgtatactctagggctcatcttttcgtttatgtttatgcttgtaagttaaaatttaaatttttaaccataaatttagagctggttttgaggttttttctctcttcaattgcagttcgatttgctcgtcttatcgttcactacttaacttatggattttgatgtctgtcggcgatgacaaaatgtgaaagcgaaactgtaaagcttcaaagaagctaatttgcttccaatttcgatctccgaacactcgtgcgctgctctcaaacagcagcctagttagagcgcctaactatgattttattcccatggcaaacttctaaacgaaggacagaagtttcgcttcgcttccttgatagagagagaaataatacactaatgcgtcacctggcgagaagaaaatacgcatcaaaagcttctgcgacaatcatcagctcggtggatttttccgacattagtaaaaaaaagctatgtgcggttgaacaaccagcctgctttaaagtatctgcgaaaatctttattttcccttgcagtggtgtaattgcacgtaaaagtcaaattttcgcattaggtgtttacgtcgtccgcacacaaaaaaaatcaaaaccctagcgcctccatagtggaggaggtgtggatccggccatcacgggtcagtggcggtggatccgatcatcgcagggccgatggaggcagatacgcccaccgctcgttgctcccgctaccgagctctcgaggaagccgagctggctaccaccagcccgttagccgttcccgctcgatcgccgctgccgccggctagtaagtaggaagtgagaaataatgaggagaggagaggaggtgagagagagatagaaagaaaataaaaatgatacttgaaaaattttaaagtgttgaaagggaacgttcttctgtctacatctctctttattatgctaatgtttaacgaagtggttgttttgaacttgttcagagcaaagctcaagctcctcttgttactcgttccatcagtcggcaactcgggatgcttttgtgcattataaccgttcaacattttgcacgtgggacaatcagtcaatcaggccagctcccttcctgtgttcttccaagccgatgtctctaggacctgtccccgaacatcatctttctcttttacgtttttgacataaattttttattaataaatgacataaaaagtttatctttttttcttctgtttgagatgaatcatctttctgttggggcttgctaattaagttcctcttagatactgccctgttcattctgcagactgcagctcctcatctgagttggggatttgagagtaggggacgttgaggggcatgttcaacggctaacctggcctgttcttgatgatggataaaactgagtataaaacaattatttgagggcacaaaagaataaattaaataatagaagaattttaagaaatgttaatgaataaaggtattgaaaaaatcgtatcatttaggagcttgaaaaccatactcgcgctgatccataatccgtaagcctatgaacctgctatcagacagtttgcaggtaaaattttatagagaatgattaaacagcagatgaataaagatatataggcaatacacacactattgctggattgagcgtgcatacggcatgttcacgagacattctttgtcagggtatctccaaacctgattcatctgctgggctatcctgtccactagtgtgctgtgctcactgataacccttcacttcctgatctatttttctgccacaaaaaataagataagctccaggatgcatctagctaaacttatcactgcatgattttaattgttaccccatccagattaattttagcagtattttgttcgtcttgttctaattattagcttgagtctatcgaaacaatcatgtttactaccttaacctgcaggaagagacaggtaaaaacaacgagtgatttcttaagaaaaaggataattgaataccacagatacacgcagataaagagtgatttagcctacttgtttgtggacagttacgaaatttttcgttaaagagaacttttcatcaagcagacctcttggttgttttttctgggggccttttacagtacattttattactgggtgtagtagtgtagtagaaactaaatcagacccttcatttgtttgggtattttagggcttttaaaaatgcttattagggtatttttgactttcaactctaatttcaattatagaagggtattgctcgtaatcttggcgctgcaattattctaatcgacggatcctggcaaggtcgccgcgccgcccgctgcttcatcccccggttatataacttctcaccggggtgtggcgtcttaaccttctcactggtgtcttgaacaggaataatgctcgatcaatttatttttaggaatcctccatcaatttagacggcacatgtgtatatgcatgtactaatttgaagaaagagcagcgatgcattccaaccatgtttgcattcatgcaattagggatcggcgaaccgtccttctctccggattagaagcaacaaaatcaacagaacaaaaacaaaaatccgcatgaacacttgcacgttcatcactaggacaggcccacctacagtctgagaaaaccaagagatggcgtaaaaaatagagtagattagaaaaaaaaacttaaccggtaattaacacatgcgaaattacttctttaccatgcaaaattttccaaatctacccttggggaaataatactatccataatactcagtgtagtagtggcggatatgatccgttggatgcaacgaatggatgatccatgtttacccgagggtacagtaaaaaaatcctttttctgggcggactatgttgcaagatggccagttgcagtgagtgcctgaaaatgcatgatttttctttggttgcataggcttgaacaaataaacatgatgtttctctcattctgtgaatgaaaatatttaacctgtattatttgaattgatctctagtgcatgatagggacggatagactcaggtcagaatgaaatgacatacagtgcatataagagaaaggtctagtaggcttaactctgcccatgtgtccagctagctcattgcgacaagaaatcttaggctgtgttagagaaaggggagatagataagattgggaagatacgcaaaacgaggtgagctattagtgcatgattaatcgagtattaattatttcaaatttcaaaaatagactgatatgattttttaaaacaactttcttatagaattttttttgcaaaaaacacaccgtttaatagtttgggaagcgtgcatgcggaaaacgatgtgcaatctatctccaatctcctagaacgaacgctgccttattatctcttaccggtgacagtgtatctccatgcaaaacagaacaaatggagaaccttttcccagacaaaatgagatgcaccatccacaataatgtcatttttaaaagcatataatacataggctcactgtcccctaaaagacaaccctgattcatgcactgaacacagagcctgaatgtataatcataggtgcatttcatgttctattcagaaaatattttcttttgagaggaaagatgatattgtttagaaaaggactatcattggtgtccccttctaataggctcacacattgaatcttggttaactttttctaatcaaatacccattcccattgatgagaaactgttcaattattgtcctttgggtccatgcatgtgtcatcatctccacggtgctttcacctaccatggggatgtgacattggtcacgctctgacaagtaatgacttcgctgagtgttccagaactgcataactctgcttgattatgcggctaatatggcacgataatttcggtttaggatatggaattttgtattcggaataatcgaagtcgtggaggacgacactgacgcatccatccattggcagatagtaggaattaagatgcagccacatgataatgtggatgatggatgaatggtagcctagcctactgttgctagccagttttgggccatggcaggtgtaaagaggtcaggggtacaggacattcagattgatagtagacagataatccatatctacatcagcattatatgagcgcaataattggggaattctatctgtttttccgtggatcatgaatctctttcaattttttttaacaaaccggcacaatacaatgccaattttattgtatagcgtaggagtacaagtatttatctgaaaagaaaaaagatagtacaagtgtttttagagaaactagggtaatatttccacgagtcttttgctcctgctcacgcctaagttttcattcctcctttattttagtgacaagtgaagattgttgagagctctatatgatggaagactcgttggtttctttctttccaaatctcccaaaacgttagcaatataagtgaatctctttcgattggataatgaattcactactcatcgtagcagacataaaacgagagatgtgttgtgatgtaataatctcaccatgtttcggggagagtagccgatcctctcaactccctcttctcccgcgccgacaccatcaccgatgagagagaaaccagccttgttttgatcgagcgggagcagaaagcgtggacggcccaaataagatttggggcccaaattatctttacgttgggcgcagattttgggccaaatacggagggcccaagtactgtacggccctggacggacgaccgagattgctgctagctagagttttgctatccaatttccggtcattggaatgaacaatttaaattggctgtttaggtttataattttcgcggttaattcgttttatcacccctggaacatcgtgcgtatcacctagttgttcggcggacgtggttaccaacagaagccctaggaattagtgatcacttcgtcgcgcgcgatgaataattaacggatgaaccaattaaaacagctcgacgagacgacgactgcgagctctagctgtgcatgcatcagcaaacaagatagttatactgaccaaaacaagatttctatctaggattctggcaacgcagttggcgtttagatatagggacttaactttaatctctatatttagacactaatttagagtattagatatatactacttacaaaactaattacataaattaaagctaatttgcgagataattttttaagcctaattaatccataattagagaatgtttactgtagcatcacataggctaatcatgaattaattagactcaatagattcgtctcgcgaattagtccaaaattacggatgggttttattaatagtttacgtttaatatttataattaattaatgtccaaacattcgatgtgacctatctaaacagggtctcagacatgcagtttggcgcgcgctctctctctcttcgtcggtcgctttcgcatctctctgtctgatatggctattcgatgtacataccttcctataaattcactcatagatttagccgcagcatcgatcactgacaaccatcgtctttctctggttgagctagctagctaagctagccaggggagagctagagagatcgccggagatgagccagaagtcgtcgtggccggagctggtgggcgtactggcgacgctggcggcgacgcagatcggcaaggacaggccggacgtcgccgtcgaggtgctcccgccgggcgcgcccctcacgccggatttcaacgacaagcgcgtccgtgtcttcatggacgacaacggcatcgtcttcaaaattcccgtcatcggttagcttaaatgctccaatagctagcctatgggctatggcactagctgatctcccatggctgatgcatgcatatttctcctcgtcttatcacatctgttacatatgcagcgaaataatggaataaatggcgccgtgtacgttcatgtgtttttgctccttcatatgctccatctattccaaaataacttaatctaagatacaaaatgacacattctaaaccaacgaatttgaatttatcgttggtctaggatggatcacatcacatcctagattaagttatttttggaatgaaggaaggaaactttagctaaggatgtattcttttctttcctttctagtaacttttattccctcgttttttacatttacgctttccaaactgataaacgtcgtgttttttaaaactgctttaaaaaatatattaatctattttttattttttatttaatacttaattaataatacgctaatttttcgttccattttgcatgccaagaggaatgttgcgaccccaaaaaaaggcagcctgtatccagtgaatttttcgctgtaaatggtccaccttattcttttagctctacttttagtttcagaagcactagcccctctctccaaatagactagaatctaagaatatgcagttataaaacctagaatatggactagaacctggccgaacccaaacatttttgacaatttgacacgtacgtacggcccatacttattgggccggaatgtgtcgaccttctgacatggggacgtagtggctgggccagtaatagttgggctggatgcgcatagtgccgtagttatgcgcggatctgttgaaaatagacaggacgctgtttttgaggtattgaaactgttgcaaatagcgatttaattaatgttcttcactagttgagaataaagcattctgtcactgacagtgaatcggtaataggataattgctacagacaatgagacaagtaattttcagtggtggtgccttttactctgcgtgagtgagtccatatgcaactatgcatgcataactaaagattcctaatccgcttggattcttttagggttcatctagatgtacgctgcacttaggtcctgctttaaagattagcccaggtttaattttgagagctaatgtttagttttgaattggtaggctaaacattatgttcggatccataggctaaatcagcgctaaaagttggagagagagtagagagagaggggggagatagggctgtttttttatggtcctatagaaaattagcccaattagcatttcttggaggagctaatattttgaggggtgctaatttactttagccccagattagcccacctatttagattcttggggctaatttagggctaataattagcccatatatggaaccaaatagggcctcaggaactttttgatagccacaacttctctcttagaagagttgattctaagagagaagttgtagctattaaaaagttcttaaggccctgtttagttctatggactaattactaggaatattttcagtacttctattttatagttttgaaaaaaaactaaaagtttgaaactataaaacccaatgttttgagattctcaccaacaacttctcataatctcagactcctctaatcaggaccatgtggctagaccaacagtagatttaaccagaccgtggataaccaacagcccgtggagaacctagttagactctaattgacaatagtattgtaattcatagtctaaaataactaaaaagtacaaatgctacctgatgtcctatgcatcggggtagttctatggaggaaacttttttattgtttagactttttatttttctaaattttattaatagaccattccaaaaagtatttatgaaaactaaacctttcggcaacgccagccgagtagctggtgtggccaaccatggtggcgtggccgaacaacatggtcacgccaactgcgcgtggtgcgcgtggcgtgacaaagtttcagatttagaatttttttttgaaatggtctattattaaaaaataaaaattttctctatggaggaatgaccctgccatgtagcgccatgctaccgacgcaaaaaatgtttttttttaagtgcgcacatgataatgtgtatcgccacacaaatattcaccttgacattcaatatatatataaatggagatataaaaacatttaaacaaagaaatactgatgcgtgttgtttgtgtgcactattcagggtatgaatttgttttgttttctctatgtatatatacatgtacgtagaattttgagttggttttttgcgaggtctcgtacatgttatcgtgtccacagtatattttagtgtcgataccacagtagcaatgaacgcgctatgcagtagtacacatgagattctgttgctatggtttgagggctacttatgaatcccaaagtagtttttgtgtaatacaaagtgcatccggtcgtaatgcttccgcaataaaagattaaaataaaacaaaaaggatctctatatattattcatgtaaaagctatatttgcaaagaatatgtcttcttggtactcaacaatatgtgtgatttaattatcttccaaattatgtaaatcaagcagagttacacatgcatgaaaactaagtttcgaatttgtcataatagtacagaactatgttaaatgaaagctctctatatatctgcatgttcatataaagctatatatgcaaggaattttactttttcattagtagtatatgcatacataaaagatgtgatagataaaacattaaacaataaaatattgaataaccacaacaacccaatcaaacaaggaataaatacgtgtcgaccaatgattgaaccacacaataaaaaactatatctagccgtccctctcataaatgcaaacataacatatctttaggacagatcaatcatcgtccacacattgaaatgtggacctagtgacatcaatcaatccgtggataggtgttgccgacgggatgcgccagtaatgacggaaaggcattcggaaaatatttttttctttagaaagaaccccattccccacggtaaaaaaagctgacaacatgatatagcatgatattgtatcctctccgggatacggcagcggcggccggccaaaccctaagctagaacagcagccgtatatggcatatcatgagaaaagcaggaaaagagagatatggggtaaaggatttatgaaccatggtctcttcccccctctatatataatgctgcatccaccaggctatggtcacacaccaccaatcaatcaaagcacacagatctgagctagctagcgcccacctttcttctcccactccggcggcacatctccgccgccggccggtcagccggcagctagtggctctctcgctcctatgtggctatgtctgtctacctaatggttttctgttttcttggttttgggtggtggcagttgacagaagagagtgagcacacagcggccagactgcatcgatctatcaatcttcccttcgacaggatagctagatagaaagaaagagaggccgtcggcggccatggaagagagagagagagagagatgaaatgatgatgatgatacagctgccgctgcgtgctcacttctctttctgtcagctctccctgcagcatgcacgctgccacagccacactctctccattatctaactgctcctttaatttcctcttctctctctctctctctggactcgcatcgatctccgatgagataagagcatgctgctgctgctgcaacgcggtggtgataaagctaggcagcgcgggacctcgtccttatcttgtactgcaggtttgggggtgagccctatacgtgccatgagctctctgaccgaggacaaggaggaggagggaggagacggctttggagactcttattttggcatgagctactatacatgggctttgccatagtagtagtatactccttttgctcttctctgcttttgcaggtttttgtcttggtttcccagagatctgggggaggacgacgacactactacagccagccagcctcgggggaataagctagggagcatcgcgcgtgacgatttgattaattaacctgtataaattcgagtgctaatttgtcacgcgcgattaattaacctcgagtcgatgggttaatgatgctgctggtgagaaaattactagcggatcccaagatctgcacgccatatggtacttacccgctgtgtgttcttgctgctagctagctgctagctgctagctgcttcttttttacaacctctcttaagaaagcttcaagcttgtgtgtttttgtgctatcatctcatgtgtgctgctgcaaagggggagaaaggacggccatggcagcggctagctagctgtgattattggagaaggttgatgtacactgcagatctggcaacctgcgcacctgccccagaagagaggagagcgtcagtatagcggctggcccagatctggaaactgcgctgtaaacgtatgtatattggttcgtacttgttggcttcgagttggagatcgatcgatctgatcttatatgttgctctcatcgattgatttctgttgatagaagtttcttgaggttttctatttgcctatttgttgtgtactgattgttcgagtctgaaagtggttgcttgattctaactatgccaacattcatgtgcatgagtttttttttcctttttcaaatttatttttgaggaataatgagttttgctgttaattagtacttatttctttggatgttcttcgcacataagcagctgcttgttatgttaacaacttaagatgaataagattctttactgcgaaaaacaacctgttcttggttttaatgttctttattatagacaacactatatatgcacacaaatccctttactcgacctatagaggaccgcaatatatatgcacaaatcagctgggtgggagattcttattttatgagatgagatatgatcttctcagttacatggtgatgattattttctgcggatttgtatggtttttaatttgtgtggagatttaatttctagctaaccaatgtttaattaggaacccataagcaaccttagttaatttacacatgatgttattttcgaagccaattaagatcaaccatctatcttttttgctgcacactaattcaacttttctgtaggttctctcccccaatcaaagagtttttccaaaggttctttccccattcaaaagtaaattaagtaggaaagcaggtggtggtgtttatatatatcatgggcaaataaactaggggatttaataccgggagtataacatatatatttgtaaaacttagcttttctgaccatccctttatttcatattgacctttaaccatcctaattttctaatgcaataggcattttttttgcatgttcttcagaaaaaagatgtataagttctgctcatggatttaatttcatgtggtcccttggtcctgatttatatcccaactttacatcaggggttgagtagaattttcatttgtgttctatatactcaaattggacactttatacgagctcccatgttaaccaggaaatctggtcgttgatcgtctacacatattttcttatttccatctatacatatgtattttttcagtgctataacttctttgctcgaatttgaccaaatagtttgaagtcattaaatatagcatagctattaatgtgaaggtttgcatctaccagcgcaataagtaattttctatttaactcagtttctcattaatgttagttgctgaatagacttttacataaatcaattgagtgtttaattatctataacttctaacaaattaaaaacaatgaatgaaaagtttgtaagatttttttagtatgtgcggtagtgctgtaaaatactacttaagcaacatattgagtctaattaattgggctaattgagtacttcgaaagagctctcacatgcattaataaaaaatagatgtggccctttaatagttggatttatcatatattgtgaacgttgataatattaagaataaagcggtctattgaaaacatcatagattctctttagtttctactaccatgaatgctttaggattagtaattctttagaatcaatatattgaatatagagttacctatcttggaccttaatttgttaatttagtttcgaaatttaaattcaataatcagagtgttgtaattgacgtagctagtctcttctaattctaatctaactaatttattatatatataattagaatttaaataattataatataaaaaaaataatagctcatgcaatgccacgggatgctgactagtcattatatatgagccacttttgtggcctacccctccgtcccaaaaagatccaatcctaactacgaatctggacacatgcgtgtccagatttgtagctaaagtttatttttttttagacagaagtatgtgctaaatgttctgtggcattgtacctgtcgtcccgctgtatgtaatcgcgtgtatgtgcccctgtgtgaaccttgatttagaagtacactagcagtgttccttttgtacctagtctttctgcagtagtgattgctccatacaaatcaaattcacatgattggatgatgagtacaatatttgtacaaatattaaagagcaaattttgcaaaacaacaaaaatcttgacagaaactatgacataactacatcgtattaaagccacagtaccataaattaaactatagattaaaccctgaatatattatgactattttttcagccacacggtaccgtaaaactatatcttttagcatcagattttgtagcaaaactgcatattttggaggttagatccctggcactattgtcctgatatctatatattgttctgataaaactagcacttaatgtgtataattctttgatactatggcgtttatcagctgcgcctgtagtttgtatatgcgcatacaccatttacagaaataatgtagttttggttaatttgattttattcataaataatatacatacaggaaccaacagcaacactatatataatatatttctaaatgtagctagctaaatgcctcttatttagccaaatttcttggctgtgtgctctatgacatagatcggggatcatataaaccatcatttccattatttgaaatatatacttattaaatgccttgaaacataccaatttcaaagggttccgatatcgtagcatgtagctagtgattcgtacgtatacagcagtaaaattgtcttacgatcgaagttgaaatgttggtgctgaatgctcttacacctgagaccgatctctctgctgtgtttggcaaatctgtattttcttgttattactctcagcgtataaaacgttcttaacaaattgagaagtatatatgcacgatgatctctatgtatgcatctgtataagctttattaattgttctttctccgtttcgtattataagacgctttaacttttttctagtcaaaatatatattttaattttaaccaaatttatattaaactataataatatttctaacataaaataaacataataaaactaatttatatacatatatacacagacacacacactgctatatttatcgataaacaagatcaaactttaaaagaattgatttaaatcaaaacgattaaaatcaaagaaagtatcggtcaataaactggtttttgctgctacgttaacctgctaacactttgccgcagtacagataccgatcgccatgtggatgtggtcagcatgctaataacactttgcagcagtacagatatcgatcgccatgtgtggatcgatgtgtctcgctcgatctcagctatccatatgccccaacaacagacaatctggcacgtgttggaaattaagtctggagatggacatgtggagacaactgaaaactctgaatgcatgaaacatgagtcaggatcacctttaattttttggtccctaggagtatgtaatgtgaatgaatgattgaatgattgactgatttccaccatttgtatgccgacttttgtaatcagaagataatatacagtatgagtaatttgtagactaataatatatactactaaaccattgttcttttgttgcaatagtgtgtaatataaattcgcagcatgttctagctagcaaagttactaatacaaaaaaatttgtttccccttatcagtgaatatccgcgtgtctatatcaacgcatgcatcagtcgtcccatcacaagactccaggcgcatatagacgatgtatcatctatatgccataattgctgtgatcttaaccctacaaattattgtgcagtgggtaccgtaccatttcatattggcaatcaattgaccttttgatcgggcatgagtagtgacaagaagctgccgctgaaactctgtattaattcatcctggatcgatcctatgaatgtagcaggattatttgtgctgattctgcatcatgcattagcgtatcatatagatgtcacagtagcattactgttatgatcgatctttcttatataacggaaattaaatggtttaattacatctttgatctcgccgatagacatacgaccaaagtaatgaagcttgcaagtcttctgaaccccataaaattatcagacttcagagatacattcagagcatgtactaaacgaaagagaaaatttctttaatgcccttaaaattttagccgatcccttctatgtctctgaattttcttcactcgcttgtatacctctgaattttgatttggatctcttccatacccttgccgtcaattgatcgctagttgaccatttaataggtatagaaaagttagttttgcccttcaatacgtgaggaatatgtagaaatttgtaaactatattgttggaagcatagaaatttattgtgtgattataatattcataagcttgttgtacatagaaattttaataaatattaaaaagtatgtgtagcattttctttaaatcataaacatagttttgaaaagcattcctatataatatataggacaggaaaaaaatattgaactaccataaaaaaatgctacatataatcttttaataagtaaataaatattagtttttatgtcattatgtaaaaataaactttgtcatgaataataccttgtacaataaaatcatgaatataatagtcttatataacaaaattatacacttccaacaatatagctagtctacaatatccagatttccttcatgtgtaagggcaaaatggtcattttcataggaattaaacattcaaataacggtcaactaattgaatgggtatgaaagggatcaaaaccaaaattcaggggcatacaagaaaatggacaaaactcatagggatagaagggattggttaaacattcaggggtatagaaggaaatttctctaaacgaaatggggattctctacaggaggacaatgataaggaactaggtcccgatcttctgatatatatattgataactctcaattaaatggcggaaacttgacacacatgatccagcttccgatcaatataattcgaaccctacaatcaaagcaccacatctcctttggttatcaaccgtgccctgcccagttgacctcatcgagaagactaatccctacatgcgaatcgaagaacacgagtaagaacaaggtagattattgcaactcgattgcatatgaattattaagcactcgaatttagggttccacaaaccgaacaagcgacaaaactgcaatgccagaaataatctaagcaaaaccaagagatggcgtaaaaaatagagtagattagaaaaaaaaacttaaccggtaattaacacatgcgaaattacttctttaccatgcaaaattttccaaatctacccttggggaaataatactatccataatactcagtgtagtagtggcggatatgatccgttggatgcaacgaatggatgatccatgtttacccgagggtacagtaaaaaaatcctttttctgggcggactatgttgcaagatggccagttgcagtgagtgcctgaaaatgcatgatttttctttggttgcataggcttgaacaaataaacatgatgtttctctcattctgtgaatgaaaatatttaacctgtattatttgaattgatctctagtgcatgatagggacggatagactcaggtcagaatgaaatgacatacagtgcatataagagaaaggtctagtaggcttaactctgcccatgtgtccagctagctcattgcgacaagaaatcttaggctgtgttagagaaaggggagatagataagattgggaagatacgcaaaacgaggtgagctattagtgcatgattaatcgagtattaattatttcaaatttcaaaaat

SEQ ID NO: 28415 - DNA, 5154 bp, Oryza sativa
ggttgattccatcccctttatttgggggcccgtcaggctttctcttcccttacacggcctagcaaggatgtggcccaactgatccaaccgtctccttccttccaaagggcccatgtggcacgtgttagcacgtcgttgccgcccctgccgcaagggcactgcctccgttttgccgagtcaagaggaaccaccaccgtgtcgtgctcctcctcctccactgcttctactgcctcccttgctctagcccgttgccatgcctattgccgctacaaaccgtgggcaagacgtgtcgccatgggagcgccgcctcctagtgcttcctctatcgcccatcatttccgtcgccgacctcagctgctgcgtcatcccaccgacgtcagcaagccatcgccatcaagcccagccaccatggtcagccaatctcaagacgatgccccgcgcctccttctccaaccagtcattgcggtcgcctttcttcatcaacatccacgctcccatctccctccactgcacccaagcttgagctctgccataccgagctaccgtctcgtcggagtgatatccttccctagagcgtatctcgccactagcatcttcacacttgagcgagtctgttttccccattttcccttctctcccacctcacatcaagccaccctggagttttctctctcctgccggtgctcccaactctttcctcgctccccacgctagctgcctccttcctccatcgggccatgttcaggatcacgtcaatgcgccgccgttgtcgctgttataccaccggatgctgacaccattcatccgctcttcctttgcttgctcgacctgaaccgaggaagaagaagaggaacgtacgtagccaggtgtggggacgtcgccactgcttcatccgatcacgtcctaactcggacgacgaaccaaaattgcgtgtgacaataggaaagatacaaaattttgaagtagttaagataagataagatatacgggtgcagccatgcggcctaatttgtgtcctctgatttcgtagcaaacctgatttgggccgcagcctcgggccgagagcacgagcccacggagagttcggcccagtacattctataggccgatcgacgtggcagacccgagcccaatacgacccacctgctccttccctttcccctcccccaagcgaaagccgcaaacaaatccaaccccccaccaccgcggccgatgtccaccctctccccggacggcgactccgactacggcggcggcggcggcggcggcgaaacagccggagcagtgatggccgacgtcctctccaagggccgggaagcctgctacaaggtgagcgacccaccccctgagaaaaccctacctccaccgccgcgctcgtttactgatgatgatggaggcgacgcttgtctttctccctccaaaccctaggcccgggacgccttctacacgtgcgtggagaagcacgcggacaagaagcccaccgagatcgccaccatggggctcctctaccccgccgactgcaagaagtcccgcgccaacttcgtcaacagctgccgcccctcctgggtcagacgcgggcgatccgaccccttttcacgattcgcgtcgttctcttgattttttttttctgacattggtttccttgggcaggtgaagcacttcgaccggcagtactccgccaagaagcgggtgcagcggctgctcgacggcggcgacgaccgccggggccccatctcgctcccccagccgtacacgttcaagcaataggtagctagctctgctgctggttccgtccctcggtaccgagctgaattacatctttgcgtcggagactggatgcggcagtatttgtttcagatttggtggtgttaagatggaaggcatatgcctctgctttctagtacgttggtatgaattgtgaatggatgagaaagaacttgcctatgacttttatcgcaatcaagatcttgttgtggtagtgtttatatctttgttgcaatacattggtactgtccataatcctcactataatttctgctgtttgatgctttatttcaacggacaaagtttagaagcaaagataaatggttcgatcaagctgcatgttggcctcgttttctcattatcatcttggtgctgttgtcatccacataaatgataatagtatggttaatacatactcgtaatgtttcatgtttgctgtgtgagttccaaagtgtggcttcagtagtctcattcgtaatatttctcttatatgataaaatgtaattagtaaccttgtcttagtatgtgataattcgaaatttgaaatactgaattgataccaatgatatgccactgttttgtgttatcaaatcaacatctcattaagtaattcacatataattttgttaaactgtaagatacagttattgttgaacgcacatgtgttttttggttcatattttgagaaaaaatgctttagtatgcaatgtggatttcacctatgcctactaaactgttgaatgcatcaaaacatcgagtgttagctcttgttgtgattttccttgggtcctatggacagattttgttaagtcgaaatagaccactttgatcatccatcaaaattctacactgactttcattggatcgtattaggagatgatttgagcattatttgactgtttgcaacctcttattgctttatgctgtaaattccttggatgtgtagtccatccaacataccagctggtcctttgcatatgagttttgctcggattttgtttgggctttctgtgaatcttgctttgggtagttcggcctgtgattcataataccagacgacagataagttgaaagcaagatgccatgttgatttgtacgatgacaggatgtagtgccatttcaggcttactccctacatgcagttaatgcttaatgcaaatactaaaatatgaatttatggtaacactgggaactatttaaaccttttttcttttagggtgatctgaagattctgtattctgttatatgcttgggtttctccaataattcttcgatttgttcatctgcattgctacacttttttctggtaaaatgtgttcatgacctgcagtgctatgctttactttggtaatgatgtgtttgtttatacatagatccatactttcgtactgcctttctagtttatactttctagtaaatgcaatgtcattttctatgcaatattcagcttacacatttaggatatccagtgtcccaggtgttgctagatgtgatggataaaattggaaatgcaaatacaaaaaggagggtttacttagttaagtgaaagtgtgaaacagaaaagtaatgttacatacaaatggtgaactctttatgattcatatgaacgataagtttacagagaagtatatatgaattgcttaaattgcacgtaaattgtaaagctttcattggactacaaatctgtgaacctatttcatagaactacatatttaagacattattgtgtcactaagctactcatttaaactgagtagtcaaatactacctctactaattactatagtaggaatttctgggttttaattattgggaaatctatttctgtcatggtaaaggctgttttagatttatcttttgtcttggcagaaggctattttagattatttgttcacacgacttgtcatgcttgcatgtttggaattggttattagatccagtttttagaaattccttcctatgtatttataggcttttgtttcattgtcctgttgtggcagaggcttgttaaagaatcaaaattgcttttgtaacaaatgaaaaatgctaaagtatgcaatgtgattttatctatacctagtaaactgttcaatgcatcaaaacatcaggtggctcctgtgatttttgttgggtcctatgggcagatttttttaagtagggatggaccactttgattttgcatgctttgactgtgcaacctcttatagcttatcctgtaaattcttgtgtcctatctggtagtccatgtccaacatcccattcggtcctaaacatatgaattctgcttgcttttttttttgggttatctgtgaatcttgcaccttgggggggggggggtagttcattgggttgacaaaaaacatatgattgaatattgttatttcagttttttttgtgtgcagggaatcgttatttcagatgattgaatatcgtatttcagtttgacatatccatagagaaccacttttagatattagaaaagtgaaagcaagatcccatgttgagttgtatgacaggatgaagcatttacactgtttcgtgatatcaggcttactccctacacagttaatgcttgatactaaactataaatttatggcaatactgggcacaaatttaaccttttgctttagggtgttctgaaaagaaaataattatgttatgtgcttgggtttctctaataattcttggatctgcattgctaggctttattctggtaatgcgtttatgatcctgagtgctatgccttattttggtaatgacgtgtttgtttatacattgattcatagtgcctttgtactttctggtaaatgatatgtaaatgatatgtcatttaccatgccaaattcaccttacacatctaggatatttagtgccaagggtagtgtcaagggtattgatacttgatagatgtgaaaggtaataatatggagacgcaataaccaaaaaggagggttcagtgaaacagaaaatttaatgttacattcaaatgatgaacttgtttttactcatatgaaggacaagttttacatgaacgtatatatggtatatgaattgtaaattgcgttaagctgcacataaagcgtatagcttccaatgaactacagatttacgaacctatttcatagaactacatatttaagacatttttgtatcgctaagctactgatttaagctgagtggtcaaatatctttactaattagtacagtaggaatctcggttcttaattattgggaagcctattttatttctggtgtcatgatgaagactatttcagatttatcttttatcatgttgaaggctattttagattgtttatcacacaagttttgtcattacttgcatgtttggaattggatattagttccagttttggcgcaaaacttttttt

SEQ ID NO: 28416 - DNA, 586 bp, Oryza sativa
tacggattaaggcccttccgcgaaaaggggaaataattttatgaacctttcttattttcgttaggttcaagtctgacgagaataatattctacgactaagaactcatttattttcaccatttactaaatattattttatttactagtcctttatattggaatgagtcactagtcaaatgttttggcaattcctcgtgggcggatgatgcaatagaattttgaatcagcgttttgatctttggttatccttcatagtaataatatctcggagtttgcaacgaaaacttagtatatcgactagacgaccgtgaaataaaatatgtctatctatggttaactaattgcctggctccgggaatggtcgaagccatacccaatcgaaaaaggatgttatccaaacgcatttcaagtagttgtagtcaaacccgacctgttgacccttttgcttttccagcaatatgtacatatctaagtaattgtcgttctgtcagaccatcatgaaaacgaaatttccgtttttcttctagacgaatacgatattgcgatcttttcccagaacgcaattggtttttaaagatactaggat

SEQ ID NO: 28417 - DNA, 971 bp, Oryza sativa
  unsure (1)..(971): unsure at all n locations
tagctccatggcaccgaaaatgtctcagggctcaagtgattcaccgaagcgacgagaccttgaaagctgctttttcaagtgtcagtagcgggacgttctgtcaatcggggaaggtttttggtgacaagacnnnnnnnnnnnnnnnnnnnnnnnnnnnnnnnnnnnnnnnnnnnnnnnnnnnnnnnnnnnnnnnnnntgccagtggaaggctttctgcgttcagtcaatctacgcagagtgaatcggtccctaaggaacccccgaaagggctgccgtccgatgggtacacgaaagtgacgaagttgctttgactactgaaccatgcctggatcgtccgagcgaattggatgatcgggccgagggctgccccctcttcccctcgctctcctttccttaatattcaccgtcgagtcatcaaagccgtcaactaattcagaggggctcggctggcccggtcgccctacgctactggcgcttccaaaggcgaagctctcgtctttggcgaccagcaaactctgggctaaaacctgtagttttgaagcaagggatgagcgcgaaagccgttgcgcttccgtacacgcgcatacgttttcttgctccgtcgcgcgttagtacaataacgcgcagccgttttcttgctggggcggacacggatttctctctaaaggcgaagactcagaagtgggcgaacactcggcccagcgggcgaacatgccggctccggctccgcgcacctgctgacacctttcgaagcactttcacgtgtgaaccgaagtcgtcttgccgaactccttcctttctcatttcagtcctcgcctttttcatcttccgtaggggcctttagtcttttgattagagtagaggtcgcgagagagcagagcgtaccgccctgccatagtcgcgaggatcttaatagtcggtcgcgactgttgtcatagtcaacgacggttgaaacttccaggaaaaaactt

SEQ ID NO: 28418 - DNA, 937 bp, Oryza sativa
agctcggtacccattttgatattttctatttgttagtagtgaacggttctaaaatgggtattgtatccctttttcctcgatcgtcaacgagcaagaaaacggatgcgcgtgctaacgctttcgcgctagtgcgctcaatccggtgcttgtttggatgtaagagatctcgtttgctggccgggcccttccatgagtttagatctctatgtatgaatctcttattcaatcccatactttttctcatttcagaacgatcagcatactgtgtgacttctgcgtgacagttcttgcatttcgtttgttgctttgcatgaacatttagatattggaaagcccttaattaggaatttcatagatagagaaggacgggaaaaaagagagagactgactaactacccggatcaatgctgattgacgactgaataaatagccggaagcaacaactgcacgagagagaaagagcggatccaactaaggaaatgcagtacctgttctgccggagctaatcatgcaaagctagcgtagcgccagccgtcgaagtgaatgaattcgaaagaacgaagaagtaaggaaatgagacgactctttcttgaacaatttcataagcagatcttcccctccacaccaatcacgagtttttttttattcctctcgtatatcgtcgtcacgcccttaatgataggttttgaaaaagatttttcatgtcattcccatttaggttcgattcggatccctctgttgtttccctttcctcccgaacctttttctcgaaatgataaagaatctggtacactcgaattgtattatttaagtgcttattgcttgccaaaaatcctacttctacaattggtaggtcaccgggttattcaaataagtcgtgttttctgtgcttttcccatgttacaacttccgtaccaattcgatcgatccggaatgg

SEQ ID NO: 28419 - DNA, 1169 bp, Oryza sativa
atattcgtgttacttcgtctgcacttgtttgtacacgaatgcgtgagttataccgagtactcagtaaattatggacaacttcaaatcttcgttttcgagagggatgatccactccgcaaatatcgatcgaaacttgaacccttgtataggtatgccattttagaaagcacaacaatggaaatgggtagtcagtattggtataagatctattcccatgttccgatcttttcattttatgtacccatttcttgggtaaaatctcccaactatattggaaaatggattggttatccataaatgaaaataaagaaagcttgattttggttccgcttcttgctctaagcagaaagacttgtcggaaatcgccggttgggttggtccgaccaagaaaggcatgggagtggagaggcggaagtgaaagactggctaccaataaagatccctcactgcacactttatatagttctgtatccaggatcggctgcatgctctagtgttgaatctggtatagaacccaggatgcttggttacaattccgaatacgctaaaccatgtttgttttatttttttttctcgactggccatgggtaatgagtttcgatgtattgggcgtttccgtttagaaatataagctttttcgtgcttgcttgcgagcattggaatggcctgaatggaatgaatattaagataaataaaagaaagaaaataaacaattgagaaagttattcattcttatattaatttcctatacttgaccgaacaacttccaattccgttatttcaactacaccaaatgatctttcgaattggtcaagactctcctgtttatggccccttctatatggttgttgtttcattgaatttgcttcaggctcgcgattcgactttgatcgttatggattggtaccaaaccaagatcaagtcctaggcaagcggacctaattttaacagccggtacggtaacaatgaaaatggctccttctttagtgagattatatgagcaaatgcctgaaccaaaatacgtcattgctatgggagcttgtactattacagggggaatgttcagtacggattcctatagtactgttcggggagtcgataagttaattcctgtggatgtctacttgccgggcttgccacctaaaccggaggcgggtatagatgcccta

SEQ ID NO: 28420 - DNA, 2088 bp, Oryza sativa
tcaggatatatggattgtgaattacttacttaataatagggattacttgcctatactataatatgttcatttgtatgaatgggataaaatccaaagaagtcagttcggatccgtttgtgaaagagtagaaaaagaaagatagtgaatcttgtttgaaccattaatgaaaaatagaggttggtaaaatagttagaaagtaaaatggctttttattggggatagagggacttgacttgaaccctcacaatttataaagtcgacggattttcctcttactataaatttcattgttgtcggtattgacatgtagaatgggactctctctttaattctcgtccgattaatccgtttttcaaaagatctaaagaatgaatgatttgattactcaatattcgattcttctttcaccttcgattggaatggattcacaataattctgaattttatcctaatttattatttcataatcattcataatttatttatatatttatataatccagatgttgatacaattcattttttttagtacttcagttgattttgctttgtttatcccagttttaatttggattttgtgtgaaaatgaaaaaaaagaaaaaaaaggagtctttatgtctcgttaccgaggacctcgtttcgaaaaaatacgccgtttgggagctttaccgggactaactagtaaaagacctagatcctgaagtatctttaaaaaccaattgcgttctgggaaaagatcgcaatatcgtattcgtctagaagaaaaacggaaatttcgttttcatgatggtctgacagaacgacaattacttagatatgtacatattgctggaaaagcaaaagggtcaacaggtcgggtttgactacaactacttgaaatgcgtttggataacatcctttttcgattgggtatggcttcgaccattcccggagccaggcaattagttaaccatagatagacatattttatttcacggtcgtctagtcgatatactaagttttcgttgcaaactccgagatattattactatgaaggataaccaaagatcaaaacgctgattcaaaattctattgcatcatccgcccacgaggaattgccaaaacatttgactagtgactcattccaatataaaggactagtaaataaaataatatttagtaaatggtgaaaataaatgagttcttagtcgtagaatattattctcgtcagacttgaacctaacgaaaataagaaaggttcataaaattatttccccttttcgcggaagggccttaatccgtattttctcattcatgtatcacaaatggatctacagtaggatttttttttattgccgtaccaaagtaattaatttttaataatgaatttctatcaaataaaagtcttattgctgaaatctatttgatttgatacattgtggtcggtggtgaattaacagaaacggaaagagagggattcgaaccctcggtaaacaaaagcctacatagcagttccaatgctacgccttgaaccgctcggccatctctcctacataatcttattattgaccagaaactgagtgaatagcgagttttcgtatccctgcaagtacaggtacaaccacaaccgctcgggggttccatggttctaaaggaataattcctttcccatttccatggatacgagcgggactattacttactatttcatctaagctatttcatctaagtggaagaatcctggatttatttttactaggaattccgctaactcgaaaagttttagtttggtttttctccctcgagaaaaagaatggaagaattcttcttattccataataaccctagaattctgtttgcataacgtacgctacgccatacaatcgaaatagaaaatagggtaatgggacaattaatgactttgaaaacgcgaaatagctgatgagagaagttgttgttgagaaataagaaagtggaatgaaatccaatctgattcaaatattgaatatctctccttgtccaagcagaaggaaaagggacaatttgagcagaaagcccatatctattatctatttttagaatcgaattagtctggtttttgctatttcg

SEQ ID NO: 28421 - DNA, 576 bp, Oryza sativa
tttttcccgtttgctgtccccgttattagttctcgttggccgcggcctataggaaccaggctacccctggcttttaagccggttgcatgggttagggcacagttttgcgttcaataatcctgggggctttcattttgccacgtgtttggttcgtgttcgctttaaggccccttttccatcaataggtactcccagggcgtcgtccaccgggcctaccatggcctttcctgcaggagcttccccaatagatccagtgcgcttgacaagatgtccttctttaatagcggtatctcttccaaagccaccaatacttactttctcattctcaagattcgaggttattcctttctctccgctggcaaattccaccatttctccagcgtgtatctcgttctatccatcaacacgtgcaattccatctccaactgagaccactcggccgatctcatccacttgacaattcgtgttaaagttggtcattctactttctaatagagtcgtcagttcggcagctctgggtgagccctccatacttttccgtagccgatggatgatagaagggagaaatccgctttt

SEQ ID NO: 28422 - DNA, 690 bp, Oryza sativa
  unsure (1)..(690): unsure at all n locations
atctttccccttcttgatgagcgcactacgactcattcaaaagagagagtaaaaggaaggatttcccatgccaaaggatcggaacagatcgggtctcaatccatccgtacttgcaatttcatcatgatccttatcaacagagctaatcgatacatttataaacaatgataccttgctttgtgtttcccatctgttcaagtggataatcccgattcggttttcgagggttcgctcgtcatttattcgtagtaacgtcgtattgcctatgcagctaaatcgataggaataggatttatcaaaggaaagggcgggtggacatacgttgcgggtgtccagttggcatgggtctgggttccgctcatcaactcgaacggtcaatgctggccagatacctgcatcgttatacgtcacaagttggggtggttgaacaggaaaaacaacaacgctttccttttatggcactgctcaatccgaataccagctactatacccttttcaaaatactagctttttcccttttgccttcccctcacgggtaagatattttatattccctggactagtacgcgtacgctatttatattccttgcgcaagagctattnctatcctttcagccaaagctttctgtcggaaaacaggtacgaatcactagaataccctacctcatttaccaacaaagagagaaaaga

SEQ ID NO: 28423 - DNA, 10275 bp, Oryza sativa
taaaagtaaagccttttatttggatttttgagatactagttatttataggttaagttcgatatttcactccgtgggccggctaattaatgaaagtaattcctggaggggaatcaatcgaagagattgcctgcccatgctacaattacttactctttaggactagagtgctaagctgcctccccggcaccaccactataatgaatggctcaaacaaataggagatgagaaagtcgagtagcagcactgatgggaacattttttgaaactagaatggttgatagtcaaataggagactcgcgttgtaggtaaggcttttcaaaagcctcgacttggctaacgccctttggttttgaggatcaatttgcccgtgcttgctggtgtcagggttgcagataagttgtttcggtgccatttcctttgttatgaatgaaaggcattttggagatttgctcagttgataccgaatttgaagataagcccttccctctcgtgaacaccttcgtttagtagatcggtacggttccattcagaagaaactattatacgtggtcccgtggagtacgaataaggcttgaaagttttccttcatattgtttgctagcttccttctccttgtttcctgcctttcattctttatgaaattcttattgattttctttgctgactgacgttacaccaagaatttatttaatagcgtatatatagcctgggcatcgataccagccttccgttcgcatgatattaagaaagtgcctactactcaatttcgcattggcaaatccttccacttgctatctaatgtagtatataaagcctttcttttctatttcttctattggctggtctgggggaagcggatcacgcgaagatctatagtgtttaagtccatctttctcttcctgcaagctactgagatatgcctcagctgcaggtgctttgtatctttggtcaagagttggcaagggataccaatgttgtcgaccacctacctttgagcatagcttttaccatattcctccctcgattcgccattcattccttcacagctgagtcaatagctgtgtcaactgaatgtagttcttttttaaagaacgaggccgctaaggtcaagggacctgatccagaacattgaatccaaccatcagcattcgcaagaaagagaaagaactcggttcaaagaatcgcttcggtctaaaaacgagtcttccaagatcatgtctatgtgaagagcttgaaccaagcgttcacacgcatacgccctctgaagattggaaagaatccatcagcgagaaaatcaaatcgtattctatagaatatggtagtggtaattatataactgctttgaggaggaagagggaaattgtcaataactgtttgcaagatccacgtatattaaaagaatatataaataaatatgtgcaaacgcactatgaaatccgttatagatattatagtcctaattggaataatatgtgcttattccacaataatatcgaattcaatcaaccaattgtgaggtttcattataattatataagggatatgctttctttaaggagtctctctcctatgaaatttggtgaactctctatgcgaagcagattatggacatctttacaaagattaacagaatcttcaaattatacattgaccgctaaatacacacacaatgtttagtgaatcttatgacaatccaatccaaggatggaacatcgtttgtatgtgggaatttctatgctcttgtcaaatttgggttttataccgttgtatggttcaggtatataccagttagcggtatagaagcgttacccgttgatctgtttccagaagattatcatgtctttctcaatgagagggcaaatgtgactgattatagtaaggtagttttcgtggaaacgaaggatcttactccagtagtgctgtctgcctttcaaaatgattatccatttaatgaaatgtttggtcctataccggaaacagagagtcctcataaaagaaaatggttactatccatgggtttaggtataatgatcactttccgcttatcggtaggtgtgctacctgacataaacgaaattctactaaattgaaaaaatgaagatgaaaccaaatactatgataggattgattggattaaatagataggaatgattggattgaatagaacaactatgaaacataatagttgattgaatagaatgttggtctcacaagtcggtacggtgtgcatatccatccttggaagaagtagctccgtcccagtctttgtcggaacttgaatcgaggtaggcaaaagaatccttactcggaacgagcccaagataaaaggtctagtccaattttagtcttggttgtacatcggtactacgcacggtaggcatttcttcccgttatcgggacttgcacttgcccggccttagtggtattttaatgattttcttccccagcaaatcaagtaaatagaagtaataattcaagtccctccgtggatttgaacatacttcgcttcgtggagccgaggattagatcgatctgaactttcatttcttccattcgcagtaatcgttggttttgtccaattccttcaatcatcactgttttgttctgtaattccatttcattttatctattttcttcaagaaattccattgatgtgcttttctattgctctcattcattcctattcaatctattcaaaactacgggtactggtctcaatgggaaagagccctaattcgatatgtcgtttctagagtatcagcaagtggtaagcggattacaagcaagcggcgaaggtttgaattgactagcttgatccctactattaacaaggaagaagtaagcaagcaagaaagaaagtaagttcagtctcttatttcgaagttcgctgtgctcttgttcaatagacattctgctggaactcacctttatctttagagatgatgatgaatattctttagagactcctctaaaataaaagaaatactttacaagaaaataaaaattatgtttatacggacggaattcggtctatcctttattgaatatcattgggcctgcctcctatctatcaactcattactctcctttgttctctggtaagctctcgcattgccttaaaacaagcattctttcgtattcaaagaaggtttgcttgcatgttctagcactggaagagacgaatattggttgccggatgctattcacatgttaaagcacaaaaggtacctcaaagtttatagttctaagctgaagaaatagcctgagtcaacttatcttctttacaacctccaaacaaacgatttaggaaatggaaattggaaccttttggagttacctagtagcattggaaaccttatgttccttcgataccttggcttctttgatttagtgattaagctacctctacctatatgtttgcttcaacaacgttctagcttgcgtattctgatcacacaatggaattcaggtggaccagggtttgggacactaatctttaaattatagatgcattataacatgtcaagggaggcgccgagatatgatatgaccaaaggccttgttgttgttgcgagccgggctcgaactgacgaggagagtggagaggaatacagtagtagtagtcgggccaggggcttatcttattccttgtattcattggtctgtataggggtcacatatagttggtgtgctttgtgaactgcgatcttgacggtgagactgataggaaaatgtctgaaaaatggggagaagccgagtaggataggactcgaaagccgagctattaattgaatcatgcttttgattgaacgacaaaacatcgatctgttaaagtcgataattctgattcgtcttcggggtatgccgtaaagatagccgagaccgaggataggtgccgatctgttttacgggcagtaagtaccgttgttcgaaaggaaaggttggcattgcctaaaccaaggataggtttgaccctaggattgggattttagaaaaaaagggatagcgctcgtcttttctctactctagcgtatggactcgtcccaggattgccggagctagcgttaggtgagattcctttgattgaatttagcttgccatcatgatacgctgcagttagattaggaaccgtataggcggcctcatatacccggaagctttggattcacggatccgaaacaagacatattcactgctactgatatccctccctttgctttgaagccgaagataacgataggatttccggaaccgaaactattattaattataattagattgcgaactcaggagggcttagtaccagctacaactatcaaatccgttaaggagcagatcaattggcttagccgaaaccgtgcccttatcttttctttgcattagccgaggacaatactagggatgcgggaagttccgagaataggattcgattccccgatcttctaattgagttggatcggcctagtccagagggagaggagcaatcaacgctaattcgtattgcgataaatcgtagtcatattattattattggcgtacgtaatttctttactacgtctatcgctcgtaggaatatctctaaataggaatcgtagtcctcgtatgtacatgtttcgtattgtgataaagcacctatgccgctagaaatagtagcgccttaaagaaggcgttatttacaagatggaatagtgctacgtcataagcagaaagaccacaagccataaatgggttacctagccacataattacagacagggacccaactcttaggccagtccgaagggcattgatggaacaaacaaaggtagaagatcttgattctctgcaattcggcttcaacccgatggagctctcttcaaaacatatctttcggcgtcagtctttcctgccttaccttaaccccgctttcacgtggcgattcggtatgtgatctgtttacggtattcttgaagctttctttcttggtcaccggacagagtgagaactgctctgctttctttccctagcacacacttagtagatagtaggcacaactccgctaagagctcatcgaacttgagttctagagtaagaccacagctcgatatggctcattcactagtatggtttaccacatgccagtgatagatctctctcaagcgaggtttggtatcggtgaagtcaatcattgaattgaagtggtagagtgcatagcggggcataaggccccatgtatttcttatcagtgtgtttataccttgaattcaattgatgctgttctagcttgttttaaacaagttatagagtttgttttggttccaggtggtcatcccaactcgtattagctatcgaaaagccgtacttacttgagtttcccgctttccataacgaatcccccgctgaaagcaccacagggagtgtaaccggaggaggatgttgtcttttctcactcacccagtagtcgagggtgtattattacccgtttcactgacatctgccttcccttctctggagcagttatgtagataggagtggtaggaatcagcgagcatgttgccattcgaggtagtccaaccttcctattaattagaattctgggtaaccctatcgttgattgacggatcggagggactaaactgttccctttccttcccagggctaggttatctatttcctgttcgtgctgcgccatcagattaatcgtatcgtgatcctggtatcgctcgagcatctctttctgatgaaacctttgcccttgctttctccactacacctggtaacgcacagtgcttctttcttcgatctatccaagggaggcttattgctttaagcagagtatccagttctgcatccgttaatgatttctgaacatagagaaaagaattgatagctaaagtttgcttttagtagtttagtcaccaatcaaaaaagtagctaggctgaagccgaagcacattccctagcgtactagcgtacgagagaagcacattccctagcgtacgagatatgccttttaggaaagagatcccttttatgagcaatggtttttgataatgctaacccctgttcaaagcaaaggtcgaagctggccaccctttactcggcatccgttctcatatgcatagatgctccgagaagcttcttttagttagccaagcgggtcatgtggatgggtcaagagatgcgtaaacgtgcccaacaaggggtaggtgtggtaaaagggtatgcgggttgatgtgtccttcaccttgctagtaagagtggtatccttattggcagcaataccccatttcagtttctggatttgcggaatgatttgaacccctattttaaaaaccaatctatttggcccggtacggttttccttcaataccactcctacgatagaggctgatatgactacgagcgagatatgactattcctatccttaagcgaatgctggaacgaaagtaaggtcttccctcgaagtgaaatgaaagcaaagggtattgcaaatcaactaattgttctctaataccacctcctcctgtatctactattggttgactgaaaataaaccaaaagcaagggtggttgcacatcttctgaaaagataagggctcggtatcggctcaatcgaacaagctgaggtatatagggaatagtagaacatattgattatcctattggattggttccgctcagtcgagatatgatgagtcaatgggcattgagagtttcgattcaatgtgggaatgactaagacaagttaggcgaaacagatatgcaccatagaggtttatccaccgtaggtttgtagacaagaatagtagtcacagcgagggatgcacataaataagatctgcactggtataagtgataggttttgggtaagctcgctcatatcgaaagaagaattcgaaggaaatgaagcataagctgtcaccactaggataaatcaaattgaatcctaggctgtttcgatagacaaaagaaaatagaaaaaagtagtgagtgagaaagaaataagtagcggcgctttgcttgcttggaaacgaagtagcagatttttgagtagtcttttcttggctggtaactattcaaacagagctagccctctttcttgatacctatgtactgtccacatatagtactgtttcgtgaaaaaccaataggcattctacacagagaacaattcaaagctgactaccatatactactgtccctgctttacctgctgtccaagtaagtactaatttcgaatgcgaggttgcgtagcaaagctacaagccgaaagtcaagaatgaactgagttaactagctggtagcactgtcctacttgtctattcgttccaactattctatttgtttgcttgctggaacaagggaatatagggctgctgagctgtccaagtagaagtagctttcctactagttgttccaactaaccaacaagcaccggattgagcgcactagcgcgaaagcgttagcacgcgcatccgttttcttgctccactcataagtccaatctggtaaatcaagaaatgaagaggtattggtatatcaatgaacacactccatagagtttctgctcaaatcagagtgttggaaattaagaaacagtttcatcccgccttccactcatccccgcatttcgctcaaagctgctctctcatttcttcgcccttaggaaggtctctactgcaactgagtttgaaagcttttactcatcaaatatttttggcaagtaaagtaggtatcaatctgcttgaaagcctgcagagtccaattttgagtattttcagttagaatctagagtcagcctattcagttcttagcccttaagggtaaggcagggggtaatatggatagtctctgtccctgtattcacattccaccttcaacaaagtgttgatttcccgtaaagctaactgtagtcctttaagtaagtagatatcttaggcaagttagcaatctcgttatattaccaaggccttcccttctattgtagaaagagttctcagccatctaattgcagtgccagttgccagctatccagtttcatttgaagttgctgggggtccaaacgagctagttgcttttattcgtcctataagtccttccacaagcgagtcaatagggtgctggctagttgtagttgttggcgtgcctttcctttcatcttgaatattaataaatatttggataaattactttagaataagaagttcatgttttatagactagtaagataactaactagttaagtaatacgaatccatactaggaaaatgaaaatgtgagtcctaggcactggaattggttctcttctccctaatccctataagccagaaagggtaataggcttcagtgtaagcatttccttcaagcaagtcatctcaagttttaaattctagagaatagctccgatcaacccattttagtttggttctgcaattcattcgcataaatgaaaaaaaaagcgagatgtgcacgaaagaagatcatagttcagctttaaaatggtggtgtccctgtgttagtaagtggttgaaatagctcatgggagtgtctgccccattcgataatggcatttatgatctagtggagtgagtgattgtgtggtgttcagtctaaggctttttgaaaagcggatttctcccttctctcatccatcgtctttgttaaagtatggaattctcacccagagctgcggaactcacgactctattagaaagtagaatgaccaacttttacacgaattttcaagtggatgagatcggtcgagtggtctcagttggagatgggattgcacgtgtttatggattgaacgagattcaagctggagaaatggtggaatttgccagcggtgtgaaaggaatagccttgaatcttgagaatgagaatgtaggtattgttgtctttggtagtgataccgctattaaagaaggagatcttgtcaagcgcactggatctattgtggatgttcctgcgggaaaggccatgttaggccgtgtggtcgacgccttgggagtacctattgatggaaaaggggctctaagcgatcacgaacgaagacgtgtcgaagtgaaagccccagggattattgaacgtaaatctgtgcacgaacccatgcaaacaggcttaaaagcagtggatagcctggttcctataggccgtggtcaacgagaacttataatcggggacagacaaactggaaaaacagcaatagctatcgatactatattaaaccaaaagcaaatgaactcaaggggcacaaatgagagtgagacattgtattgtgtctatgttgcgattggacaaaaacgctcgactgtggcacaattagttcaaattctttcagaagcgaatgctttggaatattccattcttgtagcagccaccgcttcggatcctgctcctctgcaatttctggccccatattcagggtgtgccatgggggaatatttccgcgataatggaatgcacgcattaattatatatgatgatctaagtaaacaggcggtggcatatcgacaaatgtcattattgttacgccgaccaccaggccgtgaggctttcccaggggatgttttctatttacattcccgtctcttagaaagagccgctaaacgatcggaccagacaggtgcaggtagcttgactgcgttacccgtgattgaaacacaagctggagacgtatcggcctatatccccaccaatgtgatctccattacagatggacaaatctgtttggaaacagagctcttttatcgcggaattagacctgctattaacgttggcttatccgtcagtcgcgtcgggtctgccgctcagttgaaagctatgaaacaagtctgcggtagttcaaaactggaattggcacaatatcgcgaagtggccgccttcgctcaatttgggtcagaccttgatgctgcgactcaggcattactcaatagaggtgcaaggcttacagaagtgcccaaacaaccacaatatgaaccacttccaattgaaaaacaaattgttgtgatttatgctgctgtcaacggcttctgtgatcgaatgccactagacagaatttctcaatatgaaaaagccattctaagtactattaatccagaattactaaaatccttcaacgaaaaagggggattaactaacgaaagaaagattgaacctgatgcttctttaaaacaaactgcgaaggagattaattagatagacctttttatttttcgtcgttcgatcacgaaaacagggattctggaacggccaaaaatcccagcggttgttcgggtcgaaaaaccgagaa

SEQ ID NO: 28424 - DNA, 26292 bp, Oryza sativa
  unsure (1)..(26292): unsure at all n locations
agagcctagtcctcaacctcttcttccccaaaaggtagttatgaacgtgccaaacttattggatttattcttggaatgctcataaccacctttactctttttttcattctttactcagaggaagccatgccgtttggagaagagcaccaagtggggggagtgtggagtccccgaaagaggagctttctaaaggcaagagaaaagctccgatggagcccttggagctacagggaccaccaacccttcgcagcttggacgatttgattcttgtgccactcagccctgaggagggcgcctgctcgacccagtcaggtactactccgccgccggccccgagtaactctgcgggggtcggtgcagccctttcttctattccggagtgcataaacaaggatcctcaaaaagcgaaatcatttcgttaatggcatttcagaaatgagtcataggcgcctgtacaatgacagaatagagagtcctttttttccagaatgaatcattctattcaaatctcacaagttctctttacgcgtcttctaggggcattgttgaacgcaatctgcaggaacaagaaatgattctttcttattttgaaacagaattcaaaataaaggaggatttaattcggttgctttatgaaggccgacgccgtgccgatagatacgttatacacgaaacgaaaatagccagtacggtggacgcgttcctttccaaaaagggattatcaggagctcccagtgccgagggggtagttcaactcaagaaggagcggtactttctggaaaatcccgggaggaatggagctcctttgtatagggaactcgaagaactcttctaagggggccccaagccgaaaaaaagcaaatctctttcgtgattttgtaggtgtaggtatatagtgaagtgataccgaggccctctccacaacctagtagttgatgggtatggggaggggagagaagagtgggtatgagggcttctctcgccatccatagccccctttctttaaaatgcaaagtggacgttcccgcacgaatctccggaattcggattcctgatattgatcactagaatcaagctttttatgaggctctctgcccgctatgtaaaataacctgactctgagtagttacatactactctatataacatagaaaaagcaggctacccataacgggagaaccaaatcctcattgaattggatttatcaattcgaaggggggtcgtacaaggtcagcagtaccccctgtgaatccaccacctgtatgataagttcttaatgttagttgagtgccaggctcttcaatagattgaaccgcaataatacctacggcttcccccaattcggggggggccaatctttgtttaaggatgttggataggtgattcatcaatgatgccgattgggaatctaaggagggggctccgccctagtaccgctatatatccatcttctgatagtgggtggttttcgtacgcgtagcgccttgctaccaagtgccagtagtgtaggagatccctgcaataagagttgtgagtgaaatcggttgcttgttgctagcgggaaggaaggaaaggtcagattaccaaaaaagccagctgcatgtatactcgtaggaaagacaagatcagatagaaccgatagaaagtaagaagggtaagcaatcctctgattctatttttatagtcgtccgtcattcgatcgatagtgcaagcctaaaagtcagctatttaaatagtcaggtattgaaatagcatggtattaaaagggtaccgaacttctatactataatagtaccgaaggccttttcttgtctcaccggatatgaaatgcaaccttctactaaaagtatgggggataatatattttatctaattagtaccctaaggatactcttttttctgcacgaacgatatagaagtactatctatgtatttggttacctatgacctattaccaacttaactatgttggtctttcccattgaatgtcagtcttgaaacattgccttgtatattcagaacagtaatgaaatgtctctgaatctggtatccaaacgttgtaagtcgtacccggttatacgtatcacccaacaacacgtcaaggatggtatctcttgaataggcgtatgaaagatttcttgcttctttcgaggaaccggacactggcgcttgggtaaggcgttctcgcagcaaaatccttcgtgaggtctatctactgggcttgagtttgaggtctacatcgtaggtagggtcttctaaaaaccacatgaaccttcactcttctgtctgaggagggcaaatataggtataaagcctgggcgagtgtctttgtccagcgcgagaaagctcggaattgaatgctttgaatgcgcaaaatgaatgctttggaacagttggtactttcagatcggaagatgctctttgactttcgcctctattgttcatacttatttatgtgctgccagtcgtactcctgttaaaaatccaatttttgatacaagataagaaacgcttcgtgcctcgcatttgacgggcggagttcaatggatgctatttctcctgagcttaatctcggaagtgagttagcgaataataaattatttccattcttccagatcattctttcttttcccacgactccgtgttggttttgcagtagaatgagctgcagactcccagtgttatttcaaccttaagttccatcgacttaagcgtaagcgccccacctctcttttgagagtgcgagagatttccgcggcctgtaaacacatggtttttccagccgtgaccctaatttacttactgattttaaaacctacctccggccgcccattggttaggatcgccctttggttggtggaagcgagaatcatcttttgatttttttaagtttcccgaaaaaactgaaaaagcttatattatatatagtatctggcatgcctaaaagagatagctggcttaaaacacgacagaagtaggacgcactgaggccgagctttactgcttgagtaattgtctttccagtagagctttcccttgttaagtagagaattactgtccttcactcatattttgagaaacagtacgcagcacgtatggaaaagtcagcctaggcagtcaaccttttcttgacttcacgagtttcaaacctgtctgttagaggggagccaacactctctaactacctatactacgcccctattgattggaaaccctcggggatcccataaacaaaggaattatacagtacgaaatagcaaaaaacagactaattcgattctaaaaaatagataatagatatgggctttctgctcaaattgtctccttttccttctgcttggacaaggagagatattcaatatttgaatcagattggatttcattccactttcctatttctcaacaacaacttctctcatcagctatttcgcgttttcaaagtcattaattgtcccattaccctattttctatttcgattgtatggcgtagcgtacgttatgcaaacagaattctagggttattatggaataagaagaattcttccattctttttctcgagggagaaaaaccaaactaaaacttttcgagttagcggaattcctagtaaaaataaatccaggattcttccacttagatgaaatagcttagatgaaatagtaagtaatagtcccgctcgtatccatggaaatgggaaaggaattattcctttagaaccatggaacccccgagcggttgtggttgtacctgtacttgcagggatacgaaaactcgctattcactcagtttctggtcaataataagattatgtaggagagatggccgagcggttcaaggcgtagcattggaactgctatgtaggcttttgtttaccgagggttcgaatccctctctttccgttctgttaatcaccaccgaccacaatgtatcaaatcaaatagatttcagcaataagacttttatttgatagaaattcattattaaaaattaattactttggtacggcaataaaaaaaaatcctactgtagatccatttgtgatacatgaatgagaaaatacggattaaggcccttccgcgaaaaggggaaataattttatgaacctttcttattttcgttaggttcaagtctgacgagaataatattctacgactaagaactcatttattttcaccatttactaaatattattttatttactagtcctttatattggaatgagtcactagtcaaatgttttggcaattcctcgtgggcggatgatgcaatagaattttgaatcagcgttttgatctttggttatccttcatagtaataatatctcggagtttgcaacgaaaacttagtatatcgactagacgaccgtgaaataaaatatgtctatctatggttaactaattgcctggctccgggaatggtcgaagccatacccaatcgaaaaaggatgttatccaaacgcatttcaagtagttgtagtcaaacccgacctgttgacccttttgctttttcagcaatatgtacatatctaagtaattgtcgttctgtcagaccatcatgaaaacgaaatttccgtttttcttctagacgaatacgatattgcgatcttttccagaacgcaattggtttttaaagatacttcaggatctaggtcttttactagttagtccggtanaagctcccaaacggcgtattttttcgaaacgaggtcctcggtaacgagacataaagactccttttttttcttttttttcattttcacacaaaatccaaattaaaactgggataaacaaagcaaaatcaactgaagtactaaaaaaaatgaattgtatcaacatctggattatataaatatataaataaattatgaatgattatgaaataataaattaggataaaattcagaattattgtgaatccattccaatcgaaggtgaaagaagaatcgaatattgagtaatcaaatcattcattctttagatcttttgaaaaacggattaatcggacgagaataaagagagagtcccattctacatgtcaataccgacaacaatgaaatttatagtaagaggaaaatccgtcgactttataaattgtgagggttcaagtcaagtccctctatccccaataaaaagcccattttacttcctaactattgtaccaacctctatttttcattaatggttcaaacaagattcactatctttctttttctactctttcacaaacggatccgaactgacttctttggattttatcccattcatacaaatgaacatattatagtataggcaagtaatccctattattaagtaagtaattcacaatccatatatcctgacatttactaagtccaattttagaatactttttgattttttagtccctttaattgacatagatacaagtactctactaggatgatgcacaataaatggtcannnnnnnnnnnnnnnnnnnnnnnnnnnnnnnnnnnnnnnnnnnnaccagttcaaatctggttcctggcacagaaaaaaggatctaccgaataggtattgatacaaattactcgagatggattgggatacatattcgttaaaaatatagctagagtatgatttattcatctaagtagagaaatctctaaatagagacacttctttttagagaagggtaaaaatctctggtccttttctttatggtacaaaaggaggtgagattaggttcccttttcttcatttttgcatttcttattccgctattccgaatatttttttttctttcttatcttatcttactttcctagttgttccaagtaatgcgcgcggtacaaagttcgtggtagggaacttctttgagtcatcgtatttttctgtttatatgaaggaaatgaatatgtgattttccaaattggagaatcgaaatgaagcccttttttgctcagtctatctggacccttttgtataataggaattaattccaatataataggtattctgtttctagacgaaacagaacgtcaaaatattccttgacttgaataaaatcaggagttgtgttgtataagtgagcatgaatttcttatcattcaatgagcatcttgtatttcatagaaattgggggttatatagtccttacgtaagggccagcctatccaactttcaggcattaggatacgtttaaggcgtggatgattatcataagagattcccaccatatcataagattcgcgttctttcttgaaaatcggcacttctccaaatccagaagacagatgggattctaggattatccttttgggcaaagacttttatgcatacttcttctgggttatctataccatactgtattctcgtaagatgatacacgctagctaaagatccaccgggtgcgacgtcataagcacattgggaacgtaaataattgtaaccatatacatataaaatgacagcaatggaatcccaatcctctgcttttatttgtaaagtctctattcctcgatgatcgaagcccaaagatctatgaaccacctcatgtttgactagccaattagataaccaaccctgctgcattatcttgatctctcctcctttgtataaatatttcgcagttcgaatgcaagtttgaaatattgccctgctctttctttttctgcataaagagcccctcctaattcactaatttgtaggaagatactggacttttggattttcaaaaagttgaagaagatatgtctaaagtagatggtgattgatagagcaattcttgctcgtaagttccagtatgagtactgcgccgaacataaagcttgtgactggtagtaaaacatcgatttctcttttgagatagagttcgatcctcaactatttctcgcgatatcttcttatgaagttttgttagggcatctataaccgcctccggtttaggtgggcagcccggcaagtagacatccacaggaattaacttatcgactccccgaacagtactataggaatccgtactgaacattccccctgtaatagtacaagctcccatagcaatgacgtattttggttcaggcatttgctcatataatctcactaaagaaggagccattttcattgttaccgtaccggctgttaaaattaggtccgcttgcctaggacttgatcttggtttggtaccaatccataacgatcaaagtcgaatcgcgagcctgaagcaaattcaatgaaacaacaaccatatagaaggggccataaacaggagagtcttgaccaattcgaaagatcatttggtgtagttgaaataacggaattggaagttgttcggtcaagtataggaaattaatataagaatgaataactttctcaatggtttattttctttcttttatttatcttaatattcattccattcaggccattccaatgctcgcaagcaagcacgaaaaagcttatatttctaaacggaaacgcccaatacatcgaaactcattacccatggccagtcgagaaaaaaaaataaaacaaacatggtttagcgtattcggaattgtaaccaagcatcctgggttctataccagattcaacactagagcatgcagccgatcctggatacagaactatataaagtgtgcagtgagggatctttattggtagccagtctttcacttccgcctctccactcccatgcctttcttggtcggaccaacccaaccggcgatttccgacaagtctttctgcttagagcaagaagcggaaccaaaatcaagctttctttattttcatttatggataaccaatccattttccaatatagttgggagattttacccaagaaatgggtacataaaatgaaaagatcggaacatgggaatagatcttataccaatactgactacccatttccattgttgtgctttctaaaatggcatacctatacaagggttcaagtttcgatcgatatttgcggagtggatcatccctctcgaaaacgaagatttgaagttgtccataatttactgagtactcggtataactcacgcattcgtgtacaaacaagtgcagacgaagtaacacgaatatctccggtagtcagtccatttccatcagccggccggtgggagcgagaagtatgggatatgtctggtgtttcttccatcaatcatccggatttacgccgtatatcaacagattatggtttcgagggtcatccattacgaaaagactttcctctgagtggatatgtggaagtacgctatgatgatccagagaaacgtgtggtttctgaacccattgagatgacccaagaatttcgctatttcgattttgctagtccttgggaacagcgtagcgacggataattccgaatctacataactagtctagtccaggagacaaatcaataggaaatgctatttgcttcttaagaagaagaacttttttgaaatgaaagagtttccacgggcgtcggatatcatttcttcaaataaggaagaagtgttatcgaaggatttccttccattcttcctagtatggaagaagtaaagaaaaagtactgcgtctcgatctatacgaaagggcactggttttttctttcggtttcattgatagcagaagagtacgctagctagcggagcctgaaaacgcttgcttgcgccccaccccgtaagctgactctattgcctatgcttgctgctcgctcagtgtcagtagaagggaagaaaagatggtcacttcttttaggaacacggcgagccttacttacgactgttgcacttcactcgcagctcgttcattcacttgctcatgaactcgctgcttcgccagaagcgactagtcgcctcctttcctccgccgaaagatgcttagccagaagcgacgaaggaggggagctggggaaggccgacgatggcaatgagggggaagctgtcgtagaagctttgccccttgctttacagaaattgttatgaacttactaaatgaccttatttattctcccggaacgctagcaaatctaatagttcccatctgctcttcttaacttaagaacgaaggtccttcttattcaggaaccctttgtttgaggggggcgtatccccggggaggggagagtggccgagcggtcaaaagcgacagactgtaaatctgttgaaggttttctacgtaggttcgaatcctgcctctcccacttgttgtagacttaagagaagagaaagtaggcggaagcctaggagggccaaccgagcgaagctctttctttttttggccgtgccgtgaagtgcaattttctcgtatgcgttttagagaggttgtcgaaaaaagacgatctatagagattccccatctatatccaatcgagaatagaagcgagtcgcttccggcgtcggcttgtagtctctgcagtcggcacacgcacgcgcccgccatcatgcctccttggttcgggacgaagccaagcgaggcatacgatagacgaaggaagcgcccacccagcaggagggctaaaacctgtagttttgaagttgcaaactccagcttcgaagctggagtgctttagccctttagttttgaagcaagaatcaccgtcttgagcgccttgcgcgctcaagaacaagcgatgagcgctttgttgcgcctgtgcggatacgttttcttgctggggaaggctagtttgatcgaggattggggaggagaggtggaataaaaagctcgggatggattttggagtctttgtgcgagccgtatgcggtgagagtcgcacgtacggtaaggaggggggttcgcgtctatacgtgtagtgtggtggttgggcctacccaccctatttgttccatgatctatgggtctactggagctacccacttcgatcaattagccaagattttgaccggatacgaaatcactggtgctcaatctagtggtatttttatggggattctttttatcgctgtaggattcctattcaagattactgcagttccttttcgggcggctgtaggacggacggccccctataggtagtagggtaggatgggtggtaccgctcagatagcggccaatcctcctaactgcgcgcgggccgggcttagagcgcgtgaaactcatcactacctcgtaagggcgttgagaccatagcatgttacacaaaagcgccgctttctcaggagtgttgtcacacagctgcccgactagaagagctactcgctctgtagtgttgtcacacaagataagcacgccgcccgcctgctggccgggcgaatcgaagttatcttccggtcaactgtccacccagtcaagtgcaaaaaacacagtggaatcacgcaacgcacgctgctggtgtgcttcctgcccacgaggaaagaagagcgacaaggttcagatttgactgtttgcagcatgggagctgattacccaaaaaatccctgggaaaaagaaaagatatctcggtaacgaaaaccataggaggctgtattggcgagatccaagggttcccagcagcccaaaagaaaaaccgcctggaagtccgaggacctttagtaccgtaccgaaccagcagccttcgcgccaagcgacgaccgcccttgtccctttcctttttccattcagcctacttcttagctttgttccgtcagtctaaggcaaagcttaagtggttcgcctaccttacccacttgatgaaagggaacgaacttcgtttccttgacggttttatggatggattcagtcagcctcactccttccttttgaaaagtgacgctttgcgtcttcgcttccgagggttagggtataggccgtttcgagcaagctttcgctttttctcccggctttctacaactttcgctttagcttcgcgacccctttccggaatttgaagtattcgtcgccctaccctaagaaagaagtcactataaaacagcttgccctcctgaagtaccaaaggtgcgcggagcccggtgaaaatgaatatgtttgctactgaaagaagcctgcctattgactaatattcgtctttagaatgaaagtagctatgaagcccaatctactgtcgattcaaaagagggcatagtcgtatgggtggggtgtttgtggggagctgccttggatatgaggaattcctcaaatctaaaaaaaatagaacaaaggcaaagtccgtgacgaagatctttcttttctatcaatagatagaaatgagtgttcgttataggggataggatccatctgctctctctctattttctttgatgcaatttagagagaaagagcagtgcgaactagaaaaaaaaagataatcgggagatgattaaaaaatagatacatagacatctaaagtaaagggatgtatatattattcctatatatatcatctatctatgaaaaaagtaaacagagttcgtttttgggttccccgaagccccgaatggattggatcgtttctgcttctgccaacgaaatgaaggcctcgccccttccgaatgcttctccgatcctgaagttctcgcgaagagaataagatgcagctccccctccctctgtctttttccgctttgctaatcttcccctctaacgcgggccgggccgggcttaggcgggcgcgggaggaagaaagaaagtcgaagagcgtcttctcctttgtccttttttcagtgcaacacaggaaagcaccctctttttgtaatccctgcagcttcccagaggcttttttttgtattgaacgcatggcgtagctaggacccctccaatcatgtttgagcctatgttcacccggggcccaaaaaggagaattccggaatgcctgccgacgttcagataaagtgcatatcccttaccactaaaggaaaggctcgacgaagggggggggggattttccgggtaaggaaaacgctttcggagattgagatgtcgatttgtttttcatcgaaaaggaagaaggccgaggggatagctgccttccttcgggctttgcctgccgacgttctaataaagaattccggctcggcccgggaaagcgctggcaacaacataaagaaaggggtccatgtagctgctgcgcccgcccactgagcagcaggttcggcatctactacaaaagagagaatccacttcagataaccacgtctctgctaggcagcgtgtggaatggccgggagcggaccaaatggatatataatccaagccgagagtggagttacgtgaacagccgtctgatggaaaacaactttcatgttcggttcagagagcacttttttcgttgagaataagtccttcccttttgtgtgaattccccagcggcgaattaacaacttgtggggccctatctattcaatctctcgagccccaagaaaacccccctctccctcggactcaatctctcttttgactctatatatgtgggcacctgatatctatgagggttcacccaccccggtgacagcattcctttctattgcgcctaaaatctctatttctgcaaatatgtcacgtgtttctattgttgcttcctatgggggtacattacaacaaatcttctttttctgcagcattgcttctatgatcttaggagcactggccgccatggcccaaacgaaagtcaaaagacctctagctcatagttcgattggacatgtaggttatattcgtactggtttctcatgtggaaccatagaaggaattcaatcactactaattggtatatttatttatgcatcaatgacgatagatgcattcgccatagttccagcattacggcaaacccgtgtcaaatatatagcggatttgggcgctctagccaaaacgaatcctattttggctatgaccttctccattacaatgttctcatacgcaggaatacccccgttagccggcttttgtagcaaattctatttgttcttcgccgctttgggttgtggggcttacttcctagccccagtgggagtagtgactagcgttataggttgttgggcggccggaaggttgccatgagtaaggttgggagaccgaaggcagttttccgtgcaccggacacgtagcttaccgaatcagttgcaacacagatgggaatgcatgctacgaaagacagggtcgagtctgatacatcaaccgtcgactccatatccttgtacgagtccacaatcactacacgagatgaacctgggtttggtgaatggaagttggccttaggtgtaataggactcccagttactgcgcgcgatcgtatactgaggtgctccccgtcggttgttggaacgacgcgagccgggccgggccttgattcctttcataaagatgaagggacagaggtgactaattccccatctcatttggggcggaaaacgaatcgacatctcgatgtgatacagccctttccattttcgttgggaaagaacggcgaagtccatccgaaccctccaatgaagaaataagaggagagcaaagcgccaatggcgcgcgaagcgcatgcggaaggggcacggagaaataaagaagtgtggaggagaagcagccgagctcattcccttcgcttcctgggcccaaagcagtgctttgtttcctggccaaatcaaggatttggggctgattgcaaaagatatctgaatatcaagatagatccatccatctatccagatatctaaaaaagaatcgatttcgatttcataaaacctttgattcaaagaactgcgcttagcccccccgctcatgaaacggctctgctgcaatggatggcagagggtccgtagtacccgaagcactggagtgatccagtagccgggaaggggcctagaagtgcctactactacaccacactacacttggctctacacatttacagagcttacccctgtccagtgtctggcagaacgttgggggcttcaatcgtcgactcgttatccccatctcagcccaggctaacggagcctgacttattcaggggagagagtggagcctatcgaagcactcttgagagtaagatccttggctcctcttcattctctacaggggtctctgcccacatggaagcggggcagagatggataagatcaaacacgggaataagaagcattttaaatgcctttttgatcattttgatagagggggatggataaagtgggcaaaacagactcacattttgaaatcgaaaagacctttttcgtctcgacaaagaaagaatcatcttgaaaacgctcctaaccccttcgtagggccgtgtatagtaagtgatccgaacccgcccggagcgagccccccttagaggcaagtgaagttggtgagccgtatgatgggcaactatctcctgcggttcggagaggactcagctgttagttagtacccccttggtttcggggtggaccctttcactctattttattatatacgcttagtgaaaagaatgttttttgatagacctaggacatggattctatatgaaccaatggatcgtgacaagtcgttactactagcaatgacttcctctttcattacttcatcctttccatatccctctcccttgttcgatcttactcatcaaatggcactcagttcatatctgtaaattcgatcattgacaaggttcaaagaaagggtggactgcaggtaagcactaattaaaacctccgcatttccgtgattcaaaaacaagaagggcgtacaacgcccaggtaatatttctttgctttcggatatgcttttcaatatcttcacttgtgaaaatagaaacacttgcactttctcgcttggaaaagaaagactatcctcgaagtaaatcaatctatctcgtattgcccaatctggatgctaaaggctcgtcaccccgggaactcgcagcccatcacaactactcatactaggagcaatggccactaggaggactgaaacgaagacttctatacaacaggtaagaaaatacttcaacggaaagtcaatccctgccaaccgtaatgacttacttcttccgtgagcttcttcatgttcggtcggtagaaaaaggcttaagagctaaatagagaaagtaagtttgaagtctggcttgggctaggtaaagtagtcaaagtagcttgcttgggtttaagaagtagttgaccaatctttctagctccattgcgaaaccacgcccaaaaagcaagatgcgaaccaagaacattcacaatttgatcccatctttcttcacttgcttccttcctttctactaaactgaattttaccctatttcagtaccacttgataagcccggatctgtctgaccaataggagtgaaaggtatcaagagatgtcgtattaaattcgaaaaggcattcgaatctagccaaactaagttcgaaatcggagtacgtgcccagcccggatgaaggaagaagcaaacagggggattagtcacatcaattatcattcatgccttgctcaactagatcttgattgcctgtttcattgataccttgaggaagtacaggaatgcaagcaagcgaggccagaacaaggagagtcaagaaaacagtagccgtttactcacaagctaacacgaagcacgaaacacatggattctctgagaaccggactgacccaaccaagcaatcacttgagccattcacaatccatgataggagaacttctttcactttatatgattaaacaagtgagtcttccgattccgtaccctctggtgaagctgcatttacgcgagtcggagtatgctattccaagaacaatcacaaaagccgtgcttgtttatggggaaaagaaggataccgatgattgttcaccactgccgcctactccttcttgtctgtcaatcaagaattgacatagataaagagttgatagttgatgtgagtgatgcacaggggaaagcgctactatgctccattaatttcgtatgagttagttattggctggcagcctgtgctacaatgctcttgctagtgtgcttcagcgttgctatccatcttgtacaagggtatgaagcccgaccagaaggcacgggtgaatggagttgagtttggaggtctcctgaaaattgggtcgcacaactctacctgctggtttgagcacttttctcatgaataattatgatgcaactacttcagaacttgttctccctggtagaggacgtattgctgtgagcgccgacagtgttcatagggtgtttggtctaccgaatggtggtgatcctgtcccttatgagtttgattccactgcggatgcctttattgattctccgtacggacttacgggaaagcaggtaccaaccatacagggagccaactaaccacctattgtaccccatagaggcagcctaattaccacatttttgagagaagaaagaactgttgactgccgaacatatctatttgcattttgataccatcttccaccggctgcatcttgatctcttagacgtctatcttactcttgatttctgagtgcctatctcgattcttaaacaacctctcccgtccggtcgagtcaagcagcaggagcgagcccacaagagcttttactgtaccagttccgaatatgagaaggggctcgcggattttaacaggttaggcttaatctacccaattggaaatctcttgcagtagcttttactagaaatccatttcttccacaaagctcctgtgacctaaccatctagatagaagcctcgcagtttgcaaagaaatcaagcttctggcttcaagttcacaagtatgaaaagacctgagaggaaagagctgcgtagagagctccggattctttagcaactaggagagcgacagagcttcttttttgaaaaggctaaatccctttcttcaatcccaccttagttcgatggaatgcaactagatgaaattactacctttcttcattcaaggactaaatagcggttcatatggctttctttaggttgaccggaagggctctattgaacaaaagcacaaaaaaaggtcttattatttattcaaagaactgaacaatattgtttgaatccacctagttcttgcttactatctgaattaactgatgggacatctttcttggtcgtagtaaacctttgaaaaggtcctatccaaattttacattataaaaaaccctgtgctcataaaaagttatgtaaacccacatacatatacataatagtaaaggaataaaaaaaggataaaaggtactgtacgtaggcgctgctctattgccaagggtaaagagctcttttatatatagcgaagaccttccattttctacgtgaaagcgtaatctgtttcccgaaaagcggaagggtaaagaaaggcaggagctgcagaccatggtggtcaaccaagagtcgcaggagatttttatggccaataagctggaggcatgatcaaatcgataccaacattcaagagctgataagggtaaaaaagagaaacgaagactgtaagtcaaatgaccatcagtcttcgtttctcttagactgagtgtctctacctggggtgggtttaaccccctctaggaaaactagagccgagaccggttgctatctattctttcatgacgtgaatatgtgatagtatactttataccctaaatctggaatctaatctttcatgacgtgaatatgtgtggtgttagtggactgacagagtgagctctaaagctagaaaaaaaagatccatctgcgagtggttcgactttttcctaagcaaggacggagccgtcgagtgaggattggctgagcgtgctttcgctgctcgtggtggagtactctcagaattattcgctctattattgcctcaggatgtgatcgggattaagccgcgtgtcgatacccggggggggccggactcaagggattcattctttttcgcactaatggaggacatgaattctgggcaaattatctatgttacagtctattaaaaaaaggacttctaataagaaattcttctgctaaagaataggctcgcctataaatagaagcttcggcgcactctatattttgcgggacaagaaagaaagagtcaaagccatggatatcgctgcaagactatcagcgattcctcaagaaatcgctgatatagaaaacactaagctcgaactagagcaaatgctgggtgtcctcggggagcctttatttctggctttcgtcgatccagcagtgatcatacaagatgatatagttcttgttcagaaccaaatccgcattcttgaaaacaggaagaaggcgctgctggaagaacagcaatcgctcatcgtgatggctgcccaccacggtgactaaaatagaaaaaggtagttactcgtctatctcaacgtaaatgaacgaagtcacttaaggcttcctactactactgctccttcttacttattttcgttttttcaggatctaaagaagaagaggttttcttagcgggcgtgaatccggtagcttctacttctgttctgttgtctcacttatgaggagctggtacttcctgatcaagagtgtagtgagcataagtattgtcttgttcagtattttcttttcaggtgtggtgtgtagagatatctcatgtattgcctttatgaataatacttatgtattgcctcttcttcttgttgtagaaaaatactgatgtattgcaaagacctgttgttgttttatttctttatgtcccaaaatgacaaagacttgaaggtagtcagaaacaaagaactactaaaatgttggtagattttatagagcgtatagccaaactgggatctactcacaagggcgtgaaaacagtttacttttcgaatttctcacgattcgatctcttaatgaagtttttagccagtcatatggtcgagtacaccatcaaaccgctgatgaggaacaagaagctttaccagttagaaattttgaggaaaaaagggggaataagaaattggtgttccatctacgagattcatacactctactccctaatagtatagaaacattggctaagactttatgtccgcacttaggttcaaaaggctcaatagcacatgacgaagttcaagtgtcttctcttcaggagaatagagcccaattgttggattatatggagctggatatcagtcttttaggtgatgtgatgcttcgggctaaatcaatttattggactagatacaatgtggatatcggggtatgtttgacattgtcatcgctagctataaaaatatatcgaatgaagtattacgatcaaaatggggcctatctatattccaagtagtaaccaggatgcattcattcggcgtggttactatggaggccatgctgatacgtacaagccatatggtgataatctgtattattatgacgtcaactctttatatccctttgctatagaaaacatttcacaggctccaatccatttgtgatctttacaacagatatcgcaagcaagtaaaccggtggtcaaggcatttgggctgtggggatctgtcaaggctctctgagtacctgatggggatcgtcatcttcgtcccggtggcggtgctggcatggttcccatttgtctcggagttccagacgagattgctattcaatcaggccttcagccgagggcttcaaagctgttagagaatgcgctcttatcactacagggacgcgagagaaattcctcgaagggagtattaaagggatgcggcattccctcaaatagcagttttttttgtctaaagaaaagttgcctattaataagcagtcttccctctttcataaggctctaacttgcgtaaggaatcaaggagctacagttgtttcccgccccttttgtatttttctgaacacaagttcaccgcatcgcgcctcgtgcaccttcaatttcaccattggacccttctcaaatgccatctacatttatccccaatcctccttcatgattcgtctcctcaaccatctgtaggcagtcgatcgcctttacttgccttcgattcttctggaccgccggacaggtcagtcaacccttgagctgtactgaggggttggactggaaagcatactttatgtgattcctccttccccattgtcctctcctacccgcctttcccacatccatcaaagggatgctcgcttgtcaagctatgtgctttctttcctttcaaaactctatgtattcatttgctttcttaccaggcctacccaggaaaggggtatagatagaaggagggatcctccgaccataggtctattgaatcgaaaaaacactattttttatccagcagctgcttttattttctctacgaagagagtggctagctagcttctttgccaacttcgagtgactgtgactactcttactggccgtaactcacagaagaggcaggaagactttttactcaaaattgataagcgatcaaaccctttgttgtaaccttctcttgcacccttaggttctttttccaataatgctaaaaaccagtgaaattcacctcttcttgttgtttggttaaggatcgagtgtggactttcgtctttatcaacctgcggctaaggagaatcaagcaccatttagtggtttgttcttagaccgactcaagcgattgagagtaagaacaagaagctacgtacggctataaataaagataaaatcagtcttgggaaggaaatctcaggtttggccatgcccatttatgagcaataaatataagaaagagcatggagtgcatccaagggtgctacaaggctacaacacttcatcgccaccaccagagttcaaaaacaaagctggggaatgccattgattcagttcagtatcatggtttctttttttattgtattgaaaccattgaacagaaaatgggtagaaggattgcgggaagacagtgaaattcctattggcaggttggggccgggcaagatcgcagtttcctgatggattgccaaccacttaacgagaagtcccatgacgaagaatcacatttcactgtagagtgagtaagcgctgctatgaaggcagcaccggagggatgagataaagaggaaatagtgtatggtttgagtacaattaattcgtttcttacgcgtgttcctgtgtctgaatgacgcagtaaagccacacgaagtggctcgctattgcaagccgtagtcactaacaacaccgatttggagaggttgaccttccttggtaaaagagcttcattagtacctttaataatagcaatggcagcggcttcggatctaggaaaatgagggggggcatcatccgcatagagaagacatggcttaatgccctggagaggtgatctcagcagtcccgctgtgctaattctttcaagatcggattcaggtaaagtaagaaatccatcacaagaatgagcaagtacggggaaagcaggtcttccagccgtagacctcttactcttcttctggcttattaacttgtctttccgctttgtcactctcgtattctgaataggaatcggcaagcaggtacaaccaccctcgaaaaatcgaacttccctccttaccttacttaccttagtgtcttttacctaacctactcgctcgccgagctttttttatcttggttattggctttttgactcaagttagagcttttctttcctggctttttcactcgagttgtttaattgttcgcttggctttagctcatttttttgtccatttcttctctttacagatcccctcgaagtaggaagaagaatggcaatgaaaaataatagcaatagtcgtctcgtaggtgcaggtgctggtgaaagaatagcttatggggctggagtcaaaggagctttcatagacatagaaatcataatagaaagagcaggcctgcgagcagcgagtgccctttgtaagttgcgagcctgtcaaaccataggcgccttaccgccccccctttcttttttgaattagaaagaaggggacggggggatgaaagacaaagaaagagatcaggttatttatgatcggagaaaaggaaggggcgtggttgatgtgtcactggggaacccgtaggaaggggagacgcccggcctcattcacatctgaaatcgccaacatgaacacaaacgaaatcgtcgaatttcgtatagaaagaaaaggaaccacttctattctcttttcttaggtatatgaagaattgctttttggtccctttcgtccagtggttaggacatcgtcttttcatgtcgaagacacgggttcgattcccgtaagggataggtacttattcccggccggcggtatcattgctgagtgatcgctcgctatctggcttgaaaaggtggtccgggagctttcggagaaggccgaaaatacatttatcctttgaattactctggcattccatgtttatcatgttttctgcaccgagagaaaaaatcaatatgtccatagatttagatgatttgattaattgtttgcacaaagagtacacgtttaagtattcaaaaattgtgcataaaatcaagcaagaaaacggatgcgcgtgctaacgctttcgcgctagtgcgctcaatccgttgcttgtttgaggaattagtcaattctattaaaaatggtaattatgaaatgaaaaaaatagacgacttggttgatttgacttttccatctcggcgggagggcccaggttatgtaacgaaagacgacattctttgttttccagtcttagaaggtgatcctacttataggcgccattttgtgattcccctcgaggatcgtattgtcattgatgcgttatcggatgttttattaataaaagcgcaaaagtttatcgatcctaaggtccatatttatggaaaaactgtgatgtctggagttggtaatgatataggtcctggtttgcggaatgaattcaattcttggaatggtgtcaactcagtagcagtcttcgatattcatgaggttctttcacgtgtggacctaaatatgcttttttgaaacctaaaaaaaagtgtaaatgcagatcctaaagtgtggaaatgttttttgagctactttgatgtagctaatgagctacggcagagtatgtccgaatatgatgcctttaacgaacctccttttcgtggattgccgctcataggttctcttccggtcgttttactaagcattttgagttctctggattcgtacgtgaaaaattttataggtgattggccctatgttcggctcaattacgagttgattttaaaaatatttggtgccatagatgaggaaccgtacctcgaattatatgatttttttaaaaaaaacgcaatccaagtcgattgggtatggctttataaccattcagggattcattctctacgcactggtttcttgcatttgcatatggaacaagtcttcttttcggaatttttataatcatagataggacgtagtcttgctcgatcaggaccctagctttattgcgagccaaaacagctgcgctattctgttctacaggtagtatgaaatttccccttcctccaccactttactagtctcggcaggttgttcttcctctaggtctctccattcccaaggaagcttgcttcttcgtgggctataagacattaacaactggctctcgagtattcctatcatcaagtttttctatttccattataaagttcgcgggtataagtcaaaaggttagctcgcttatttggctaaaccatccaaacaagaaaaagaaatacggcaccgacatttccaatggtagtcaagttcactggaataggttctttgagctatgatccaccactgtcgaatcagcagtaacgaagtaagtgaattattcatcgagaacttcctatggcattcagccttttccttcagcttagcgccctcactgctacttctctctattaagctgctctctgggtccgtccataagcatgcatactggcgctctcttattggctaggcccctatctaattagcgggttattataacaatataaaaataagataatgtttggagttcaataagctctttgcaaaagaatagttcctgctagtgaagtacctaaatagtgcaatctcttgcatcgagaatcatcctactggataaccttcttgctttgtctttcccttatcttgctagctctataccagtgcttgaaataggcatttctttcaagttcaaaaggttgaaaaaggctgtagctcaagtatgcatggaatagcacagatagcggataaagaatagtttagagaaggaaagccagtagagtatgccttggtttaagagaggaggcatctggtataaaaggcagagcaaggaggtttgaactggtaagctgataagcgagcgtcggtattggctttttgatagaggaaaagaagtatgttgaaaaggtccccggatatgcattactttggtagtaaaggaatatgcgtgagaggactatttcaaagaaagaccggcctatggtaattcttggcaaggacgtagtaccggtattagagatcaggaaagtagttgggagtatgtatgccggcaaaaaagtacccacaccttcttaggtggtaaaagatctttttatgaaaaaaatacatacattcttataggtcaatttatctcaatcgatgatattgtttctgaatagttgacctaaccaatcaaagctcccttgactagctttccagcatgcgctactactgcctacctagcagtcacctcttcctcctctattccatttctagtgcaatatctgacttcagtagaagaagagtactccccttcataatgcttccttcttcaagtctttcgctagtgaagtttgggaaagctagtagggaactgcaaccagagagagagttctagtgagtccagactctttctttcgttcatcaaagcgaagcatggctgcaatcccaaactcatccttttttcttcttatcattcgcaatgctactatggttttgatgtcttcttgtgtcgctatctgaggtttgagatcaagggaatagctaagcgtgtgggttgaagtgagtaaagatctgaagctaaggtaaataataggttgaaacagaagaatgataagaataaagtacctctctgaatagctactttcttacttgactttctgatcaatagaaaaagacttgctgtcctcaagttcaaggccttagagtgagaagggaattacgtggtacctctcttttcaataagcattctaccactaactatgtgcctggctatggtttgtcaactcttaccttttggtatgagaacggatgctggaggtaaatggatacacagctactgcctgacttctcagatttcagtatggaacaaaaatccatcttggctagctattcgggaggacttctccatcggatcagaacatgaattgaagggcatacttagtagatgcagatctaggtactcattcttcctcagatggggaatgggccaagccgatccgttgttggcactgaaagtgcatttgctagtttgaaagaagctgaatccgggtgggattcaaaatgattcttatgtttcgtagcatgcagcgcagactcacttggtaaatagccttccctaaaagaggcaaggtgctcacacatgaaattccctttcttcgtgcactcatttactagatagtcaggaaccttcttttgacttgaccagcttacttgtatagtatagtagtaggcctttgcttctgaacgaccttacgaatggatcaactagaaatgaatcggtgtcataaacgaatttagctaaccgtagtagtaaatagcgtgacaccaagcaatcgatcaaagccaactcaaaagaaagcccatcccttcatccaacgtgaaaatattctcaagaagaagccaaaagaaagagaggtgaaacagagtagagagaatcgggtgcttccagtgattagttatcagaaagcactgttttccagatcggattcgatcacagtcccataagcagtagggaccacgagtgagcatgagcctatttcgtgatcggctagttgctcaaaaaatcgtataaaaatcaagcaagaaaacgtatgcgctttagcaacaaagcgctcatcccttgttctttcgcgctagttgctcaatccgttgcttgcttctcttctgtcttggaaaagtgaggatttcctatctgatccaagggaaggaagagaggtggaaagtgttgctgtgtcaaatcgagattgtgtgggtgttcagtctaccgctcatgttcgacgctatcgaaaatcatgcattggatggatgcccgggcattgagaaggaaggacgctttcagaggcgaaaggccatggggagagagagcgtctgtgatccatggatctccgatcgggaaaccgtatccaagctccgtggctagtctgcgctctttggacttttcaaacttagcgaactgaaacatctgagtagctaaaggaaggaaaatcaaccgagaccccgtt

SEQ ID NO: 28425 - DNA, 23769 bp, Oryza sativa
  unsure (1)..(23769): unsure at all n locations
tatggtgtaccggttgttatgccaatagcagcgccgggcagctaagttggtatggaagaactgctgcgccgcgggaaatccttctctatacaagttctcgtacgaggtttttgaacagaacttcgataggcgagaggtgtaagcaccgcgaggtgtgaagcgatctcgtactaaacgaatggaactttccaaccttcgagaaaaggtcccatccttcaatatcatgattgggtcaaccaggccagatcataagtgaaatagtttgatctggtcgaccaggtcaggcccgatcaagcgaatttgtaaagttgtaagatgaatcgcctttttgtactatttatttcacggtttttcgggaaaatcttttttcattttcccagcgtcctagaattgcctttctgttttttccttctccttttgattttcgtatcattattattactttggtttcttaatagggggatgattcatcgtggaacccgttcccccaacgaattggattttcatttttttttatttttgtttacctataaattttgtttagagactgtttttttagatgacggagagaatgttttaccaaatccagcaggggatcaggctcaacccgcggatgcaccccttgctcctgcagtgcaagtccctgccattttgaacccaccccgggttccatcgatcccgtcatccctggatccagggagaacgccagaagatcgagtacgagagggaacagaggcagcagtcacgggctgctgctcgtcttttgtcgagtgtctctgttctacctggtgcgatagcttttagcggggcgcagatgtaggaaggcgtttcttgcctgctttctgaactgcgtccctttcactccatgtgaaggtagtaataattcttttctttaagaaagggatcgtaggtgcgtgaataataatcttggttggtggggaataggtttttgacgaataagtaaagtagttgtgattagtggtataggtcatcaagcacctgggaataggccctgcccaagcgccctcccgagatcggactcgagggagggtaagaccggaacgaggtctagcccgagtggaggccaccctcgaagggaaagcaagcactttcgaaagcaggaagtaggtatggtttcttgagttggattcatcaacccggaacaagagtggaggcgagcccggatgcagagatagatggtgtactagggattaggttaggtagctataagaggtagctggtttcgaggtaaggtcagggcgctacagaaatggcagatactacgttctcccgccttgatagatagttctgctagaaagcgctcattagaagtcgagaaaacatggtttctggctctttctttgtcgtaaggtctagagttggacaaccatcatagcactcgcttaaacagatctctactgccttagcaattgaaagcaggagaggtagttgcgttgcccttaatgtagcagtcaaaacaagaatcccttatcaagcaaacccggcactccttaactaactactgttcagttgaaagtaggtggatcaatagaaagcctcttcaaccctcgtcatcaagagcaatctgatctcgctttgattcatcaacaataggatgaccgataagatatggttactggtctagtcagctcattttactttcggagggcttgtcttttttcttagacttaagggagcaagctagaatcctgcttttcccaaagagagtgggatgcgtctaccaacttgtcctctcaattgaatgttaccaacttgtccattaatagtaaggaacccagggatatcgggacgggaacttatcgataccgatacactcaaagtcttgatttgtctaataacggatattgaacggtattcagcgagggctgctgtcatttcatttctatcacgtaatgcaagagagccagcagtatccaagtcggcagggcgttgaataagcactactctcctaatttcttattttaacccatccacaaaacaaaagtagtagtgaatatttcaggatcaatgttgaggttgtgtgctagcatttggtgcattagggtcttgaaattctcaatgtagtcctgaaccgatccagtctgcttcacatgagttaagcgccggatcagtgcctgatactgcatcttttaccaaacctaagacacacaaagtcacagaactcatcccaattcatactctctaccttattttctacagattgtaaccacattttagcttgacccgtgaaatacatggtggagtaatctttccaagtagtgtaaggagtgtggaacataagaaaatatttatcgcaattcttcttccaccatcaaagataggaaaatctggcctattgggtgccgatccactcgatcctatgctatgcatttgtgaccaaggcgaggtaagatcatgaatacaagatggcgatgagtcatgccaagtttggggagtgttgctcgtaccctcattgcatgttttaaaatagggcatactgcctgtgatttactattgatttccaagtcgacacgagattctatttctttccctctacactatgtacttacttttccggctatgcgagagagactttatccttggtctataggcacaaatccagtagaaaataccaatccaacttcctcctaaaatcacttctaacaggcgagcgtgacttgtgcgctttttcgttaaatcgagcaaatggatgtgtttttccagccactgagtatctagggtcattccctttaccaaacattggagtcgctgctcgctcgaaagcttttgctttcttcggtactggtacttcggaatccggtgccaagctttctgatctctctccgtgaggagaaaattcctaggattgatgctcgattagatagttgatttgattttctattactagagcttggcagtgaagacagtgcagcagattttcgcactaccggaatgggtccttatgattctcaaagaatgatgaggggcaaggctgatacctcgcaggtgatgctatcaactgtgaagaggcttcgaggcaagatctacaaacgtctgcctcggctcgctaccaaactcgtaagcaaacagcgggacgtgaagcaagccagctacaggtgctagacggctttctcgtcaaagagcgttctatttctagggtcggccgtaaaagacggatttgtttataactgacccatttataatataccaccaaactagtcactcatgggaggcttcacttgtgaactacaattcccgtactacgtagtatgattggttgctcaactgccccttaaacgaagaagacccctgggccgccttgcgaaatacttactgctcaaaagcgaagaaattaaaatgctttacctctctcttccgatgaatccacttcacataaacataataagtgttttggcatgccagcaagcggttgagactttcgttattccaaatttacgaagggaaggttccgaggtatcggaatgtggtaagccagctccacctagggacatcgccggacggtaggcatcggttgctctaaaacttctcacctggttttcctattgtcaactttccttacgcaagcggtcagtaaagaaaagccgagtcgagtacaagaaaaactaatagcttcctttcgttatctgcatctgctttcctcaaaaggtctagctttgccaaaatcaatagtttagttggttgggtcctgtcgatcaagttataggagctgcttgctatctatcaaagggtagaaaaataccacgtttgcattgaaggaatgtcgcaggaagctgccgatccgcgatttcaagtagttcgtgcttcggcggcaggggactataggccatgaaaacccaccccaggtatctccacctgtggattgagagtaaaaaccagtgaatttcgtatctcccgctggcacacgatttctattacttttcttgtttcccgtttcggagatccgataaaggaatggtaaatcgatatctgggctcgagccagggtacttatcctcccgtctataaatcaatgaccaataaaagaccaaaggggtgataaatcaaggggcggacaggagcagcatcgtagctaggagcaggtgtagcaccgtagctagtaggaagaagtccagcatagctacattccccttcgggttggcgcccgtcttctccaatagaaatttcatcatatcaagggctaagctatctgaaaacctactaccaatctgaatgtaaaagaagaactaaatactactatccatgagatcatcataacaaaaactagaattgcccagctaaataggaatagaaataaatccagggtaacttgtatcatgagatgggtcaattccaatttgaattccgtacggctacaactctttttaaacgagtcgaagtccagtcttgtcactttccccctttcttatcctcttttttatccaacctcttttatgtattcttggctatcagaaaatccttagaataaaagtttgtcagaagaagaaaaaaaggagctcaattggcattcattcaaataaagtttcacaaacaggaggccttgctttcgcacggggagagagatagcgatgggcggctgctgtcttgtcaccgtgttcctgtataccgataagatgatgaatggtgatgcaggacagtcgaacttatcctttattcgtattgtcagctataaacttgttatcagatctataagggacacaatcctgtggtgaaagccgccatcaacattcgcgtagagaggtgcttcccaaaaagggaggggaaaacgagatgattgctttgcccagtaaactatgcttgctctgatgacctggcctttctcccgttaaaaggtgggtacctttccctaaatccttctcccgtgcatgctattctcctgttcccccgaagggcggtatcaatacggcaacccgaaagctcgttatcaaagtggtctcttctcaaaagcttatctgccagatgaaaacaagttcgtagtaacaaggggcaaaacaagcaggttggataagggtgccagtgaagaaatcaagagaatatgctttggagtattcatagaaagaagtcttcctataagataatcatctttcctttgttttgacattcttgatgtattttccactgtatggacatccttctatctttgtatcggtagcctcttcaaagtattgctttaaagttcctcatgaagacagagaaccagctgactactataactccccatctcatccctgctgctgatccgtggtaccatttctctatggggaagtgttgattgattaatgatcagaaataaaaagaatgcagagaataggatccacggctatgagagaaagcaaactatactagcttcctgctgccgattagttgaagggaaagttaaaaatagtcttaagaattatagagcacgacagcattcaaatgaatgttcttaaaaaacaatatttttatttatcatattttgactagaacttcagttctttcacttcgacacgtcttccaactgatgataagtcaactcaacaacatttccagcttagctgccctttcacttgcttctgccttttcactagaattaagatagtgtcctcccagaattgagaaagaagagagaatacctatgtgctgctatgcctatggtccagaattgctatccgtacgaccttggtctttgattgtaaaaaaaatacatactaagcaagtaagcctgcctaaaagcatttctttttgacacctctctcgatttgaagagattacacatcactgcgaacttattcactcttcgaagcccccaccaccttctttctttgagctgagcactttacttcggctgtggtcattgcctaccggtaaactcccatacttccttcttttgttcgagggaggccatacatcttccttctttggttggatccaggtcagaaagttatagggtgtgcgcaaacaagtctgaattaataagaaggggcagtacactacccatttgggaattggcaaatcacagtcatacttcttagagtggggtggagcaccagcaccttaagctgcaccagtatcttagtaagatagacaccgattaagaaaccgagaagtctagattatggggactctataagtttttctcagatttcctgtgtctgtactactgaactttctaccctgcatattgtatgtatccttcgcccttattttctgttctgagaatccgccttcacccttcggagaaaacatggtggccggagacaaggtatgtagattaatagagttgctcttacttttataatatatcattgatcaaaacttggttcccatggatgaagtgtttgagtagacaaaagaagaagaagctgtagaacaacactagaatgattccaaccgacatacccacacacaaacagactaagactttgtagccccattctgttgagaaggtgcaatctatataccaagttgtctttgaggtacctcaagcacaacctcctaaaagaccatgtgaccatcagatttacctcacgatagtcaacctgtgaatcaaaggctttataggtattcacaccaccggttgaaatttatgccataatcaaggagtgcccagaatggtactctacaacctagttcatgcctcaccggctcttcatgtaaagtctctagtgggtgcgagcggctcccgcaccgggtcgggtctgtagtctgtcgttttgaccaaaagatgaagtttggttaagtcctccaaatgagtccattcgcctcgttcacataggtcctttccacgagggccaaagtgaacccaaagtcttgtgtaggcttttttgtttatatccaatccatgtggccaaaacaagatatttagcagggatacagacgacgcgattcctgctttcatagtttgatcaggtagctgaagtcgtggtgctgatcgcgtggtttgcctcttctctcgcggccgtgtgttggtcagcgtggtatggagtagcggttcctcggtagtctgactgtttcgatgcagcatctctatctttcggtacatcccgggcaggccttttctaaaaagtcttgtgctcaggtgcccaccaagatttctgacatcttagcctcctagttttaaattctcgaatcgaatcaattaagaatcaattcaaattaataaaagaataaggaaacgctatctcatccctattggtagcggtttgggccactactgccaaaacaaaccctagtttgaggaaagaactgtgggttctcaaaatcaagtatcgccgggcctagttattctcttgccccaacttatgcggggtacgaatttttcgagttggatcagtactataagcctaagtattttattgatcaggcggcacccagatttgaactggggataaaggatttgcagtcccctgccttaccgcttggccatgccgccaaatccgatctaaaatcgagaaaaatcttattcatccacattattttactaattattgttcgtaggaggggattactaaaccctttttttttcgtcgaatccctttgtacttatccctttccaatccctttgaagaaattcattccggtttttttattggacccagttttattctcttcgattgattgtatctcaaaacacacactgcttaaataccttctctttctattgaaaagagaaagggtttccagtcacagactgaaaaatttaggacaaattggaaccattaactatattaattaactatattatttgttattttgatattttctatttgttagtagtgaacggttctaaaatgggtattgtatccctttttcctcgatcgtcaacgagcaagaaaacggatgcgcgtgctaacgctttcgcgctagtgcgctcaatccggtgcttgtttggatgtaagagatctcgtttgctggccgggcccttccatgagtttagatctctatgtatgaatctcttattcaatcccatactttttctcatttcagaacgatcagcatactgtgtgacttctgcgtgacagttcttgcatttcgtttgttgctttgcatgaacatttagatattggaaagcccttaattaggaatttcatagatagagaaggacgggaaaaaagagagagactgactaactacccggatcaatgctgattgacgactgaataaatagccggaagcaacaactgcacgagagagaaagagcggatccaactaaggaaatgcagtacctgttctgccggagctaatcatgcaaagctagcgtagcgccagccgtcgaagtgaatgaattcgaaagaacgaagaagtaaggaaatgagacgactctttcttgaacaatttcataagcagatcttcccctccacaccaatcacgagtttttttttattcctctcgtatatcgtcgtcacgcccttaatgataggttttgaaaaagatttttcatgtcattcccatttaggttcgattcggatccctctgttgtttccctttcctcccgaacctttttctcgaaatgataaagaatctggtacactcgaattgtattatttaagtgcttattgcttgccaaaaatcctacttctacaattggtaggtcaccgggttattcaaataagtcgtgttttctgtgcttttcccatgttacaacttccgtaccaattcgatcgatccggaatggatcggttaaacattctattagggagcccggtcttgactcttctgtgtggtattcattctggttcggctcttggaatcacatccagcagtggttggaacagctcgcaaaatccaaccacttcacctactttattgcccccaaccgtttcccgtacctctatagaaacagaagggtttcatgttctttcatcgattgggtattcctctccttttgtatctctttatccaatttcggtctcgattagttcacaagattgaatggccaagtcatggaaaagccgttattcgattgttttaaaagaatgttgagccgggcccgggtatgtaagttcagcgatgtacaaacaaggattgatttgacttcccgcacctaggttgggggttctattttggaagaggaatagaatctcattcatgtgttcatgctaacagaagagcggatccaatacacataagactcttttctcttgaaattccgaatgtaaatgattcaaagaaagggtggactgcagcaatagcaagagatcagcgaacgaagcggagaatgatcacaattaggtcgatcctaccatagccgagtctacatccaagacctgacacgatgaaaaataagattctttctaaaagagctaagaaaaggagtacgaggactagctcaacgtatacccgcacgaaagacttgaaagagctcacgcgtattatgcctaccttggctactggtgaagatggagtcgtaaattgacttaaccaaagccatacctgattgcctacgaaggtcttaagtctccgcacgcccaacacctacccctacctgtatccttaacaaggtcgggatatccacgcataatactatctaaaaaaagattaatgatttggatggcaaggcggatgtactagtaaagatatatctttccttcttttccatcttaaaaataagacttctggcgaaaagagtggagttgagtacccttgcttaataactagttgcaggcatggcttattaggtttctgaaaaaaattgagagctctttatatataaccaaagaaaatagaaaaaagcataaaacatttatagaaaaaagtaaaaaaatcaaacattgacgacccagacgaaacaattagtgaaatcgttctatttcctccatatccccaaacatatgcctattcccgcacatgttcttactcgcatattggacttacgaagggtaagccttattcccagctatttaactaataaaaaactcttcacaatgcttaacgcccatatgttcattctttctttgcttctcatgtttccatgctcctttctggtggcaggaggcaaagaagagacataatggagataatgatggttcaaatccaaccattccttgggcgtggttcgagcgagaattcaatgatcagtatttagatgtgatgtctcgggaagcgcttcgacagcaattcgttagcctaaaacaagggagtggtactgttcaggactacaatatgaaatgcgacaacttgatgaggtatgctcccgacattgtggcagatgacttccgcttgcgacggcaatatctggaagggcttcatcccagattgacacaaataatcgaccttcctggtacagtgagactagtggatctgatggcacatgcgctacgagtggagtcatatgagcctagcaagggtcagcaaagctttgttctcaatgtaaagccacgagttgatggatcatcaatcaaggccaagtcagtcaatgaattccccgccatccgcaaatccagctaagccaaattctggcgttgtgaattacgagaaggtttggtgtcgatattgtcaagggagacatcatgagtcaacttgctacaggaagaatggcacttgttacaattgtggtgggctcggtcatttcgctagggggtgtcccaagccaaattcaaaactcatgcttgggaccgagcatcaaaccgatgacacagggagtagtggcgagaggtggcggtacacaacagccgagaggccgtggaggtcccatctcccagcgggacgtgagatttggaggcagaggaggtagttttaatgctgcaatggtgtgattcctttgaaataggtagtcaagacctagtaagtcctcaaattgaaacacttcttcaatcttacacggatttattccaagaaccaactcaactacctcccaagagaagtttggatcattcgatcccccgaaggtactgaacccattaacttgcgcccctacagatattcacacccccaaaaatcagaaatagagaatatatgtgaagaactgttgagaaattcgataattcaacccagctatagtccttttgcagctcctgcactttaggtaaaaaagaaggacaattcatggcgcatgtgcattaattatagggaactaaatgccgcaaccataaagaacaagtatcccatacctataaatgaagatttattagatgaggggcgaaaatattctcgagaatttatttgaaggtccccggatgaaagaaagtgatgtgcataaaaccgctttcaggactcaccgtggtcattttgagttcaaggtgatgcggaatgacaaatgcacccgcaacttttctgaatttgatgaatgaaatattcaaggagaagttgagaaaaggggtattagtcttctttgacgatatcctagtatacagtgacgggatggagactcatttgaaataacttgaagaagtgtttaagctgctcaagaaaaacaaacctaaactgagcaagtgctctttcgggatgggacaaatagaataccttggttacatcatttctgaaaagggagtagcaactgatccaagcaaaattgaagctatggttcagtggccagtgcctaaaaatgtcaaggagctaagaggatttttgggtttgactggttactataggcggtttgtgcaaggatatggtggcatttgcagacctctcaccgaattgctcaagaaaggaggttttgaatggaatgcagaagctcaaaaggcctttgagcaactcaagagagcaatggtatcagctccagttttggaattacccgatttctctaaaccattcactatagaggctgatgcatctgatttgggaattggagctgtgttatctcaagataaaaagacaattgcatatttaagctaagcattaggagttataagtttggggttatcggcctatgagaaggaactgaactaatggcaattttgatggcagtgtctgtctaaatggaggcattaccttcagctgaaaccatttcttataaagacagaccaccaaagtttaaaatacttgcttgagcaaagattaactcaaccactccaattcaaaaccctaaccaaattcattggactcgatttttagattgaatacaaaaagggaacttctaataaggtaacagatgccttatctagaagggtaagagccagagaagtagagttgaatgctgagattttttgcattatcatcacaaagaactggatttttattatttcatatcttcaaggcaaatcgacccaatccagtggctgatgaagttaagttttgaaccttttttttctaatatccgttgaaaatttgtgtgtttctgcttgagccgtacgagatgaaattctcatatacggttctcggaggggggttcgggttagttacctatctcaataaagtatatgattggtttgaggaacgtcttgagattcaggcaattgcagatgatataactagtaaatatgttcctcctcatgtcaacatattttattgtttagggggaattacacttacttgttttctagtacaagttgctaccggttttgctatgacttttgactatcgcccaaccgttacagaggctttttcctcggttcaatacataatgaccgaggccaactttggttggttaatccgatcagttcatcgatggtcagcaagtatgatggttctaatgatgatcctgcacgtatttcgtgtgtatctcacaggtggatttaaaaaaccccgcgaattaacttgggtcactggtgtggttttagctgtattgactgcatcgtttggtgtaactggttattctttaccttgggatcaaattggttattgggcagtaaaaattgtgacaggtgtacctgacgcgattccggtaataggattacctttagtggagttattacgtggaagtgctagtgtgggtcaatccactttgactcgtttttttagtttacatacctttgtacttcctctgcttactgccgtatttatgttaatgccctttctatgaagcaatggtaccaatatgcaaatccacttttttaaggatctagagctggagggtcgacctcttttggataagatagcatagggcatgccccgcccactcttaagactaggtacccgtagactagtttttactactcaaagaacttccctatgcaatggtgctttctagttcttatctgcacctacatttaggattaaccctattcttgataatgggaatcacgaacatatcataccaagcccgccaagcgggagaaggggcgaagcgagaactcaggaatgaatgaaccaagaagggttcaagacaaaagaattctactcagaatgttgatcttctgaccacgaaactgagcaagaagtccatccgatagtgggggagatcaaaaagtacttttttatgggcagaggtatagctatcaagtagaagtctttcgctgtgactagggatagacaggagatgatccctcggttcgtctgagccggaccggagtcgaatacttcggatcctgcatctgcttcagttgattaggtgcaaatgtgccttttggaccgatcctacgaataagaggcattaacaaagcatttatgagacaccatactttcaataggcaagggccagcccgaagatcagcgggatctttctccaagctaagtttcgacccccgagggaaccggccacgatgcgtgggggtatcggtgctgataaacttgtctccgctcgctcccctgctcgttcaaagtattccactcgctaggatcttagtaaataagcttgctctgaccttcctagctttgagagcaatactacctgtaataacacaatgaacttatcctacttagggaacagactggcatcaaggagtccaaagcatcggtatggctcgagtgaaaaaagagaaagactattgtcgtccgtcatttcacgccctattgacattatgactaagaatagggttgcccattcctgccatggtccatgggatcttcgagttgcgagttagcttagagttagtttaagaatcacaggggaaggcaaaggtagataatctggttccacctctttactagagagccataagcaagatttctataactgaccgttaagataacaggcataaccagaagtatagaaccttccttttacaagaaggagggacttgtgattggttttctacagggaagagagataaaggcaggcgacaagaaggcggtcacttgctgtgagtaaataggggccaatggctcttccttaaggacgaggttgaatctccaatcctaagaagacctattacttgcagcagctcctagtactaccgggaggggccgggataccgaacttaggtgggaacttttgctattgttcagtgaagattttctatttatttgatgagtctaggaacctatagtatagatagtttctttttttagtgataagtccgtgtcattctttctttttcttaagaagaacatcgaatcagagtctttctctttgtaagctactggttcaaccaaagctagtctttccgaagccttcgttcttataattttgagatagccaaccttattttttttcgtggataagctgctctttcgaaaagagctctaacatcagcagctgggtcccaaactcataacacataacatagcagatttctttgatttctagtgccccaatgcgccgccataagggaggaaagaaagctcaagcatcataagccgcccaacccccttcccctttacagcactcctttcgcgccttgtagctctccttggagaaggataagaagcaggagacggataaaatctatataaatagaatgaggcgagtgatttctttaagaagaaaaaaccaagtgttcagctaataaaaagtaacataggtcagcgctgatgccgatcaggtaccaaaacccagatgtaaagcaagatgtctatctacgatattactgaacctgaagaagaaaagaaaggccgtatgcacctgtagttaaagcataatcagttgcgttatacatctatctactgaacaagataaatcttcctctccaggtcgactgcatcacttcactaggtatggttgtttttggttcataatggtggtctaggagaacccgaaactagagcacacacgggatatgcatttttttttatggtttgtgattgttgcaaccacctctcggtttttttctctgttgctgatccagatatccatcttcttgcttgcaggtcggtccattgtatctccaaattgttgccttgcatgctgagctgctgggctttcagtctcaggtccgccgtgtttcctttcaatttcatgtttttactatattttttttcataaactcaacaatagtctagatgagtggtcggcgggttgagatagtgatattcgggagttaggcgatgtaggagatcaataactcgcatctctaaggttgagctacttgcatttgcccgctttcaagagtactttacttacagttctattgaaagggaaggtgataaaaaaaatagagctgattggtcaaaactctttccctttgaatcccttaattgttgatttgagtgcagtgcctgtaagggtagcttggaaaaaaagaatgaaagtgaaatcatcatacctcataggcgcacattgcttacagtaggtctcgatgtgttttataaggaaacttttttcatcataccgatttgccggtgtgatttcattgtttattctccttagttcgttggtcccaattcttgtaatgtcggattgcaactctcgaaacattggattctcgggccgtgtaggaacataaaatccccggttcggtccaagtcgctcatgggatgcgaggtataataatagcatgtagaaggcccctagttagaaaataagcaattcttccactttctctctgttgcctatcggattgtcgcctgttgatggtaggtttgttctagaggtagacgaggcattactttggctaggtggagtgtttgcgagtaccctatctatcacattgatcccctcaagatcattttgaaatagaccatttattcgtaattacattcccggaaggccttgaacaaatgtctcatttatggatacattgggagcaaaattggaaaccctagctagtatttattttggaagattaataacccagtccctttgtttttggttaagaccactagctctaaccggccttggtttgtttttcctaaaccttgttccttgtgcaaattttcaagcagattttcttgattaggaaattccggtttcaccaagctggtattaatctcaatgagagggacttgttggtcaataccgaaagaacctacttatggtggtaccaccgtttccggttcggccaaaacaacaacgatgtcattattatgaggaaacttaagacattggtgtaggctagaaggtagcacatcaacatctcatgaaacctttcctagaaggaagctctttactgataggctagcctaggctttgattcgtggtttacttcaacactgggctcttcttaaaagcaaaaccggtcgcatatgtcgttttctcgcttcactatatgataataactcctagtatggcacccaatactgaatggataagcaattggggctggtggttcccactgtagaatgtaccagcactgggtcaaagaggcctgctaggtgagagcctttcataggatgtgccgaaaagcctatcatatcaacttacttatacggaatggaatgaatttcactcccatgacttggagatgggaaggccgaccactacactacacggagagatttctataccaagtcatgagcgatagcgaagccgcctataggcgtcgaaggacgaaagtccgttagacctccaagccatagcaacctcttggggaaattacgagcaccgcgttgcaaatgcacgagatcaaagaaatctagcgaagctgtggatgaggctggctaatgggacggtcatctttcgaaccaaagtaaaaggcacttaagtttcatcagattcagacttacggtcagtgctgaaaccaatggccgaacatcccacttaagataagagcccaacccacttccttttttaggactctgttttgcaagggcatcaaaatctttagcagatcttccttctgcttgatcctttttctacaggtcgggatgtcatcaaagccagggctgctcgcctttccttttgacggcttggcttcctatcgctcctatgtagtggtcggccttaaaagtatctttggaccctaccataccatcatgcatgcctatgttatagtgcgttaagcttcgccagaagcaagcaagatgatgaagcgaagcttcgtagacaaggctcgttccgtgcttgacttacgagctcgtgtagtaaggcctccgccctatctatatctatggatactgaagtgtggccggtacttgaatttttcgaaacaactttttgttgttcttcttctgagaagcctctattaacaatcagtggtaaaggcattgtattgagaagcgagcccgatgagcctagctctaacttcgggtggattgaggaatagtgctatagataagcattaggtttaggtcgcccataactgaacatagcactatcactatctgaaggatcggaaaatggaccgcccaattgaaatgataattctcgtttctcgtatagaaagagaaaacaattagggctctaactgagctatttcttgtgacacaatcgatctgaagaacaatatgcgcagagcgcagccttgcttcttcatgaggtattacaaggatgactaccacctggaatcactcaatcagcttacttgacgataggaagtgatggcaggcaggatacatcacaaagtagcgtagcagggaaagaactgaacagaagagatccgctgcctactatacaagacaagtttcccgttccggtttcggcttgagggaagtgcatgaaatcgattcaatggaataaaaacaacaggagctattcaaccatcgttagaggcaaaccttagaagaatgctggaagaagaggaaagctgattgataacacttaaccaaacatcgcaaggacaggaaggagtatcctgaacgtaaggccaatggctagcatacttcgctgaacactcaacttgatctatatcgatagacacatctgagagaatcatagttccccctctggggataactagttcttctcccgagtccttgttttgtatgagataacagcagtctttgcttaaccgagcatcgtagggcttacttcatcacacatagctgtctttactttcgtttcgctaaccgcccaaaagcaggtgcgcacacacaaatgctaggcgagatacgtagttctctcaacccttcctatccatcattacagaccggaactagatcggattaggtagagcaagaccttgagcctcttgagaaaccaatagaaacgacagtagctagcttcaccagaagaggaagaaagacttctataacttcacttccctattgagtagaatgcatggcaagtttccactgctttaggctactctactaagactcgagggccgacttcacgtaactaaatggcttaactaaactaaaaaggaactaaactgggagaaatcagaactaaaggcgtactgtactttgcttaacactcactatattcagcaaaagctggatgcgtattatattatatcttgtcgggcccttcttctttcttctttgaattccgatcgtcatccaacataccagtaacatgtgatgatgcacccgaatctactgctctgtgaagagttggaaaggaaatagggcggtgggtaaggcctatttcagaattttgttgatccccattttctacttctcttatttacgatcagctcatttcttaatttcattatacatctttctttgacggaatgcagcatttgctccaatgactccctctgttcatcattttgtaagtggaacgtgatgggattgtcctcctgtatgggtgggacatgttggtcgtccccggggacaatctctacctccggctccgggtcagggagcggggcgttcaaatctagatccaaaatctctctactcggtggagcttcgtccacgggcggaagattttgatccaaaaataagagttcgccagcagaaagtgcaacaccacttgtataaagaaaaaaatgaaggaaagtgacaaagtcctcacattcacggaagtaatggtaaggaaaattccttacttttccatttctttggaaagctcctactaagattagaaattccccaataaagctgctagtgccgggtaaactcatattggctaaagtgaaaaagaagaagattatttcgacttctacagcagacagcacccatctccatagtggagaggcagatgaggaccctgaaaaagttgttgcggcaactccaacgagaaagaataagcacaaaaaagtagtaagagatcgtttggggacgagcctcctactcctagaatgtattttccgacgagtttagatatactcttggagagacaataacatgatcacttttggacacaattatgtgtacttctgctctccttggattagagagactgatcccaactggccttggccaggaaaaacgaagaactttttatgcgatctacaaacgaatgagatcagaaagataggcggacgacttgaccataaggtcggatgtttccgtgagcagtaagctgcggatctccccttttttgggggaaagctggtggcccttttggcgtgttaattctttcgacggggcggccttcttcgttcggtagatccggtcgaggtggttttcgtttaccagcgcgtaggtggtctaagttcctatgaccgagtctttctggcccctgtgaacatattttcttaatgtattaaagagggcctctctaaccggtgaaaagtggtaggtgtccactaacggctattcctggctcggctccgataacgcaattccgggaggagtcggtagttgggcactggatcccttcggacctggagaacgtgtgacactgggtcggggtttggtgaaccaacaggtcgctcctttagttgaagtatcgggcccctttttcgttgcctaggttacaccttcggaataccccagacggggattgagctctattccccccaatcttcactttacgccacgccgactctccgtcgtggaattagaccaagggtcgaagacccataccataggaccccgtcccccgtatcttatctttcgcgcgtaggagatcgagacacagccttagggctatggggaaagtagatcgattgccctagaattacaactacatagagggtctctacaagtctataaagaagtttaaaaaaattgatcggtagtagtccggtcgcacccgaacaataatattccagagggaaatgcacctaagatcaaatattttgagccggcttccgtggaaaattcagactttctttttgatgctgcgatcacataaaaacataaactttgaagctcaatagctaaatacatggcaattaaatcatgagccgggatcattaagagcatactgcgagtaggaagtggaattaatacaatgaattcagaagcatcaaacctctctttttcgaaagaatcgaaacacatcgaaatggtaccagccgtacttaataatagaaggatttggcagaaatatgtaaaattgtccctcctaaaaaaattattccagaataaatgggcaatagttaggagaggtgcgccagcggcgagcagaagcaaggttattagataccgaaggaaagcccggccagaaccacacgtgcaagtttccctgcatgtggctcgtccgtgataacttcttcggatttgcgtgaactagcggaccgatcactaagtggttagtacctccagcatgagcgaaccttttcagaactggttaggaatgggcgccactatcccagcccggatccagccaggttctattgatcatgtccccttcccaacagttgtaccttgtcttggggtctttggctttactatcaccggaaaaataaaagtctttctcttcccgtcccgggtcatagtgaggcgaaggtgcgtccacagaagaggaaatcgcaatgcatcttgctcagcaggcgtagcttggagtgggagtgttgcgggagtaaggtaaggaaagtgtggcctaagagaggaaccaaccagggccttttgagcgctgctaagctaatatgcgccagagaaagaaaaggaggtaactattcggtccggagcattgattccccctaacgaataggctaactctatctctcaattgcctatcctgtactcgagaaggtcccccagttcctcggctgcaccttgaagtgcatttagttgtctaactttagactcgggatattccccactccatggcatctttcgcttatccattcagcccgcccgcccagacgcggcgccctttcgcattatcatctaccgccctttctttcctcccgtcccttcacgcatgaagatcgtcgtatgtatgttcgacttcggttgccggtgcaatagaattggcgggagtatattatggcaggatcagtcacctgggcaaaccaaccctcctccaagaagaattgtgctatgcccccccgatatccctatagagcgaaagagctgcctggtgatccctaggttgcagcacgtccggtcgttaactcctcgctagctgccgccgtttttaggaccgaccgacgcctcacctgcatgcacaggtacctacgtagtgtagtgtcggtcgcacattcataatagcgttcggactcatgtgccttcctgaaccaggggagttcccttgctcctgctgcgtacgattagccagccttgcggcggcaaaaggattaggacgtccccccatgctaaggttccctgcggtccggccgcattaggttagggagctgggcgataatagctcctccgcaccccaagcgcgctgccctcctaggcgcgcaacactaagtaatccaagccaacccacattactaactaacggtggataatcatctttcttagaggtactaaatacaactccatgaatgagcaaaatgaaggttgcgttaatgataaagatctctggggaaaccgctaaaaaaagattgaacatgtggttccgagtttcgataacttcttcagctttcattttcaatactgatcgtgaaacaccatgagcagcaggatgttgaggtccggaattcgaagtgaaattcttgatttgcccgttcctagtcgtcatgggaaagaaataagaaagatattattattccttttctcttcagctatgtcgaagatatttacttatttgccgctccttggctgtcaaaccttccaattcgaatttaaaattccaccccctctctcgaactgagctattccgatgataaatcactaggacgacataagacagacacataacctacgtaccacaatttctccttaggcgcatgtctcgggcagatctggagcgactggattgaacagaaagtactctcacactatagaaaaagtcaagtccactaaaagtacatgcactcttttcttacacttatagagtttcgaagaaaagtactctcacactataggtagatggctaacatcccgggctacgctatctacgactactgccacagattgaatgaattgtgactgagctcgaagagagagtttattgctttacccgcgagacagtttgaacctcgataagtcagtgtagtttaggcggtgactcacatctgatatgagagataatatatatgcaattcgttcgaacttgcttagtagtgaattgggaacaagaagaaaaagagggggccatggaatacactattgtagtagctgaaatggcggattcccctgctacattacaatacctcgctccttatacggccctggctgagtattttatgtaccggcatactttaataatttatgatgatctctccaaacaggcacaagcttatcgccaaatgtcccttctattaagaagaccccccggctgcgaagcttacccaggggatgttttttatttgcattcacgccttttagaaagagccgctaaatttaattctcttttaggggaagaaagtatgaccgctttaccaatagttgagactcaatctggannnnnnnnnnnnnnnnnnnnnnnnnnnnnnnnnnnnnnnnnnnnnnnnnnnnnnnnnnnnnnnnnnnnnnnnnnnnnnnnnnnnnnnnnnnnnnnnnnnnnnnnnnnnnnnnnnnnnnnnagagtaggatccgcggctcaaattaaagccatgaaacaagtagctggcaaatctaaattggaattagctcaattcgcagagttacaagcctttgcacaattcgcctctgctctcgataaaacaagtcagaatcaattggcaaggggtcgacgattacgagaattgcttaaacaatcccaatcaaaccctctcccagtggaagagcagatagctactatttataccggaacgagaggatatcttgattccttagaaattggacaggtaaagaaatttctggatgagttacgtaaacacctaaaagataccaaacctcaattccaagaaattctatcttctagcaagacattcaccgaggaagcggaaatccttttgaaggaagctattcaggaacagctcgaacggttttcccttcaggaacaaacaacaattttgcatgtctactcttgttagtagaggagaaatcgttgagaaagatttttcatttgaatcatgcaaaaaagttttcttagtttttagtatagttatttaaagaatag

SEQ ID NO: 28426 - DNA, 4474 bp, Oryza sativa
cccgcttttctttcgtattttcttctttcattttgtaaacaacctggtagcgaagctgcagcttgataattcataggggccatggtgtcaaaaccgggttacctaactagggaaaaactgttccgaagctcttccaaagcgtggcaggctgggcagcttttaccgaagcggaccccccgcccatagcaaatgtttgttgtcatatttcaatctagggggctgcggcacaacctgggtgtggagacatgaatgagtcgaaccctattcatcatgacgtaatgtcaaagaagtggctcggcgaggggctttatgctgattcaaggccgaaggacaaagctcttcctcttcgtgcttgtcctaaataatgatattcactgaggtgtgctggctctgcttcaatccgttttcttgctccatgccaatcgaagatgaaccattcaccgagccgagtatgtgcaagacaagacacggctagataagtcaaatagaagatattgcttttacacgagcaactcttaccttcatgtaggtacagcccacttttcctttgatgaaatgcgaacacaaacttcaggcatccaagaaagaagtcaagatcgaaatcgaagcattgtcattgggttgaagatcaattcatatcgacaagactttccattcatctttttgttgatatttggattccgttttcaaataaagtcatcttctagttttaaatcacctttagaatcatcagcctctgtccctacactgactcacttatccgggatcgatcctcactacggtcctttatttcgaaacgaggatagggctctcgcggaacgaggtgtagattgagaagaaagatgagcgtatggtccatactcactcgggttcaaacttattcttcttttttttccattcattcaaccttatatatttgatccccttctcccaggtgcgagtctattattgaggaactgcgagctccttttctagagcttccttcccatttaggcggggtgttcaaaggggttccaccgtcaacttaagttaaggaaccccaactcccaatttggcatttacttcttgtgtttacagctcaaatctctatcgtcgtcttgacatccaattccttacggcagagacctaaaaatacccattgccggctttacttttgcctgtggagacggggtgtggcataccttcccaaaagcatacgggatcctatctttgaaaaagcaaagcgtcggctagttctattctaacctgactgacttcctcaccaccaccgcttacggctatttcacgcttatttcattcgtagggccaaaagaaagagctccaacggcggctaaaagctttgaagctccttctacccttcctgtgaatgaattggataaaagcctttatgcccgagagtgaaaggtgctccagcttgcttggtgaacactgacttactgaagaccggaatggaccaatgtgacattgactcaagaaggtagacaaaaaggccaactatagaaaagccaagctgactgaatgaaataccgcagttcactctgactccggttcggtacctactctatatctgaagattgaccacagcgtaatgccttaccgctttacaccttgctttccttattttagctactttacctcagaatccctctctagagagaattctctttcaagtttgaattgttccattaacccatctactgccaacacaactacttcttttctcttttcacaaataccttcttttctctctttgttggttaattgagtagggtattctagtgaatcgtacctgttttccgacaggaagctttggctgaaaggataggaatagctcttgcgcaaggaatataaatagcgtacgcgtactagtccagggaatataaaatatcttacccgtgagggggaggcaaaagggaaaaagctagtattttgaaaagggtatagtagctggtattcggattgagcagtgccataaaaggaaagcgttgttgtttttcctgttcaaccaccccaacttgtgacgtataacgatgcaggtatctggccagcattgaccgttcgagttgatgagcggaacccagacccatgccaactggacacccgcaacgtatgtccacccgccctttcctttgataaatcctattcctatcgatttagctgcataggcaatacgacgttactacgaataaatgacgagcgaaccctcgaaaaccgaatcgggattatccacttgaacagatgggaaacacaaagcaaggtatcattgtttataaatgtatcgattagctctgttgataaggatcatgatgaaattgcaagtacggatggattgagacccgatctgttccgatcctttggcatgggaaatccttccttttactctctcttttgaatgagtcgtggtgcgctcatcaagaaggggaaagatggatgggaaatgcttgtcaagctcggttctttaaagaatagcatcctcgtcttcctagtgaaaagcgcattgggattctctacttgtggtggtatagtgctgcttttagtgatttggagggtgcctcccgtgggcatgcctgctacgctgattaagcgggtaggcagatggattgatctactcgttcaacttgcttgtgttggtgagttgttctattattgattggtcgagcccggaggaagagtggccttgagtttctcgatacataacattgtctaaatcaacccaagtcgcttcttcatttctctaaacagactggtagttgggtgagggatgtttactattgattggttataggccttccttccaagcatcaaagaaagaaaagagcaaagcaattccaacataaactgacactttaggatcctctaagcctttctatagaacccctaagtagggaaggtactaaaaagaaactcaaaactagcactactaacacaggctgaagaggatgacctcgaaaaagaatacaattaaagatgtggccttccctccaagcacatatatggatatggagcactcttttccaccctatccttatatatttcattcccgccattgacagcaactcactcttttcgaactgcactttgaaagccaaagccaagaaagaccatatcaactactctccaaattgcaggataagtcacagaattcaaatggaagacagaaagagaaggcaattcaaacctaatggccaaacattacgaatccaagacagaaagacttatagccataaaagaataacaagagaacaaaaacaactccatattctactggcctgcctctctgatctactatccaactgccatggaagcaccactgaagactggcttctccgaccttccacccgatcctgggcgatcccggatcgacaagccgacggtatggattccctatatatggatggtaggaacgcttcaactgcagagccctgaatgcgtcagtgaggttccctctatgagagaaagagaggttgctaatcttggatcagacggcgtgttggtattattgataaggcttggattagcaaattagcaccgcttgagtttaggtattcgaaatagcgaaatacataaattatctatctcaagtcgactctagatccccaacttatcttgagccatcagtcagattaaaagcagcgccctgccggcagctcctgacctctgttcctatgggagaaagaaggtgtggctttggaccccaaactcttccatgacggccttcttccactcattttattagcaatcaaacctcttccctgctcttgcactgaggtaagcattcaaatagcaaagcaagggaaaaaatatggtatgtatttttttaatctacatacagagaaagcggatgtgcccttattagcgcagttgaaaataaaatatataacgcgtagttgcaagctttctttcgtgagctagctatgtttgcttcctcttttcctctctgtttcggatgtcaacccaatctctgattcaagtccataagttccttttttatagctcctgttgctcttctctggctaggatctcacttatatggccttttttttcttttatatattatatagtaagcttcaatagatagcgtagtaggtgctgtctctatttactttctttcttacgcctaggtgctaccttctttccagttccgtaagtcccatagagttattttttatctttgattcccaaacgctgcgcgcaagtcaagcttacagaattcctgccggggcgccttttttcttatgccagccaagtagcaatcagaaaaccaatcaatcttccttacactacgacaattcacttgaactaccaacatcatgagtgacccaggccggccgtatatgcgtcatttctcctcatccttgtctctatttgttaattgctcgctacccgtagtgggccttgagtaggatttaagcacgggtttcgaaccgtctacttttccttatccttatgggaatttaagagagagatcactcca

SEQ ID NO: 28427 - DNA, 682 bp, Oryza sativa
acccgaacaataatattccagagggaaatgcacctaagatcaaatattttgagccggcttccgtggaaaattcagactttctttttgatgctgcgatcacataaaaacataaactttgaagctcaatagctaaatacatggcaattaaatcatgagccgggatcattaagagcatactgcgagtaggaagtggaattaatacaatgaattcagaagcatcaaacctctctttttcgaaagaatcgaaacacatcgaaatggtaccagccgtacttaataatagaaggatttggcagaaatatgtaaaattgtccctcctaaaaaaattattccagaataaatgggcaatagttaggagaggtgcgccagcggcgagcagaagcaaggttattagataccgaaggaaagcccggccagaaccacacgtgcaagtttccctgcatgtggctcgtccgtgataacttcttcggatttgcgtgaactagcggaccgatcactaagtggttagtacctccagcatgagcgaaccttttcagaactggttaggaatgggcgccactatcccagcccggatccagccaggttctattgatcatgtccccttcccaacagttgtacccttgtcttggggtctttggctttactatcaccggaaaaataaaagtctttctcttcccgttcc

SEQ ID NO: 28428 - DNA, 680 bp, Oryza sativa
aatctagtagcatcatcaatcaatgtcatgaaatatcgtttttcacccttcgtcaacaccccattcatttcacaaagatctgaatgtaggagttctagtggtgccaagtttctctcctcggcagccttgtgaggcttgcgaggttgcttcgattgcacacaactatggcacttagaacctttgacaatgaaaaacttaggaattaaacacatgctggaaagccgagacatcaagccgaaattaatatgacataaacgtgaatgccaaacattagcctcatcatccacactgccacaaatatggttcacagacatattgcagaaatcagaaagggaaaagcggaacaggcctccgcactcataacctttaccaataaaatatccatgtttagacacgactactttattagactcaaaaaccaacttaaatccgtctctagtcagacgggagccactaacaagattcctgtcgatagaagggacatgctgcacattcttcagctgcacgatctttcccgaagtaaacttcagatctaccgtgccaacaacatgaacagaagcatgtgacccattccccattaggacggtggaaccccgtgcgacctgataagaagaaaacaatgagatgtcagcacaaacatgtacattggccccagtatcaacccaccaattagtagattg

SEQ ID NO: 28429 - DNA, 542 bp, Oryza sativa
atacccaatcggcgatggactttattctcggcgcggataataaagagcagcagagcaaacttacgggctggctcggtgaaatggcgtcctattactcagctgcgcctgttcgcctgggtggggcaagttccacacctgttgccgggtgattctctcaaccttcagtcggcgcaggataccgataacggctactcgactttgaacagtcacctgctgcgttatattgccgctgggcttggtgtgtcgtatgagcagctttcgcgaaactattcgcagatgagctactcgaccgcacgcgcaagtgctaacgagtcctgggcgtactttatggggcgtcgcaagtttgtggcatcccgacaggcctgtcagatgtttctttgctggcttgaagaggcgattgtccgccgcgtggtcacgcttccttcgaaagcccggttcagtttccacgaggcgagaacagccttggggaatgccaactggattggctctggtcgaatggcaattgacgggctgaaagaggtacaggaggccgtcatgctcat

SEQ ID NO: 28430 - DNA, 655 bp, Oryza sativa
caaaatgaccatgcatatgtcctcacctttctgatgtcaatagccatggccatcctcttgctcgttgcgttgttctatcggatcaagaagcaggcagctgccatggcggccaagaggaagcaacaacccaagctaccacccgggctagctaccatgccggtggttagcaacatgcaccaaatgctgatgaacaagccggtgttcaggtggatccaccgcctgctcgacgagatggacaccgagatcctgtgcctccgtttcggtcgcgtccacgtgatcgccgtcgcctcgccggagatggcccgggaggtcctgcgcaagaaggacgccatgctcgcctcccggccatcgtcgttcgtgtcgcggacgttcagctttgggtacaagaacaccatcatgtcgccggccggtgaccagtggaggaagatgaggcaggtgctcacgtcggagatcctctcgccggccatggagcggcggatgctcggccggcgcgtcgaggaggctgaccaccttgtcaattacgtctacagccactgtaatgatggcactgtagacgtccggcacgtaacgagacacttctgtggcaacatcatcaggaagctggtgtttggccggagacacttcaactccggcgagggcatatctggcctggccg

SEQ ID NO: 28431 - DNA, 550 bp, Oryza sativa
catgcatcctgtcaaccgctggacctccctgagtcttgtgggcaatttcatgttctcgattccctttatcttttcagggttgacctcgattccttgtccggggactaggaagccgagtaatttccctaacggttctctgaatgtgcacttctccgagttaagcttcatttgatatcgtcggaggttgtcgaacgtttcccttaggtcgtcgattagcaaatcgcccgtcttggttttgacgacgatgtctaccacgtaggccccgatgtttcgtccgagttgatcaccaagtgcttcctggatcccgcgctgataggtatttcctatgcttattaatccgaacagcatcttggcgtagcagaatacaccgaagggtgtgatgaatgccatcttctcctcgtcctcttttgccatgttgatctggtggtagccggagtaagcatcaagaaaactcaacgactcacaacaggctgttgaatccactagttgatctattcgagggggagggaagtggtccttgggacacgccttgttaaggtcggtgaagggg

SEQ ID NO: 28432 - DNA, 540 bp, Oryza sativa
tgctagtaagccttgccgacaatggtgcgtgcagcagcgtggttgccatagataccaaaatgtatgtccttcagcaattgtctcccttcttctaaggatacgcaacgttgcagaattcttgatggacttttcttgtacagctcggtctcatgaataatataaagcctgctgcgcctagaaatctgctcggcttcatctttatcttgagggagttcttgggaggtcagaaatcgtatgaggggctctctccagttggcttcgaccatagctatgtcttgagtgtccgcggcttcagctgtttgtctcttgggtatggttggctcataaagatgttcgacgaacacatcagaaggggccgcttcgtgtttggatccaaaatttgctagtctgtcggctgcttcgttattgtgccgaagaacgtgggtgagttcgagtccattgaacttatcctccaacttgcgtacctcttgtcgataagcgatcatattgtcatcaaggcaggaccactctttcataacttggttaacaacgggtaccgag

SEQ ID NO: 28433 - DNA, 3188 bp, Oryza sativa
aatttaaactttctctaaattaggttctcagcgtctaatgacatggggctcattcgtcagcgcctcggagaggccaggcagacagagcagcggccgagccggcgccggcaacaaacggcggccgttctcgcgatgcgaccaaaagagaaaacatagaggggttctaggcgaagctaatggtgatgtttatccaagctatggtgactggaatcgatggtgccggcagtgcgagcggcggtggttctcaggttgatggtgcatgtgtggatggaggtcaattccgagcgaaagtgatgtatgcatgtggttttctagtctccacggtgctcaccgagggctcagatggggttgccaaagtcttggcggcagcgacgacttgcagaacggctcggcgacggcgctccacttcgggtgaatggcgacggctcgaatgggacgacgagctgctaaaagaaggcatgcacgagggttgtgaggtcacaaggtgtcaggtgctagtcggctgcatctacagagtgggttgcatctacagttatccaagttggacccaagcaagcccaaggaagagaggacagtataaaggcagcaacaacacttggaagaagcatcgaacaaaatagaacacggcacggcggtggccacggcggcgacttggttcgggcttgaaccttgttgatctccttctttctccctactcctgctagtaacttgtatcccctattcactcccatttccaccccaaagcttgagttgtagtaatacaattgcagctcaaaaccaccacaacctccattgcttgtactggatattggttcattgagatttgggtattgggttactaacaatctggtatcagaggcatttagttcactgggattcttgtcatggaattgttggggaggcagccatgaaagagggagcaggaattgggttggaaaagttctcatccaggcagcgcccaccaactgtttgatggaatgtctagccaacctgagatgcccaaggaaaatcagaggatatctgagcatgtccccaacaattccaccatgaacaaagaggagaaatggctagatgaagctctagatcggatattggagaagtttaaacaaatggaggccaagcgcatgcaagaggagaagatcaatcggatatttcaaaagttgtaggagatagaggttcgtaggagcaaggcttccgaggaaatgattgctgccatcagggcaaccaccgccatcctcaaggttgcatcatctccaacacccatggcaccacctcctccagcacccaccaattgtttgatagaatgccccaaacacaacatcaattgggtgacgacgaattcaagtcacattggtgaggtgcttgttccgacagctgaccaggagttaggagacagcgaggacaaggacgacaccccctatatcatcaccaaggacttttccgaagtcacgcatgacaagtgttcgacagtgggctttgtgatcaagtgtggcgccaaccaagccgatgacacgtttcaagccatgacgggtgcatccaaggtcgttccaacatatgctcaacctatggataacttctcgtcaaggatgaatgacgacaacaagttaatcacattgatttccacaaggtgttcggtgaaatggcatggagaagacaagaacgtatggaggtgtacaaacatccatgttgtgcccctactatcttccctgctcacctcattgctgctagtgaaattatctagagggcacatggtggttattgggcaatgtgtacaaacatccatgttgtgcccctactatctcccctgctcacctcattgctagtgaaattatctagagggcacatggtggttattgggcgattcccattgcaacactttgaacttatactatagccacctccatcatcaaaggatccaagcttgggcttaagggagtatccttgctgttcttggccaagagcacacttgatgcaaccttggccacctccgacttcagatggattgactagaggaagggaattgcatcctatgctagggtcaggattcaaattctattgcgtaggagtacatttgaaactgccatgccccccaccaagtttagaactgcaagagtttggaaatccatgtgctgagatggttcaccttcacataattttcctggatcctcggcttcaacaacataattttcaattaaggtgtagatggtggataagtgagctatttgtggatgttaaaagtgctaaagtttatgcttttggggttagttttacaattgttagcaaggaagataacctggttgttgggtgctggttgatgaaatctattggaacagttcagagatgcaactgctatctagggccatcaaattaccatttagctacctacttgaaggcacaattatgtaagcaaggttccgaaacctatgcttgatgtggagagaataacaccattgtcagtatctatttaaggcaaccaaagtggctttaccacagaagcaaaatcaacacttgtgccaccttctaaacacacttgtggttttgtgcagaaaatatggcagtggttattgtacttccacagatattctatcaagttgccatggctagcaaagtgggaaaatgggatatgagagtaatttgcatggtaatgttaggaattgaatcatggcagccagcaaataacatggtcttgaatagtaaagaggaaatgttaaatgaaaatgcaagcttttatgccaaggtgatttgtgagaagcaattagctaagggctacagaagaacgagtagcactagagaaggtgctaattcaattcaagatgagatatatccttttgatctcgtttctgcaaacgtacttgaagaggtggtgtatattacttcagggtatacttggccatgcaaatgcttgatgggtggaatgagaatgccaagaaatgttctgaatcataacacgtggactcagcagttgagtaagctagtgtgtttgctaccaaatggttggggctctttgttgccaagcaaattgcttcaacactgctatcatgcaacacataggaaggatgcaaatgcagcaagaagctatacagggtgtcagtacttgtttattacacttcatttggtggttttaatttctatcattaaagagttcgagcagccacagggtttcaaaaggattacttcattggcttgtg

SEQ ID NO: 28434 - DNA, 4572 bp, Oryza sativa
tgtatcccctattcactcccatttccaccccaaagcttgagttgtagtaatacaattgtagctcaaaaccacctcaccctccattgcttgtattgaatattggttcattgagatttgggtattgggttgctaacacaaggatggtgtcagcgcgaagaatcggactatagctcaccggacaggaaagaatcgaagatcgacgccgatggccggagttggggaagaaattggtgatctcgcgatacacggcggcttggctcgattcctttggtgtatgggctcctggggtcgaggggacgacgatggcgcggtgtcttgctctgggatggacaaggatggtcgggcgacgatgatgctgaagcggtggtgctccggagctcccgtggacacggtcgcgttccggtgtcaccactgcatgacaagaggagagattaggtggaatggatatggtattgataggaggttttggatcgggaaggaaatagagacgaccgcggcatgatggcgatggcgatggtcgtcgtctccacggccggcggtgagaatgagggtgacggagaggcagatggccttctccctcggcttgttcggctctgggttgaagagtgaggttgggcgactcagctggaaggagttgaaggcggggtttgacgttgccacgtcccgaccatgcgtcctgcggcatcgagagccagtcggcgctcgatctctccctctctgtgtttctcggtcggctggaggtgagggacagaggaaggcaagcctaggacactgctaagtgcgtccatgatgaagtaaactaggtgtaaaagagaggtgtgggtagaaacatgggtgaatatgatttttagatgaattttcggaattaatttctcctctaaatttttagcttcataacttaatgtgtggaccagattaactaatgttgattttaatggaggtagatgattatacctagattccattttctttggttgcactcaaaaattatggatagattgatcatagaaattaaccaaatatgggctaattaaaatctagattgaatttttaggaggcttaaactaagaataaaaattctagaaaaattatatttagatatgataaataatatagtatttaaataaattatttaccatgtacacttttatgcatttcaattcacttttgcgtgaggtatgttttagccaataaagaattataattagtctactattcaactagcttgacctatttatttaaggtaccaacctgagtgttaatatttgaccaaaattacagtggatagtttgtgctaatcatagtctgcataaatttttccatgattttatcttgcacaaaatattttggagaattagaatggcctctctttgtacatgtgttcccacttcataattgcatataatattattatagggattacattaaacttcttttgagctgagaagatgattgtttgagtttaatattatgtccacatgttatcacccaataggtttgtttagtaatttaaccctaacccttttaggttatgctcatgggacctattatgaaatgcgagaccaaaatctaaatgcacaagggactcgagtcaaggcatgcattatgcacatgtatgctcatttacttggtatttcaggtctaatgttgggaatgaaaaggttttattttgtttgcaatttttatttatgcaatggtttagatgggtctcacctaagttaaagtggaaatttttggctctcaaaattgtaaaagttagcctatatctattttgtctagaaatttttaagtcctagaattttgggtatgttacaaaaccccccctcccactccggtcaaagcatcctcccgccggtcagacctcggtcaaacccgcctattgactccctcccctgcctaccactttgttgttcacgtctcgtaggaattccgcagtaatataacggtcatcatgcagtaacaagacaactttctcgcagtaacaacatcgaaaaatagtcatgatagatctaattttggtaagtacttttttgcgaacatcatggtgcaaacagattagaaaaatactatataacgtgagagatattgctctctaaagatagatatttagtttttttagttctcgtctcactagaacgacatagtaacgcgacaatcaatgttctagtaacacgactactttccgcagtaacaatgttataaaagcatttttgtctcagccatcatgtagtaactagactattgtctcgctgtaacgttgttttaaagcgttatggtgaaaacggttctaaaaaataatatgtgatgtgagagatattattgtttaaatattagaattctaaaagtttacttgtactaagcttgctactatgtatctttgtatagacaaatagaagtacttttagcacttgtgttaacttgtgaccatgcacatgcactttttttaggactttgtattttgcacaagagtaagatttaaaaatttagctacgcacaagcagttgtagagtagtagtaccgttactaccatatgttctctgttaccgcaattttaccatgatgttactgcaaaaagtacagtaacgacctataaatttggaacaatcaaaaccattttcaaaattttatagaaaatgtaaaattttatagaatttgtaaaatttggaatagcagttttatttatgttctagaatttaacattcatccgcttctcggtctgttgtttctcaacatcggtttcccctcatcactctaaagtattctttgctatattaactgtcgggatcaggaatgagattcccaacctgtcactctaaagatttaattacaattaatacaacgatataatcggatcgtagattggacaattagttttggagaaaaatcgtttcgaagctcgctaaaatgcatgcatgtatgaggtggagagagagaggagagagtagtgatacgaagtttcacgaattttgtgaaacacgctgaagacacatattggaatagattactatcgtgtatgaaacaaagagtgttaatggattgaaacatatgattatttttttatcagaatataatcatgcggcatcttgtccttaagatataattacaacgaataaaacggtatgatcgcattatatattagataagtaatttatgagaaaaatcgttttgaatatcgctaaaggtgcatgtgtgtcgtatcggagatagagatataggcttggataagtgcatgtatgtcagaggcagcatatttattgcccgcccgatttttctccttgtgtccggatgttcgaagagaagcattttccccaaaaaatatacactattcggtccggtccaatcctcatacgaacatcgtgtacgcctgtccagccagatcatcctccgcgtatagttagaaaaaagagaaaaggcatgcggaacctacaaacccttgcccaatccttaaaaaaactcactagattattattacaactaaatttactatgctaggcaccccaataaactagaaaaaatcgaggaaaaaattccattgatttggccacagaaggcaaaaatgctatggggtgaacgatagcccctagcgatcagccgatcaccgcatccctcccccctctctccacatagtttccttttttgcaccgcattactttcctattttagtaaatttatgcatctaaagtttgtacaactcaagtttacacatctaaaatttagagacccaaagtttataagtcaaaagtttatatatccgattcaaatttgaatttgaattcaaatattatatgtagatatgtatatatgtatatgtttatatgtatatatgtatatatatatatatgtatatatatatgtatgtatgtatatatgtatatatatatgtatgtatgtatatatgtatatatgtctatatatatatatgtatatatatacatatatatacatatgtatacatacatatatacatatatacatatatacatatatacatatatacatatatatacatatatacatatatacatatatacatatatatacatatatacatatatatatacatatatacatatatacatatatatacatatatatatatattatatatatatagtatatgttgatgcgaaaaacacacactggcataggagatctacttaattccagtgcaggtgctaaatcttgctcttgggttcaaaggcgtgccagttggtttgatcctgtaaccaacaagaaacaaagaacgaaataaatgaggttaaatccataaacgatagccgatcggctaatggccgatgacatatcgtttatcctttagccgatgtcatcttgaattcgatcggcaatgaataataaagcaaaataagattaaatctactcgatcggctgtagatattagaaatatataatctatgtcttgacatatgtttaaatcaagtgattgggatagatcgaacatcatgccgagatagtataaatcacttatatccaaaagtacttcaagatagggattatatatactcatagcttagccgatgaagattggtctaatatgtatcagctattgctccg

SEQ ID NO: 28435 - DNA, 17138 bp, Oryza sativa
ggccatggctagcgctttttctatactcgaccgctccctgactttttctgtcatttaatttttcaaatttctgttttcaagagcattcttcaatttacagcttcaatatatacgtgatatcatacccctaataatttcacaaaactatttgtgcttctttattttattttttttcttcttcgtttgcctgctcctgggcgtgtgatactgtgattagcagccggcaaggcctaagcatgcatgagtccatgattgggctttaagatgctagcccgtgcatgcacccgtagcactcatagatgtatccagaattcgcgagacggcaagagtacccgtttcccacgctccccgaaaattaccgtccaaaattccaaagatttatctgacaatttgatagctccacgtggaccaatcagtagtggcaaacctgtcggcttgagattaatagatcaataataatatatattattttgtctttaaaatgttttttatattaaaattattaacgaccctaaataaaaattgttagttacaaaataggaaggagagagggaggattgcatacctacaatgtaagtacatcgaaaatgctacgcctcggtcgctccccctcccccacgaagcgcgggtgcgccctggccccacgatgtgttcctatctatctgctacgtgtccccaccatatactccgttgcaacaaatcacctatatattttagaaaccctctattaagggaattcgtttcattttttgttccacaaaaaatgttttacctagtgtactcacaatgtttcactatgtatagatataatgttgcagtgaattaaagtattcttttgcaacaaatcacccacatatattttgaaaaccctctattaagagaattcgtttcattttttgttccaccaaaaatgtttcacctattgtactcataatgtttcactatgtatagatctaatgttgcagtgaacgaaatattcttttgcaacaaaatcacccgtatattttggaaaccctctattaagggaattcgtttcattttttgttccacggaaaaatgtttcaactagtgtacttataatgtttcactatgtatagatctaatattgcactgaactgaaatattctttcactacttgcagaaacattgtttttatataaggtgaaacaacacctgatttaaacaattgaaacattttcgatctacttagtgaaacaattccgatatacttggtggaacatcgtgcaacattttaaaaaactcaataataagctaaaaatttttcccgtcggaatatatccatgtgtggtcttgttttaaagatttaattgtaacaaatttaatggtgcaataggatcatgattttgataaataatttaagagaaaaatcagtttaaattggtttttcacgcatgcgtggcgctgacgtcagcgcctaatttttccccaaaccatcgggcgcccgacgcgtaggcccttcttaaggacatacgtccagcttggcaggtggaaagagagttggactttggaggggggcgtggctaatgggcgtgtgatcgctgtggtcgatcaccccccatcccccctatacactcctctcctcctttctcctacccttcttttcgtcctactgcaccataaaatttttaaaaaataaaaaagcaaggttagcaaattttatatacggaaatactatatataaaaaatatttgaattcaaattcaaatttaaaatgggtatgtaaacttttgacttataaactttgggcctctaaactttagttgtataaactttagatgtatagaaatactatatataaaaatatttgaattcaaattcaaatttgaatcgagtatataaacttttgacttataaactttggttctctaaactttaggtgtataaaatttagatgtatagaaatattatacataaaacatatatgaattcaaattcaaatttgaatcggatatataaacttttgacttataaactttgggtctctaaactttaggtgtataaaatttagatgtgtaaacttgaggtatataaacttgagctgcataaatttataaaaataggaaaataatgcggtgccaaataaggaaaccacgtggagggggtgatcgctaggggcgatcgatcgcccgttagccttttcggctttgggggattttaaaaaaacaaatataatatttcaaaaacagtgggtccactcaatttgttaaagtgtcacatatttcaaaacagtgggtccaccctatttgttaaagtgccacgtgacggtttatgagtatttgtaggaatagcacgtggcggcctaggagcatttgtagaaagattaatggacttttagtatataatagataatagataggttaggttatgattttttcccttcttactacttaatttacttagcaatttttatttatgtgtatcgttaactgaaataattttttttaaattaaaattattaaaaaattatttgagataaactatgtcttgtgatatactgaatggcttggctatgtgcagcattgaaaagaatatattagataccattgatctccaagctattcttaatgattttgcttaaaaaattcgtgaaaaggacattttttacaagagacattgcatatttgtggtctcctatttaaggtattcatattacctttttttgactggaattactgccagggctttgcccagcagtgtaattttataaagattgaaaatatttacaagattacagagttacaaaaggaaaccgcaaggaagactataaggtttgtaaccaattaaaaacaaattgctttgagggatccttcattctgcacatatgcagaagaacttctttcacaaaaaatgatctccagacttggaaagaaggttgaacgttttgaaagattaaacaatttctttgcttccatatgtgccaagctgtcaaaaagaaaatctccaagaatcccctctaagcaaacttgattcttgctagggcaatcatttggaaaaactccaaattatgattccagtcaattcccaggtgctgccaacacctgatactgaacggacaggaaaagaaaagatgcaaccttgtttctctgcaatccgcattgcacaacacacatgtgaggtcatcatcttctttagcacaatgtcgtctatccagcatatctcttgtgttgagtctgtcacagaacaggagccagacacattttgttttccataaccaaatcatgtgtctgggggttgcaacgcagaaaagttgagcttatagaatttcttagctgtgtactctgaaccccagataaaattcgaagcatcccccttcctgactgtatattcagattgcttagaacttcctgtagctgtaaaaattaagaataggccacatctgagaggggtagggtaaaagaatcttctaaaggtcttgaacacatgactttcactgaatcagttttatacatggtcacagcaaaaagattggggtagctagtgcatttaaaatcatcattccatagatcattccagaaaagggcagtagttcctatcctgatttcacatttggctatccccctgaagatgtttgcaagagatgtgatatccctccaccaaaatgaacccttattcatcatcaagtgtgaaactttagaatcataatatgtttgtgagagtattcatattaccttgccttcataattcttttagttgtcgataacactatcaatattatttatcaagaataaattactatgttgcaatttccactacttgatttattatttagcatgttagtaatgttatgaaaatagatgcacaacggagacacgaatttcacgtggaaaacccttgctggaaaaaactatgggcgtcgaccggcaataatcactagaggagttgattacaaacgtaggagaataacattgggaatatcaccccttcctgtatggcatacaagagtatatatatgagataaaaataaaaacacctaatagaaaaagaaagacataaagtactattaggaaactaatcctaatagtacaacttcatcatgttgatttgcatagctatccaggacagatatgtacactaatccttctgcaatcattttataggtggaattccatctagtcggtggattaaaagaaaaacccaactttgaaggaagattcttcaagtttgctatagaattgaaatcttgcattcttgatgctgaagaatctaaatgcttcaacaactcacgtagcttgtgtattgttggtttaattatcttcataccatcctgaacccaaatatttaggatatgggcacaacatctaacatgcaaatgctgaccctcaaacatcaatgcatccttgtgattctttatcaactcttgacatgagaattgttattactggtattatctaaagttatagttatagtaaacaatttgtttctaatgcccaaatatgtcaagcaactcattatagcttcttcaatggcgaatcctgtgtggggatacttcaattccttaaagcttataattttcttcttcatgttaaactctctatcaatatagtgtgctgtgacaaccatgtcgcctatatttgaattgaagtccacatatcggatgtcagacatacacgcgaatcaagactgtaattcagcacgcaagtcttccctcatttgctcatacaagttaaaggcatcatcatgaagtgtttgacgccccacaactttgaaagttggctgcacggactccacccactccaaaaaataaggatcctcaattttattgaatggcacctctgcgtgaatgaagtatttgaccattagctcccagcttctcttgggatcaaacacgaaaccttccccagtctgtttcttaattgttgcaaggaagttgattctagcagcaccatcaatagctggacatgattcggctatgtgattaataaggtgacttctgcctgactttttggtggctgtcaatcttaagctacaatatttgcattgagtcttggggacaccatctatcatcacaacctcttgctgaaagtgttaccatactttagccctcatacgtgttcttgaagttgattattatttgtattattagtacctgaactctctgacatgacatatttattattgagtttgttcaattgtctgcatagaggaagaaatctaaaatgaagatagttgaaagaacatggtctataattatttttttcacacattgtacacgtgctacaagctaaaaattgcacactagaattccattgaccatagaattaatttgcatctcaaaatcatatcaagactcaatctgtaatgatttgttaaataatttgcatttatttcaacctatatttttgtatattatagaatgcactgtcaatcccagctctacctatttcatgggcaccttttagagcacatagtactattaacattctttattaaagaactcaaaactatcaggcagcaaatcaatataattaaaaaatcaatataattcatccagttgaactttctgaattgtgtgtagacatgtttaataagcctgcttgtgacaagattaaaaaattaacattcaactgctacaaacagccaaattaatacgaatctaattcaacccatagttgtaaacttgtagaatccactatcaatctgaagtatttccaaatcagtattaccaggcataagtcataagtcctgaaaggaatattttatatgtacagaatatttttatagcaacatttaattaagcaatatgcttgattaagttcctagctaattaattaatgtagcacacaaatatgatcttgattaattcatagtgtgcaacaatgtgagcgagtatcagcacagtgggtgcacatcaaagtttgtgggtgaataaaaggtcgacatactttcagttagttgcaaaaacattctgtgacttatgaggcaaccatatggactacatgaacaatcggattcactgcaagaaaaccctcatgtgtccgaataaaaaataatatttcttgcaaacacaacttgaaccgagaggtggaggggatcagcatggggtgcacctgcttataatgtactcaggcgcgaagaaggtgaagtcacgggttggcctggtgaggtactccggagacctcagagtggctgaggccgtgaggttgcggttctccgcttcaagcaggcgaggttggtgcagtatgatcagcagcagcaatggtagcaccatgagctaccaatttctttaggactccagtaagtattctaaaatcaaaataaatcagatttttgttcagtacatgctacatagtaatctaatgatgttccacaacagtagttgtctagttgaggccgtgataaatatccaactattgtgcatataatagtttgctgaaaagagatcataattttagactgttgttaggtacccatggttaaattagcacaactgatcttggaaaacatacaggtcattcatagttgtggccatggcaactccatacatgaaatcaatattcttatgcatgcatggtaatgaaaggtagctgcttgtaaatgcaatttagaacaaatcttttaagcatggcattcagcacacaatccacaatacatggaggagagagtactcgccggatcttgaagggagagagcattgccgaatcttgtggggagcagggacacacggcagcggatcttgcatggaggagagcaacagcttcttggcgctgacggagaggaaatggcgatctggcggagcggtgccaggagatgacgccggagcggaggacgagcgagaaccagtggagctgtagccgcttgcaaccaggtcgaagtggcgagcagcagcaacttcttggcgccgatgaagaggagatcgcgatctggcagagcaacgccgggagatgacgccggagcgaaggatgagcgggatccggtggggccgcagccgtagccgcttgcagcgagggcggagtggtgaggagcagcagtagcgacgcccattggcggcgatggtggtggcggcggcggaggtggaggagcggaggacgcgaggagcagatggcgcgaggaggaggatgagttagcgtctgcgtgtggattcagtccgtagatcagtcattttactcagcccgcatccaccccaaaccaaaccacattttttgtaagcccagtgcagtccgatccaaaatgaaatcccaggccgtttcaatccaaccaaaatgatccaaatgaggatccagcccacttaatccaagcaaagtcagtccactggtaggcctagctgtaagtttacagcccgcttctcctctctctcctctcttttctcctccaccttaatatttagccagtttatagcctactattatacttgctctccaccgaaataggaagagatgctgcccgttcgccgcctaaggttcgcgcgaacgtttgctgattagagttttcgactaatacagccttaggagtctgcttcgcgaccctatgggcttgggccgtctcggactctcggtagccccatcgtttgctcggccgagtgtgggcccatacgacccattccccactgatccgcagaaacccgactcctcgatccccagttccccacctcgtctcctcgagcgctcgccggcgggcggttcgccggcggcgcggcggagcacgtgctcctcttccccgatctcctcctccgcgtcgtggccgccaagctctagacgggacaggacgccatccatcctccaggttatccacttccgctcccttctgctggtaagcgctccgccgtcgcctcaatctgtcgtgggatcgagctccgcaccggtgcctccgatccgtacgtcggtctccgggccgaaggcggacggtggtcggggatggatcggccccaacgccggcgtcgtggccgggcttcggatgaatggtgtgcgggtgacgggcctgtagtccgtccgtccgtctgctgatctgcatcacgcggccaacaagtcaatagatagtgaactgtagtactgtaccactaccaatactgacatattctgaagacaaaacaaaccaattctgggaaattgtagacgagattccaagaaatttcgtgactcttgtctgattctgatgtccatcaagaggatgcaaagcaccaagttgggtcgtcatcagcacgtatgccaggtgacgggaggacacagtgacggctcatgatttggttcgtcgttccatcggcctaattttttccttttgccatacttgttagtagttgagctgtcttaatcggcctaattttcttcgtttagtcgtcttaataaaattattgttcgtttagctaggtgggtcgtctggtctagtgcttaatttgggtattgctggctttacataagtgggatatttaatattgttgctatgattatccagttttgtcatttcttgatgatggaacatataatggccaacatgtcaatcaatagcaggccccaaaggtagcaattgagaactgatcgagcttccaagaaattaaggtaggctatatggaccaatatattgcttgactgatagcaccgcttctccattcaggcatccactctgaccagctagcccattgagcaaaggcgagcaaacacattggttttatgatggcagcagtgaactcttccatgggggtcatggcgccactcctcaccaaacttgccatgctgctcagcaacaagtgcaagaaactcaagggaatgcgtaagaacattgagttccttagccatgagttgaccgaaatgaatgctgtgttggagaatcttgcagatatggagaagctagatggacagcagaagctgtggaggaatgacatccgcgagatggtctacgacatcgaggactgcattgatgtcttcatgtaccatcttggtgatggtaataacaaggatggcttgctcaggaagactgcacgcaagctcaggaatttgcgtgctcgctatcagattgccgacaagattcaagaactcaaggctcgtgtcatgcaggtggctgagcgccgtgataggtatgccaatctaggtgtatctacctcaagcattcccaaagtggtggaagttgatccgcgtctacctgcactctatgaagatgcaaaaaatcttgtgggcattgacggtccatgtatggaaattactcagtggctaatggatgaagtagagaatggttcgatacaacaacttaaagttctctctgtagttggctttggaggcattggcaagacaactcttgccaaacaagtatacaaccaattgaaaaaacgattcaatttcacatcattcgtgtcagtgtctcaaaaccctgacatggttaagctgctgagaaatttactttcaggaacaggatttcaaggctacggaattcttgatgaccatcaaaagctcattgacaccctcagaggacatcttgctaataagaggtatgtataaatccatagtttaactttgatgtggcattcatgttgagttcctatggatgtttctcatgttttctaatattttataaccatgtcttcatttctgctgtattgacttgattttgggcctgtttggatcatatcgaaatattgtctaaggttgacagctaattaggcacatttcccagattaggtgacagttcacttcgtagccacacttgtggcaaggttccttgctatggtccataatcagtactgacaacatgtgagcgctgcagtagacaaggttccttgctatggtccataatcagtactgacaacatgtgagcgctgcagtagaaggcaggccgccacgagataattagaggattagatatcccttgttgctataattaggggactagagaccccagttgctttctttatttatgtttccattcgagctggctttttttttattagagattcttgttaggggctatcctatagaaggatcagccatatcccattatgagttaagcatgtattgatatctctcttcatctcctgtgcacaagcacggccttgccctcgtgctggtcattgtcgatgcatgaggttcccttgctctcttgatccctctttgtgctagccacattaataagcccataacgttcttgctcattcagttgaaaaagtttggcacaattttatattggaaaaagtaagaattacccccctaaactatcgtggtcgaccgaattaccaccctaaacccaaaaaccagacattgctaaccctaaacttttaataacggacgaattacccccctcgactcaatctagagcggttttgtcctatgtggaatacgcgtggcaatccagtcagcattttgtttataaaagaagtgggacccacctgccatactctccccctcctcctctatctcctctctctcactcgtcccctctctcgcacgtgcgggtcgagcggcggcacgcgttctgcgcgcacggcgggcggtgggcggcgccacgggatgcggaggcagcggctgcgcgggacacggaggcggcggcggtattaatgagggtatcaatgagcttttgatcaatgagccaaatcttagtcaaatggggcacacttgggcaaattgttgcaaattatgttttcatatattgctacgattggatcctaaatgtgaaatttactaaataacttttctgcttcgatgttgattcttttgaatttatttttaataaattcctctagtattaatttgcggagtctactgttgccatatcctacaaaagaatttctctatttttctactattagttcaaaagaattatatagggaggcctcaacaaccatatgttaatctatgaaaaatatattcgtaggtaccttattgtagttgatgacatatggaacactcaagcatggagcattattcggtgtgcttttgctcaaaataatcatggtagcagagttatagttacaacaagaatcgaagatgtagctacaaagtgttgcgttgatttccatggtatggtgtacaagatggagccacttaatgagtttaactcacaaaagttattttgtaaaaggatatttgattcggatagtattcctgagcagtataaaaatgtatcagaagatatgttaagaaaatgcaaaggtgtcccattggcaatcattagcattgctagccttttatccagtgaaggcatgaatgtgggtaagtggaagaagattcataactttatgggttctgagtcggaaacaaatcccactctagaatggatgagacatgtactgaatctgagctaccttgacctctcacataatctcaagacatgcttcctgtatctaggaatatatcctgaagaccatacaattttcaaagctgatttgataaggctatggatagctgaaggatttatccatgagaaacctggtttggatctggaggaaacagctgagagctatttcaacgaactcattaataggagtatgattaagctagatgattatcgttccagtgaggcatgtcatgtccatgaccttatgcttgaccttataatatcgaagtgccaggaggaaaacttcatcactatagcatctaagcagcctgtaaagaatgtaacaaagcttccagttcgtcgtctgtgccatcagttgtcatacggaaacttggccatggaaagaatgaaactatcacaggttcgatcctataatactttccctgcgtttggctgcagtatgcagcctcctatttctatgtttgagcatttgcgggtattggaacttagggcctattctacatccgttttccttgatttgtctgctgtgagcaacctcttcctgttgagacacttgagtatcagaggtttcaggttaaagctgcctcagaaaattgggagactccagtgtttgaggacactagatctactaggcagccttttggttactggttttccatcagatgttatttctctatcatcattgtgtcatctaacagtttcaggtgatgcagtgctgcctaatgggattcagaaactggtctctctacaaactttgttgacctttaattcagggggtttgcccgacatttttactattgtggagaaaatttctcgatttaattcatctgctatcagactggcaaaaacacgtcgtttcaacaatggaggtcttcgttctaccaatggaggtcttcgttctccccctgcctcccttgagtttccaagtttcgatgatggttggccaactgaatccattctggactacctatctcagcatctggatacaccagcttcctcacattcggacctcttctcgccaaatttggttgcttgttcaccgcatattctgaattttgcatcgttatggcttcagcaactcatcatccgtaagaacattcgcaatgtcccatcctggctgtggttttctctgaagctcacaatgctagagcttcgtgttgaggagctcagttgccgcgacgtccaatttcttgctgggctgccctgccttgttgacctcgacttgactgctcaagctacccctgagaacatcatcactaaacgcgttaccacgcgtttgggaagaatcacccataccgacaatttcccaaagctgcagaaatttgttttaacatgtgatttggcatgcctgacgtttgagccaggggcaatgccacagcttcagattctgaagctagatgacaagaagccttctaacttggaggaagggcatggcaccagtggagcggcgcaacatggcaaaactccacttattggcatcgagcacctaccaaggcttgaagaggtccaagtgacaagccactccagcaaggtgcctgcatacagggacgccgtccaaaggcatccaaggtttcaagacatacgtgccacgtttaatatctataattgaagtacaaggactcagaaaatagcgctgaaaggtactcatgatatccttatactctgcgtttcttcaataattaatgtttgctgctgttttatgggaatatgttagcttgagtattccccataactgggagaagaacgctacgacatgaagcgtaccagagaagcgcagccacagttgctgctgtcttgtttgcacgacctaagcatcacactttagtacgattaaattttggggcttgtatttaagaacttgtattatgttgcgagacctgtctaggttacttgtatttgtgtatgttcaagtccttacatggcatgggcacaagcatggtctgtgagactttgcacttatattaacaaacttctctagccattctctgttgcagacttgcaatatctctcatttaggctattattggtcaaaacatgatttttgtcgatgaatgataattccatagacttgtactttcacaaaacctccaaaaattcaaggtcgaccaatgactggttttgaagtgggggaaattcaggttttttgatattccagattggaaaagcgaactttaccatttgttagatcctttcacgtccaatttatctgcttttacaggagcacactagttaatagagtgatcagctctaaaaacagcactaaagtgaggctctgcacttacaaatatgaaattttaccacacaattttctctccctttttttaggggagagtagcatcttttataagaagagaaacatgttcaatgagagcatggagaatttatttaaagttgttaggtcgcatgtaccaaccgaaactttgaatgccccctaaatgccagctgaaactactctctgcaggctctacttaatctccttgttgtgtttgtgactgacttgacacaaaaacataaatgcacacaatatccacagctgacctaagttatttcttgttatgcagacgctctcggcgatgaatacaagctactcaagggggttcaaaaagagattgcaatcctgaagcatgagctgagctgcctaattcccttctccagaagcttatcgacttaggagtggaaggacaaggtgcgggaactggcctacgatattgaggactgtatcgacatcttcctgcaccaacttcatcctagagaggacaaggatagactggtctggaaggcggtccggaagatcaaagcaactatgtgcctgcccgccatcaaatcgccctccaaattcaagaactcaaggcacatgtcgatatacatgatcgatgtatcaacctctggcgataggttcataaggatttgattcccgattgtcgttgctttatgcagaagctggaggccttgttggcatttgtaggttgtttagggcctgtttagttcgcgaaaagaaaatttttgattgtcacatcggacgtttgaccgaatatcggaaggggttttcggacacgaaggaaaaaactaatttcataactcgcctgaaaaccacgagacgaatcttttaagcctaattaatttgtcattagcacatgtgggttactgtagcacttatggctaattattaactaattaggctcaaaagatttgtctcgtgatttcccccctaactttgtaattagttttttaatttatctatatttaatattttatacatgtgtccaaagattcgatgcgatgtttttaggaactaaacagggccttattactactagagactaagatttaggatagaagactttagtgcacctcattaaacaaggaattattgggccagagggtggttggcagggattgcaacttcagaatgaaattttggtaattttgcctccaccggcaagcacatgcatatattgtctgaaattttctcctttttttccaaatttttgtaaatttgttcaaagtttattcaaattcatttataatctgttaaattttcaaataattttgtcaaaaagtaccaaaatttcagaaatttcgatttccactgaaattctgaaattttggctaaaaatagaagtgtaaaccatggtggatgggtgtatgagacgaaatttgaatagaaggtaaataatatgaactgtgctagaaggccttatgtttttatataaattttaaatactatgcaaatataaagctacgtgaactcgaactcagatcagtttgactacactgacttttaaaatcgtttttaattggggtaagctataaaagtgaaacaggagagcctagaaggactagggctgcaatcggcaaaaatacccaaaagagaggataggaaaaaattttgaaaatatactgttcatcaatttattttgcaaaaatataccggattgtgaaggtttttgcacaaatataccttcggtatcgctgtttggaagagcgataccgaggttcactactagaaagtgcgataacgtggcgaaatcgcggtatgacatagcgaaagcggagttgagctggcgatatcgcgcaaagggaaagcgagaccgcagcggtatcgctctttggtagggcgagagcgccacgtggagaaatcgccgatttgggaggcagtgtggcgggcggagccatcgctctcgctttgtcgttacgcgaaaccgaggtcggtctcgtaatccgaaagcgcgagaccgagcgtgacgtgatagagaacggcacgcggtatcgcgctttgcgcgcacgagaccggtgacgccgcatgcgcgagagcgacgaggcgtgggggagcgtagtgggcccgtggtatcgcgctttcagcgcgtgagaccggtgacggtatcactctccgcttgagcgagagcgatggagcctcgtagagcacagtgggcccatggtgtcgtgccttgtgcgcgcgagaccgctgtcggtctccctctccgcatgtgcaagagcgatgcagtgcggcaaaggtgcgctgtcacgctttgcgcgcgcgagaccaatgtacagagcgcaggaaaagagcgcagaccgacgccaccgacacctttattttccatctctctttttctttttgctttttgcatgggttctgatagccatctccctttcctttctggaaatgggcggaatacctctgtgcactctcttatcattttactattttgtagtcacatcatgtcggccacatgtgtttagctcgtaaccgctctattcgttcgaatccaatgtgctcaatgcataaaatgagaggagaggagatggtcctcacagaggaagacagaaaagaagacagaaaagggagtgaactgaggaggagaggaagagcaagaaaagagaggagacagtggagagaagaaataaatgatacgttttttctattagcaaaaatttgtacggggaggatttagaaaatatcagttcacttagtttatattagtgttagttaatattcatttttaattatgtcagagaaaatttgagctatatattagtttgtacattatgattttttttgttaactaataattttccgtacgacagttaacacaaataatactctcactaattaaattaatagtgcagttttgatgttactcgtgcggtttaaattggataatacttttattgtgtactactgtgacttaaattacacactaatttcatttcacaaagatgcaatcatacgcgcctaaaatggtctcctctctttccaatcacgggacatttcacgtagaggcaatcatctacatttaacggtgaagattccgacgcaccgaaagtggcgtcatctctttctaattattaaagaaaatagtgaagcaaccagtgccgccaaaagtgacggtatccttttgtaattattaactttaacagtgaagcaggctaacgcttcgaaagtgccgtcatctctgtgtaattattaattgaatagtgaagcagtccgacgcgccttcttctctttctaatcattcacaattcctgtgtacaacccattaataattcagactatgcgcagcttcttcctatcccctataaatagcaaccaaacctagcacacaactacatctcttcttcataaacgttctgctggttccaactgcgtgttgtatattcttaggcccgatcttgtggcaggagctgagtagctggtgaactcgctttatgttgttcattcactcgctacacggttcctgtcccaagatcgagtctgtgaatatgcaaatgtgattttttttaatagattcttacacccactctttttttaagttccaacatccgtttgtgaatatgacctactactgcaaattcataaactcggtgttgcatattcataggcccggtcttgtggtaagaac

SEQ ID NO: 28436 - DNA, 10025 bp, Oryza sativa
atatatacatatttctcaagtttattaatgtatatatgttgcacacatagtaaaaaatatgaaaaaaaaagtttatactttctacatagcaacggcttaatatatcacacatgaaatattaacgatttgcatcgggtattcgcatcaaatgtaaacgcatttagaggatcgctctcgcgctccgggtgcgcatttagggtctctctctttcaaagaagccgtcgctgtcgcctcctacgcgattagtagccgattagcaggtgggccacgacgcaacggtatcgtcctaggagagagcgataccgcgcgcgctctcgctcgcgcatagcttgagaccgctccgggcctgcttcgggccccacgtgcgtcagacgagccacgccgctacggtcttgcgtaagtagaccgtaataccacacgcgctcccgctcactcaaagcacgagactgcttcgtgccccacgtgcgtcagacaacgtcggacaacccgcgctatcgctttacgaaagtgcgggaccgcctcgctcttgcgattttcaaatgcaacaccgatgcattagcactcccgcgatttcaattagcgatagcgctgcggctttcgcatgtagattaagtgatatcgctctcttgcgacatcaaagtgcgatacggcccctaatcaacctattcttgcaattttgatcaaaaacacgtatattttcaaaaaaatttcgaaaggatagctgctgatgaattaggccctgtttagtttccaaaacaaaattttttacactgtcacatcgaatatttggacacatgcatggagcatttaatgtatggaaaagaaacaattacacagattgcgtgtaaattgctagacgaatcttttaagcctaattgcaccatgatttgacaatggtgttacagtaaatatttgctaatgacggattaattaggcttaataaattcatctctgcgaaatctgtaatttgttttgttattagactacgtttaatacttaaatgtgtgtcggtatatctgatgtgacaaccaaacccaaaattttttcccaactaaacaaggccttagcagcgatataatagacgctgacaacgaatcagaagatgttggaagaagcaaagaaaggctctgaaatttttacatggaaaaaagagcaaccgcccaagaaggatggatcacgtagcttgtaaacctgccgatcctgcttcttcaccatgacgacccaatcgtcctcaccatcatccaccagagagtaagtgcgatgaacaatacgtgctctgcccacctttcccatggaagcagcagcaatggaccggaactcgaaagaagcgaagctccccttccccatggcgcacagaaggttgcccggaacaatgcggcacttggagttggatgccaccaccacccgcaacgcaacgatggtcagctccttcttccccgtgacggccgagatcccgaccaccatgcggtacaccgtaacgtcggcggcggcggaggcgacggcgacgaagcggtggtcgtcgtcgctgccgagaggcaaggcctggccgtcgaaaggcaggttgctgtcgtgcaccatctcccactgctcggtgtccatgtcgaaggcgcaggtgcccttgtcttcttgctgctgctgcggctgcagctgctgcaccgagaccgacaggaggatgtgggagccgacgagggcgtacgccgcgacgcgcaacttgggcgggtcgaggaactccagcgggttgaggcggcacgggaagagcggcggcgatgggagttcgcgccacacggtgtggctgaggtcgtcgaggacgaagaaccatggctcgaaatccagcggcctcacgacggccggggtgcgggagagagcgtagagcgtgccgccgccgactacaccgccgccgtcgtcagagatcgagatgaggacggggttcaccttggggaagatgagtcgcgggccgccgcgctccgtggatgtctcggggtcgtagacggtggtcaactccacgccgacgcccacggtgcgtgtccccaccgcggcgaacgacatgccgcggccgcggccgcggccgctgccggtgttaagcagacggcgggcggcggcgcaggcggcgacctcgattacggagtgggtggtgggctcttcctcgactccgtgcgccaacaccatgtacaccggcggctgcttctcaggtgaggcccccttgttcttcttcttgttccctggacgaacgcggaggagacgaggtaccggctccggcgccggcgtcggcgtcggctccggctccgcgagtttcttcctcctcttcttgtccggcgtcaccatcttcttccctcgactggattcggatttacgtatcaaagacgtgatgaaaggaaaccctatcccagtggggttgctttcgtcggccggaggacagcatgggcctagccgagactgggccaaatgttacaactccactacttgagactgggccgccaaggcagtgcaacatgcgtctcacctactactaaactccccgtcgcaatcaggattttttttttctttttggaacgttcgattgcgagtgcaacaggcgaatgatagcattgctgcgttcttttttctggtttttaagcatgctcacttctacaactactacagaaacgaggacgacatccctccaaattacaggtatagaccataactgttcacgcatgaaaaaaaaaagttaacccgagagatggatcaaaggcttcttaaggactgcatgtaaaaaaactaattttgcatgcgggcaagtaggaaatagattttttttctgcaccttttttctcttcctccttctctccaccgcaccgtctactcttctccagaaccagggctatcctattaaatttgaggccccagtgcaaagtcgtgcagtagtaaagaagaataaaaacttaattgatgatataatacaacaataatttatactctataatacatttcatagcaatgtaaaatggtctaaaataatatacatgtgcatagtatatttcctattccaatttgttgaagacatgtcttcaaaattaaaatacaggatgtatctatgtaaggataaaaattgatttagtgtatatagtagatgagcctaaaaacctaataatccatacatgatacactaaaattagagaatagggattagtggattacattacctgattgctgattagagtagacgatcaggccgtcaggcgttgcagccgacaaggactccggcaggcaggccggccaatgatgggtcacagccagcaccagtttctcagttctaggtagcgacggcgacacggcatcaggacttagcgatgacatcgcggcagtgcgccagatgcgaacggagaaagagtcagggaggcgaggcgttgtttcgttttctaagcgatgccgcgatcaagaggcggaggcccatcgtgccatgccacaatcaaaggcgaaacgtgggatgctaattggcgtgggcgcgccactaacggaactgatgagcacgccagcctacccttctgcctttccaccacgctatttcttgttttttcgttatctttttcgctttatctttttttcttccttacccctcgcgtgtttatcctttttttcgtgttttttttccgatttttttattggtagcacacatgttttcaaaaatatttgagttaaaagtttttaaatattaacttaaaagtttttcaatataaaagacgtttcaaatctagagttgaaagtttttaaattttgagttgaaagtttttaagtctggattgaaggttttcgaatctgggttgaaagtttcaaattttgggttgaaagttttcaaatctgggttgaaagtcttaaatttgagttaaacgtttttcaaatttgagattaaaagttgaaagttttcaaattttgtctaaaaaaactcaaatttcgagttgaaagttttcaagtatgggttaaaaagttttcaaaatttaacttcacgtatagttttcttttcaatctattagtaaaagaagaacattaaataaaaaatattatctttattatcatcattatctaaaactaatcaaattaaattagttacgttgttaatgcataaacatctccgggaagaaaagaaagtgcgggaaaaaagaaaatactaaccgcgtgcgtgccaatttgattcaccggcgcgtatttaatgcttatcattattggaagctaattacgtgaagctagcgcctattacaccatcctaatggattagcccattagttaccgataaatcaccacttgcatcagtgcgtgcatgccctggtgaccatctctgcatcttgcgcgtctgcgccatttagcaaaaccgaggcgaaacgacgtaaataaaacatgaaaaaaatcacagatttttagggctaattgggctatatctatatatatatatatatagtgttggagttttgggcctaggggcccctgaaaattggggccttgtgcgggcgcgcgggccgcacagccccagggacaagcctgtccagaaccatcgttcgccgtttccccttcctcctctcctcatctcttccttttccctctctcaccccctcgctcatttcctcccttcctctctcacggtggtggtcggctcatagggtggcagaggtggcggtcaacgggcactgcaaatctggcaacgactctccccgggaagggcggatccgccaccggcgggctcagaagggcggatccaccctcacatgcagcgggtgcaagcggtgatctcaggagtggccaacgacctctttcctccatgacggtgaacccggcagctgtggacctggcaatggggagctcgtcggcagcagatctggcgctggggagctcgacgacggcgaacccggcgggctctccccctcgtgcgcacgtggatctggcggtggggagggtgttggcgacagcgagggcgtccgctcttacctcctcaaggccatcaagtacaaaaactaaaccggtgtgctcctctcttcggcgtctttggcttcgagccgccaaccgggacttcgcctaccgcatgatgctagctgtgttgttcctctgcagcgacagcgacacccctgtgaaacatggatgtgggaactagaggccagcgcgaggggtgccaaggctggggagacggattaaggatggcagcaatggccgctgagcactggagctgctcgctattgtagcctacccatattgtcatgaaaataagactatcacaaaccgcagccacgcctcccgttgtacctggcctccccgcggtgcatgccgtcattgcctacacactgccgccgatgtttgtcgttctaccaatgccaagggtcgtctctccgctttagattgattagacatctatgattaatttgacgattggattgaagatgaatcacgaattactaaaatacccttttaaatttggtggcaaattccaaacgtgccctcgttcataagtatagtatattgtaccgtaaaagttccctttctttattgctcatttttgtttgttcactatgtaactctctaccataagcatctttcaacgttaattgaagctaagaacataaagtgtcagaggcttagagctggtaggtgcgtgctcgacttaatcaatagtattgcctattttctgctagctcagcatttgctgtcctagatttgggactcctaattagcaatacgttgtaccggttgatcaaccagctattctatgttgaagagcgtgaaagcatctaccacttgtgttaggtcagaagattcttcctcccttgaggatacccctcaagatgatcttatgcttaattcggcaaaggaatggaatttgtcttccattcgtaactatttctttattgcataggcacaagagcgtgccagtttctattattaaaaggaagaagaatcactctcctttcgatgttaaagacaagagttgattaaattaaatttctaaagttaaatacgtttatgatattacttcctctgtttcacgatgtaagactttctagtattgctcatatccatatagatattaatgaatctaaacacatatatatgtctagatttattagcatctaatataaatgtgggcaacgctaggtattaaatctacctgtaccatctctttatctaaaacatttgtgaaattatttatgatcaacgtttcaaaagtctaatcgaataatacaattaaacatcaaatatttatgatggatacatgtacgtacaattcgttccaaccaacagagggttgtcatgtgcccggcggttagaacagtggtgggattatgttgtgatggttagccggtcaactaaagaaggcagcaacatcatcagtcattattcgtggcatggaaaattactccatctagctcgcagataagtgaagtgttttttaatgtctgcagtcaatatgtttaaatcttgcccattcatattttttgtcatatctcaaatcattttttttaaaactgtcgtggccagatttatcttcaaaattagtttcaaataatattataactttgctatattttcatatgctttatactcctacttcttaacaatgaaactagtgttttggtgatcagttgctccgtccatactccatagtatcacttattcacgacaggaggtagtgtatcctatcttactaaaaggttacaacccattaaattctaaaactcaacatacaaaagatgttacatcattatgtactaacaattattacacttaaacattatgcatgctatattatctatattttgtaatttattaaattttggagttttaaaatagaagcatgttaaattatcatcgcacataattcacataatatttcaatatatctctccattattttttaaatatactatatacctatatagttcatcctcggttaatattatttttctctcctcttatcaagccatatcatcttaatttttttaacccgtagatgattaatctatactccatattatctatttctttttttctttcataaaaccacaccgacttacataaatttatgttgtttagctattttatacattatttttacttatcggatttgctataaaacttccaaaagtttttgcccccaaaacttttagataaatgaccatccgatcgcctcgacatttgtgcatgaagggaaaaaaattgctagaaataaattttcacacatgtcacgcgtaagattttagtgctagctaaccagggcatggttgaatgcaagtttattatatcgtagttacattgtagttacagtgcagtagttacgcttcaaatatagtatagttacacttacatcgaaagttttttactaaaaaaacttgtggcagttttttgatactacctttaattatttttatcattctaaattcccgcagtaacgcgcggggttttacctagtatgctaagtaatgctagatgtagaaccattaagatttgtcaaattgatcctcgtgggttgtggccaaaatgttttatgatgacatggtcaacgagagaaagtttgccagcagtttctttcatggattgttttaagagagagacagagagaacatgcatgggcatcaccagcaataattttaagattttcaacggttcttttttttttggatacggatcgacgtacaatactcttcacgtaggaaagtacgtgaacgtaccaaattagctgtcattcaaagaaaaaaaattaagacaattaattagctagtatcttatcttatataactggagggttgatctgctagctactgacagtcaaacgcagtgccaagatcattgacaagcatagatcaagaaagagcagagacagagagggattgatcgaggcatggccgtgaacatttcgactggggtgatgaactcactcctggtgaagctggaagaggtgtgtcgatacgacttgaaagagatccaattttctaccgaatttgatttcaagaacaatatatggcacttgaaagaggaattgagctgcatgaatgctctactacagaagctgcctaacatggaggctctgaatattcagaagagggagctgaggaacaaggtacgtgagctagcctactttgttgaggacagaattgacaggttcatgcacagttttggcactgtagctgacaaggccaccttgctcactgacacgatggatctgatgctccctatcttgtttgaaaaaattcacgaaatcaaggattatgttgtcgaggaagtcagaagagtagagagtatatacaatctcgacgagtctattagctctaacccgaggcagatagaaatcgatgatatttcacctgtcctgtgtggaaaggcaaataggctcgtcggtatcaatgtcccatgtgaggtgattacacagttgttaatggaggatatggaaggagagtcagtacagcatcctaaggtggtctctattgtgggatttgggggtcttggtaaaacaacgttggccagccaggtctacaagaaaattcatagcagatttgagtgcgcggtgtttgtgtttgcatcacgaaaccgtagcacgtcaatgattttaaatgacattctttcgcaactcagatatgacggatcggccgatggcataaaaagtctcatcaatgcaaccagagaaaaactctcttgcaagaggtatgagagcatatgcttctatggttctatttcgttgtgtcaataaaactatatatcccaataggcaatggatggatcacagtaacttggtgtaccatcaaaaagtctgtgtagtaaacagtttggtataatatttcatagtactttggaatatatttcctagttagttgtttaaagagaattatattccttgacactcagttcagtaccattcaattatttgcatttagttactctctattccttatatacaatccataaatcaatttcctagacatgttaatggaccatatcagcagatatgcttctgaaaaaaaaagggccataatggccttatggacaaagatgcctcttgtagttcccaacattatatgacaaaagcttgtgcaaaatgttccaatgtttttcttcaagtttcagttgttttggtaaatatatattcttctgcaaactatgaaagaggaaccacatatacaaaaaaaaaacacacaaatattttgttacagcaaaagacatatgcgagatcttaatatatttcctaggtaactacataaatagtttcatagttcttttaaaaaaattatagtggaaccagttcgttgccagccccatcttatttggaattattgtaagaattgccaagtccaatggcctgggatttaaatagttgagaaactcaccagaatatcaattcaactttacttttttttttaaaaaaaaaagccaatacaacagtcctatataaaaacaggtaaaagagagcgaccatggggtaatctatctcaaattgccatacacaaaactcttccatataaaaccatatgtattatatattatgtatacggatcttgtagagaatatctcccatttgtgccgtgaggcaaagataattcatccctgtcaaagtttaattttacattctccagtattgaacatataactcaacatgcatgatcctgctcattctcagtgaagtttctttggaaggcctcctgtaaaacaatatctttaactgatcgcttttgttgattgctaataatatatagcttaggatattctactcacaaaaaggaactttcataacccaaacttcctcgcaaaacttgtccattccccatttgtttaatactttcttttcacaatactcctacaccaccttttacttttatgaaagctcttcaagaattgttatcctttttattcagaactttgaaaaaagtccaccccttaatttgcatctatttgtttatcaacaaatctacacacaagtcagaagaattattttttagttccacaatccacaaaatcagccgatggccaattcttgaatgagaggatagttggtcctagggaatatatcttctttt

SEQ ID NO: 28437 - DNA, 13865 bp, Oryza sativa
aaatccgccgatggccaattcttgaatgagaggatagttggtcctagggaatatatcttcttttctttttaacatgctgtgatgggagatgataattttattcccggtaaaagaacaaattctatgcaaagattacatgaagaaccatcaaataactgaataactaattttgcctttttatcaaacaccacaacagattttaaccaatgttttctagcaactgctatgaaaaaaaaagaattatatgaagaatatcataatagtcacactagcacaaacttactacttgatgagtgatttcatcttcaatgtaaattatgttgagtataacattgaactaggtttaaaattgcaaaaataacgacagtaatagcatgcagcagcagcaacaacaattgaatagttctttaaggttcttatagaggtacattatacttgtgagatatttatggtacgtacttgataaagctactgggtggtaccatatttttctatgtgaaatttgatacttcataagtaccaaattataccacaaataaactacaaatttaattttgtacctcctaatactgttgaacataagtactataaaaagactatagtttgcaagatctgtactgttgcagacaagaacaatattagtattgctaaaacaatgagtaagtaggtttggactttgaactaggtactatatcaacaaggactacagaaggtcctttagataatactgttggatttgagtgtgagccactttgtttcttgatgaataatgaatttcttgtcacaaaatatttctaaaataaaaataaatggataaatttattcttgcaacaaactgataatcatcatgtgtaattcttgctgataataatcaaaatgcctcactaaataaatgttctgaaaacttaatgtctaaggtttaatactaaattatcttgatttattacactatcagcatgttactggtagtttctaattttgttttagggcattcttttgaaacctataaatcttgttgttttcagtaatactagccacctagtcgcacttcgcgcgactctgagcttcgcataacctgtctgtattagtgggaaatataagcatttctagtttgtttagtaaagtttaagattaatggaaagtgttctctttcaatcatcttattgtcaaagttaaaattttgaattgcttagtttccctggttaactaaaagtgcttggattttcacgcattagaatcaatgtctagaaatgtttatatttgtatataaaatttgaatactaaaaatatttattttctaggaatggagggagtagttacctttagaccctttttagtgattattatgaagaggggtaaaatttaatggaggaaggttgtaaggttgaaattagaaagtatgcgaagaaattaaataggatatgcttgtggttggttgagatgagagagtgggcatagaagtagctgcattttacgataaattttgattgtaaaagataagtatatttaatataatacgaaggagcaataacattaagttgttataacgatttcgtgtacacgtgtttattcatagtgactagtgtgctcatgtgtatatgagctcgtgtgtttgtattatgttttttaaaaaatggtacttcatggtgtatgccaattaggtgccatgtcaaatttggtgtagtgtgttccaatataaaccaaaattatattagagtattttttttaaaagagaaattatattagagtatttgtatatgcatataaactgtgaattgagaatatttgaaaattacatataggcatatatacatatttaggacattccatccacatgtgaccacagaatgtctgggaaattaaagaatgtgatctcatgctaaatttatcacaattcccttattaaggataatcatggcggccaataaattcagaacgaatgtacggctgagctagcttcatttaccttttttttctttatttgataagaagtttaatgtttgtactatgtaaaaaaaaaatctaggtacatgagttatctacttgttgagacctttcatctggaagcctcttgattggcctgatggttttccactcacatataagcctcttaattggtccaacataaattacctatatagatgatcgaacggtgtgttcttttacaagatccatccaacggtccatgttatttagattacgtgtctcatcctccttgcagaaagcttgttgctttcacctagtaagatgttaaataacaatatcaccttgaccagttgaccatactgctgaatatgctcaactctcataaccgagaaccatttgcaatgggcgttacgaatctgtactaatattttctgtcgcagcgcatgttctatacccttgctgcattcagtcgccgtttctatctgcatgtagacttgatagaaattttaacagtgtattatctggacaatataatgcccaggattggtgtagatatagatatactaatgagtctgaaggccagaagttaactatatggtttataaccaaaaatagctcgatatggttttctatagatatctatggttttccgctattgattattgctatgttttttctcaggttcctagttgtaattgatgacatagcaagcatagaaacatggaacagtattagtggtgcatttgtcgaaacgtggaacagcggaagcagaattattacaactacacgaagaaaggatgtagctaatgcctgctgctctagcttccatggcattgtctataagatgaaaccactaggttggacggactccagaagcttatttttcagaagaatatatgggtcagataactacagccctgaacttgaagaactcataattgctattgatattttaaagaaatgtggaggagttccattggctgtagttgtcatagctagtcttttggctagtcaagaagaagttaacaaactggataattggttgaagataaaatactctatggggtttgaactggaaagaaatcctaactctaaatggatgaagcatatccttaaacttagctacaataatttatcttcggatctgaagacgtgctttctatatcttcatatgtatcctgaaaactatgacatcatgaagaaagactcgatgagacaatggatagcagaaggatttattacccaaaaagataaccgagacttagaagatattgctgagagctacttcagtgacctcataaatagaagcctgataaagccagctcagtttaagcatggtgaggttgtctcctgtcgtgttgtgcacaatttgtttcttgatcttattgttgagaagtccacggaggaaaactttgtgactgtaattaggactgatcaagattgcttaagacgacataattttttgattcgccgactcagctaccaatcaaaccgtggtaacttgatccaagcaagtgagtctttacatcaagtccgatccgtcatttattttggggatcggctgcatcagcgtggtgaaagcttgcctcgtcttcagatgtttgaagccttgagggttctacatctgagaatggaaggttattttccattccgtgcaacgtatgatttgtctcctgtatgtaaccttttccaactaaggtatctgaaattggaaggtaatcgtttccagtttcctgatacaagtggggaactgcgatatttgcaagtggttgacataaaatgcagcggtgatctcgtactcatcggtgggtttctgagtgatgcttgtttaccatcattgcggcatctgagaactccatggaatgcagagctcggcagggggattaacaggctgacctctatacgtacacttgaagaaattaacttctgcaattgttctgttgaaaacatccgacatcttgggatgctgaccaatctaaggacgcttggtgtcatctacaatcgccgtcgaggcaacgatgaagatgaccagacagatatggtaaagtttgctgctcttgccacttcccttagggaactgggcagctgcaacgtccgctgtctagatttcaatgttgctctaatggagcacagacaaccacccattggcttcttgtatagctggtttcctcctccgcaattccttcagaagtttcaccctcacatgatattcttcttcagggttccatactggatacaataggttgagactttaactagtttacgtctcattgttgacaaactcgagggcgatgatatgcgtgttctcacaaggttaccctgcctcgcttaccttgacttgcaagcgatcgaggttcctggcatggagattattatagacagtgtatcattttcagctctcaaagaactaaagttgatctataaatcttccagtttgtcgatcgagccaggagcaatgccaaagcttagaattatgcatctcattgtttttggccatgcagagcaagataccaggtctctagttggcattcagcaccttcacaacctcgaagacgtcataatcacatatgattacaataatgtgatggttgcatttagggaagccctcgataggcatccgagggttggttccatccaagtatatataggcgcatctccaaaggcttcccaatcccattcctgagtgaatttcgactatctgttggatatgcttaaggttagggaaactacctcctgcaacaacggtggtagtgtggcacatataggtaattaagaacaaagggctgcttctactgttgtactggaaatgctagagagccaaggagaatggtagtagaaagaaggcacacatatgaaagtgcatatgactattgtgttaacagatatttttgtcttttccttttttattccctcaagtgttttaattgttaaacttgttatctctctatattcataactggccgcactccatcttatctttcccgattctatttacttaagtcaattgagtggagaagggaggtcttgtgactatatgtgccttaaccttgctaattaattaatcctcgtgtttgcgtcaatagttccctcgataatatatatctttacttattataaaagtttaaggtgtttttatctacaaatttcatacgttactgctgatagctcacgatcttttctcgactccgttcctagcaaacaaaagcaatagcacgatttttttttctgtccgactcagttttcagtcgtcattttttttatccgtccgatcatttttttacgcgttttttgtgggcctggtttttttctttctccgcatgtcatttttttcatctgatttttttagtgggtcgcggttttttttggttccgtttttttttcaatctcctccatccgatccgcacgattagagatgtttccgtcgtgcaagggcgaaaaaaaaaggaaagtccgacgtggagaaaaaagtccgtaaaaaaagcccgtaaaaagggcgataaagaaacaaaaagtacccgtaaagaacggcaaaaaaaaaagaaatctgattcttgcgtcattttttttccgttgtttccttttcttcgttagtctatttcttttgctgttttttttccgtgaaaacgcttgtccccgggcgaccggcgcgggtgagcccaatcgggtgctccccccacgcgctctcctccccacatgctactgttggttccactcacttctctcttctttttccacaaaagatgtttcacctagtgtacttataatgttttactatttattgatctagtgttgcagtgaattaaaatactcttttacaacaaaaaaaatccacatattttggaaactctctattaaggaaatttggtttattttttgttccaccaaaaatgtttcacctagtgtactcacaatgtttcactatggatagatctaatgttgcagtgaacgaaacattccattgcaaaaaaaaaaacccacatattttagaaaccccctattaagggaatttggtttattttttgttccaccgaaaaatgtttcacctagtgtacacataatgtttcactatgtatagatctaatgttacagtgaactgaaacattctttcgctatttgctgaaacattgtttttatataaggtgaaacaacacccgatttaaacgagtgaaacattttcgctctacttagtgaaacaattccgatatacctggtggaacatcatgcaacatttaaaaataattcaataataagctaattttttttcaccggaatatatccatgtgtggtcttgttttgaaaatttaattgcaacgaatttaatggtgcaatgggatcatgatttggatatgtaatttaggagaaaaatcattttaaattagtgttgcacgtaaatcggacgcagacgtccgtcatgctgacgtcagcgcccgatttccccggcgccggatcggccgcccgataggtaggcgcgtccttttttccgtcctttttttcccgcctttttttcatccgccttttttttccatctgctggttttttaatttattttccggttttttcaccttttttttcactattattgtattatttcgcatgcggtaaaggatttgttttttatctgccatattttttcgttgctcggccgaaccctagcatcgccgcctcatccatctgtctccccatgcgttccctcttcctgtcttccaagcatagtcgatctatcccccatgcgttccatcttccaattgattgcaaaaatcgatcccccactactcccttgtattcacagaatttaatctccatttaaaagtcaccattcttatcccgagtgaggagataaagtgtatcaaaaaccattaactaattttaaaagatcgagaaaaattcgactggatttgatggggaggatcggttttggcattgcacagacacgagacccttaaccaatattgaaagatcgagaaagattcgacctgatttgatgaccaggaagattcgaccggatttgatagggaggactggttttggcattgtacggacacaagaccctcctccggggatggaagacggcagtccgctatgcgagtgggaccgatgctccactcatgggttgggtcaaagagagacagaccaagcaaagggaggtagcggtccaaaacaaaagagtaaaacgtatagcgatccaaaaatatttttacccattgcaacgcacgggcatttttgctagtatacatatatatatacatatatatatatatacatatatatatatatatacatatatatatacactagcaaaaatgcccgtgcgttgcaacgggcaaaaaaattctaataataatatacatttttcatgcataatcatgttaatgacaatgtttctattttaatgagcggcttgtttgtttacaaacagtatttttttcttgcgtgattttctcaaaccatttttcagaaatggcacatttcttttaaacagttttttcctaccatgtttttttttgctttttttacttatgaagaaaaccatatttttctccttttttttttgcttttcttttctcgtgtgttttttttcttgttttctggcacgtttttttgcttgtttttttcgatggttcttttttgcttttttgcaatacaggagaatatatgacaaaataaagccatgtagtagatggcaaaaaatcgatggatcctatccgactgaagcgtccatcaatttagcttttttctgacagttttttcagggcgatttttttaatagacggtgtttttttcttgcacggtttttaaaaaccatttttttataaatggcgtgttttttcgatagttttttccttgcgcgtctttttatttttatcgacaatggaaataatttttctcgcgcttctttttatttttttattgatgatagagaacatttttagcgtgcttttgcgctttttttttgacttttgcctcacacgttattttaaccgtttttattttctcatgcattttctctttttaaatagttagattagagatagagaagagatatatactggttagaaatcagattttgtttcgccgtttctatttttttctctcttgcattttttattttatatgaaccagctttttattttttgcgaaccaatttttcaccattttcttagggaatcgaacgaattttttagatgtttttttgcctttataggaatcaaactttttttctgtttttaaaggattcggatctagcgttttttttgtcaccacttttttttttttgccttttatatgaatcaaatcttttttccgtcggatctacagtttttttcgccagtaaggaaaaaaaaacttttgttgttatttttttctttattttcttttttgtgcggcttttctttttcttttatgcacctttctgtctttgttctctttctcttttattatttttttaacaaaaacgacatcaagtagcttgttgcaagattatagggacttagatgtaaatataaaaattacagggactcaaaaataaaagtacaaatccaaaaattaaaatcatataaaaatggaatgctctcgacatatagattccgtttttgcaaacagatcttcaatccggcacatcaatttttttcaccaatctaagtcagactttttttttggcttttatttttctttttatgcacctttctgcctttgttctctcacttttattattttttaacaaaaaagacctcaagtagcttattgcaagattatagggactcagatgtaaatataaaaattggactcaaatataaaagtaaaaatccaaaaattaaaatcatataaacatagaatgctctcgacatgtagattccgtttttgcaaacagatcttcaatccggcacatcaattttttttcaccaatctgagtaagacttttttttttggtttgtaagagtgaatctgatataggagtcggacttttttttcactttttttttcactgttacggatataggagtcggactttttttttttgttttttatcggacaaacctggttttttcggtccggtttttttggtttttttcgcctttttttttctggatcggacttcttttttccgttccggtttttttaattggacaaacctggttttttctgcccggtttttttacccggttttttttggacgatggaagcacctcgtattttttaagtagtagagaagagaagagatagagatatatatatatgaccattgggctccccaaattcatctcctaatgtgacatggtcccgtagcacggttaaccctagccatcaaccgagacatcctcaccacgcgccggcaaggtatgaactgcaaccccatcacatccgttggcctaattgatttgtgaagcatcaagcagcagaagcaaatttcatagctcgtcgttgcccacccgtgctcgcccgtcgtgtggacatttttttttcggggtttttttttttcggggggacattgagagctatgaatttatctaattgcaaatttcacattttctataaaatttagaaaatggttttgattattctaaatttttgttttcatattttctatacttctttaaaaagaatccacttccattgcaaattatccattgaacttcttaatattaagaaacaaacaaatctaaatggatagtcacgtataaggttcctatagaaaaagagtgtaacaaatagtcaaaaaaaaaagagaagcagagcagacaggtgggaaaaaaggacaaaagaacactgaaataggagcagacagggagtataacaaaagaaagcagaagcagaatctctagtttcttcctttcttctcactctatctccccacaatgcatggatgggatatggccatccatattttgttagattcgacgattcaatttttttgtttgatttgtatggatatgacgatctaatttcttatttggttggagggatatagcatggatgggaaaagcaataagttagtaggatccatttgtcatatatatatatattttattaaaatataatcatccgaaatcttattttaaaaatttaattgcaacaaacataatgttagaacaagcagaagaaaggctctaaaatttttacatggtaaaaacggcaaccgcccaagaaggatgggccaaatatgcgtgtcgatcacgtcgcttgtaaacctgccgatccagcttcttcaccatgacgacccaatcgccctcaccatcatccgtagtattctccaccaaagagtaagtgcgatgaacgatacgtgctttgcccacctttcccacggaagcagcagcaatggatcagaactcgaaagaagcgaagctccccttccccatggcgcacagaaggttgcccggaacaatgcggcaattggatgccaccaccacccgcagctcaacgatggtcagctccttcttccccgtgacggccgagatccccaccaccatgcggtacaccgcaacgtcggcggcggcggcgacgaagcggtggtcgtcgctgccgagaggcaaggcctggccgtcgaaaggcaggttggtgtcgtgcaccatctcccactgctcggtgtccatgtcgaaggcgcatgtgcccttgtgatcttgctgctgctgctgcggcggctgcaccgacaccgagaggaggatgtgtgagccgacgagggcgtacgccgttacgcgcaccttgggcgggtcgaggaactccagcgggttgaggcggcacgggaagagcggcggcgacggcagctggcgccacacggtgtggctgaggtcgtcgaggacgaaaaaccatggctcgaaatccagctgcctcacgacggccggggtgcgggagagagcgtagagcttgccgccgccaccgccgccgccgccgtcgtccgagatcgagatgaggacggggttcaacttggggaagacgagtcgcgggccgccgcgctccgtggaggcctcggggtcgtagacggtggtcaactccacaccgacgcccacgatgcgtgtccccaccgcggcgaacgacatgccgcggccgcggccgctgccggtgtctgttggttgattttatcggctaatgccggttagttaggatatggttaaaatcctacgggtttttctatcctaataagatacaaactaagagataaatctgttttgtgtgatcggtacaaaatagattcgaattttagattgagataaacccccgagccctaccagtgtcgctatataaagaaagaggagggaggctgtgtaatgactcaactctctctaaccctaaaccctaaataaatcgtccgatcgattaaacactgaaagaggttcgtgaggtatctcacaacagaagaaacaaaaagaagaaagaagaagagcaatggcttcattggcttcatctcacgtcagttagataaattaatttccgcataagcagaaggtgatcatgtttaggctaagactcaattaattaattggattaaatttcaacattgtggtatcagagccttatcttagccttcatgttccctcataatcacatcatccctgtgattagaagccacccttacaaagttcaagattgattcggcatgatgcaattttgaataagattagattaatttccttaagtcttggttgcgtattaagccatgttatgctggttgtctcggccaacagtagaaacacaattaatgaagagtttaatttcgttgcttagtagtagaatttgagagaaagaagaggttcgggataaacaagattgaaattcccaattctcacactaagaattcctagaccgaagctaatctttcggctagcactcagcaaaccaagaaataggggataaactagattgaaattccccactattaagcaaaaggggataaacaagactgaaattttccgaaatccccaataagccagatacaatcggccctaaatccccaaatgaagaaccctaattttttttgggaagaaccctaagtcacaaatacccgaattaaatccaaattcaagtcaaaattaggtttgagttcgggttaattactggatttagaccccctaagcttgccggagctctccggactcctcgaggtcgcgccggttgaccgccgtgtgcgcgccgccttggacctcgtctctccaccgtccctcaccggggtcgggaagcgtcggcttggcggctgccttcgggcctacccccccccccccccccccgccgacgaggtccggccgcatcgacgcttgccgtcgctagcgcgccgccttgtcggaccgccgacgccatagcacacggcttggggccgccctcgggcgcgccccccagccagccgaggtggagccgctgcagcgctcgccgccgcacgcgcgcgccgcctcgccggaacaccgtcgccgccatgatcgccgccgattccactcgcttgctcgccgggagattggatcgggggagagaaggggagaaatggggactagggttagggtttgacccgttcagcgatttcagtggcaaaggcgaaatcttggccatccgtttgatcagacggctgtcctcgctcccgcatcgggccatcgtcttcatgggccgcgccaatctgggccgcgtccacctaagcgccgcgcgcgcacataaatgggccggtccgttttgggccggctttttgataagattgggcctttattttaatttattaagcccgcgaatttaatttctcagaatttatttagccccctttttatgggccggcttaggaagtgatgggccgtattattattttaagcccgccatttatgatttatttatttccagaaattcatttgtgagctttcttagccatttaaattgctggaaagaaattcatggaagtgatgggccgtattattattttaagcccgccatttattattttaagcccgcaatttatggtcaattatttgatcactcaaaaaaaattatttctagttaaatagaaccaacgggaagtttagccagaccaacgttaatatgatttcatgtcaagattattatttccttaagccacttaatttatttctagttgaatggaaatttaactagaaagtatttatgatttcatgtcaacatcattatgatggtcattgccttagtaacttaattatttatagtcgaattgaaccaacgagaaattcgactagaaaacgttaagatctgaatatatatttaacccacattattataaatgcatgtcaattatacttttttttccttaggtattttctaccaaatggtgatataattaaggaattaattttaagattactcataattatttatgaccaatggtgttttgactatgaaattctaagtttattttgcacatgattgattaagccatagtaaactaattatatgcaattatcaatgcttattatttaagatcagttgcaatactgagtaaattatttctagataaatggaaccaacgggaagtttatctagaaagaaatgatttcattaagattgttatttccttaattattgtctacctaacgatgatgtaattaagggaagaaatcaaagtattatcaattattattttctctgtcattttttatttatgccattagtgcattaactccttttatcacttctaccttgcggtgatgtgatcgaggatctaatctatccgtaagcttaattcctttaccatttctgcccaacgctgatatggctaaggattttaattttaattctatggcatcactaatggcatcatttcctaatcatttctaccgtatggtgatttgatttgggattttaaattatttactttatcacttctaccttttggtgatgtgacttaagacattaatgtttattccctaatcatttctgcccaacggtgacttgattttcgattataagtaatctcatctattaattccttcgttttttctctg

SEQ ID NO: 28438 - DNA, 9627 bp, Oryza sativa
gtaagacgtcattgaaattgtgccattgtcgcttatgtcacatacctaggggagtttgaaacgtctcatgagatagagatattctttcccttaaattttaatggcgttgtttagctttaagtgtaaatttcacaaagttaagatattagccaacaaatgattttttatggctatgtttacccattagcgacctccgatttcctttaagaaatttaagacactaaagctaaaatcaaatgaagttatgagatcggattatggtggtaaacactaaataaagcttgttcaccttataagacattaaaaataagcattcatccaaatggttttcgaaccatgtaagaacaaattgagatggatgaacaaaataagacattaaagtgttcatctaaatggttttcgaaccatgtaaggataattgagattgatgaataaaataaagaatttagtagaagtttctaaatgagtcaaaatagtgggccatttaagtgggttaatgaaattaagcccgactctgatggaaatttcgaacaatccaagtgaggtggacagctgcatgaaaattaaaggtgggaaatttcacaccggtactccatactaatgacattttattgtcaagcaatacatattgctgttagaaattaaaggaaatttttccatgaattattttggtctgaaggagtactaggtttatatcattaagtcatatattgacataaagaaataattccagagaattcagttaaagattagtcaagctgaaattaagttataaagataatcatttatgattcagctgacagaagcttgagattagctcaaatctggatgcatacagatttggcatacattttactgggaatcgtggcagtattaattaaatccagactagaccactggtattaagaatgttttgtattatttgcaaggcaatcttaagtaatatgctcatatttctaaagtccaatgatctcagaagtttagagacatttggacacttattttgtaagatgtgtggatatttataaagattatttagattaagctatatccacacgtaggggagcaataaccatggaaaagctccaaaataatctcttactgcatagtcgacgatgcagttagattttaaagcatgttatgattaatcatatatataagaatatttctcagaactaagagtggtaaatagcgcttataaaccactcaaaaaggtgtaaaccactcaattatactgtgttataagttgtgcactaattgaacacggttttctattctactagcaacatgttatgtgttttttgcctaacacattgatatagttgtgaaagatatgtcccaggatcgaattattattaagccaagcttttgctcatggatctatactctaaaggctcataaagttaagattaattaagatatgttctggctagtacatgcataaataagagcctcactaagatcctggatgagggggacttaatttttcaatcaacacccactaagttaagcttgagtttatttgggtactatagtgaagtataggtcttgttgtctcggtgacgcataatgttgttgaagacacattgccttggggagctattttatttgataaactcgtcagttagtctcaaaatcaaggggagaatgttggttgattttatcggctaatgccggttagttaggataaggttaaaatcccaccggttttcctatcctaacaagaaacaaactaagagataaatctgttttgtgtgatcgatacaaaatagattcgaattttagattgagataaacccccgagccccaccaatgtcgctatataaagaaagagaaggagggaggctgtgtgacgactcaactctctccaaccctaaaccctaaatcaatcgcccgatcgattagacactggaaggggttcatgaggtatctcacaacagaagaaacaaagaagaagaaagaagaagagcaatgacatcattggcttcatctcaggtcaattagataaattaattttcgcataagcagaaggtgatcatgtttaggctaagactcaattaattaattggattaaattccaacagtgtcaagcaggcagcgggcggcagcgctggcggcgacctcgattacggagtgggtgggctcatcctcgactcggccgtgcgccaacaccatgtacaccggtggctgcggctgcttgtcgggtgaggaggccaccttcctcttcttcctgttccctgtacgaacgcgcacgagacgaggtaccggcgccggcgttggctccggtgccgcgagtttgttcctcctcttcttgtccggcgtcaccatcttcttccctcgattggattcggattcacttctctctattactacgtatcaaagacttctctctattactacgtatcaaacacgtgatgaaaggaagccctatccctagtgggggttgctttcgtcggccggaggacagcatgggcctagccgagactgggccaaatgttactactacttgagactggaccaccaagacagtccaacatgcgtctcgcctgctaaactccccgttttttttcctttttggaacattcgcttgcaagtgcaacaggcgattgatagttggcttcctagctggcgcgtgcgcgcggcctgagggtgggttttctttttttctttctgttgtttttttcactttcggattttcattttttctgtggttttttttaatcgcgtatgccggtggatttttttccgtggtattttttccgacgagtatatctaacataactaacatgttagttttagataacgacggcaattaaaataagacatttttctagaagatcttttaagtaacagaatgaaaaaaaatctatacgtgaagttaaattttgaaaacttttaatctagatttaaaaacttttcaacttgaaatttgaatttttgaagccaaaatttgaaaactttcaacttttcatctcaaatttgaaaaaactttcaactagggtttaaaaactttcaactcgagatttgaaaactttcaactcgagattttgaaaactttcaactcgggtttgaaaactttcaactcgggattaaaaactttcaattcgagatttaaaaatttttaagttaagatttgaaaattttcaagtcaatatttaaaaactttcaacacaaaacattttgaaaaacatgtgttgttggaagattaaaaaagtaatcagaaaaaagcggaaaaaaaaggaaagcgaaaaaatcacagaaaaaagaaagcgaaataaatatttaaaaagtaatcgaaaaaagtgaaaaaaggaaaggaaaaaaatcatggcaaaaaagaaagcaaaaaaaaagaacgtggtccgcacgcatgctcgccggcgctgggccttctaggcccgaaacgcgcaccggtggcgcgcgcacgaattagctatcgcgttgatagcatgttgcgttcttttttcaggttttttggcatgttcactactacataatcgaggacaatttcccctccaaattacacgttggccatagctgttcgcgcatgcaaaaaagttaacccgagataaatcaaaggcttcttaaggggctgcaagcgaaaaactaattttgcatgcgggcaatgtggagagcaagtgggaaatagattttttttctacaccttttttctcttacgcctcctttccactacacctatttctcttctccagaaccatcgttcgctgcttcccctttctcctctcctcatgtcttcctcttccctctctcactccctcgctcatctcctcccttcctctcccatggtggcggccggctcttagggtggcagaggtggcggtcaacaagcgcagcgaatctggcaacgactctcgccgggaagggtggatccgccatcggcgggctcagaaggacggatccgccctcacttgcagcgggtgcaagccgtgacctcaggagtggccaacgacctctttcctctagtgctggtgaactcagcagcaacggatctagcggtggggagctcggcagcagcagatctggcgctagggagctcggcgacggtgaatctgacgggttctccccctttgtgcgcacatggatctggcggcaaggagggtgttggcaatagcgagggcgtccacgcttacctcctcaaggccgtgaagtacaacaactgaaccggtgtgctccttttcgacgtctttgtcttcgagccgccaaccgagacttcgtctaatgcgtgatgccgtgcagttcctctagcgacagcgacccccgtgagacatggatgtgggaactagaggcccgctcgacggttgccaaggcaggggagacggatttgtgcaccaaccgcagtcgattgaggatggcagcgatggccgctgagcacgggagctgcttgctattgtagcctacccatatcccttcacatttgtcatgaaaacacgactatcacaaaccgcagccgcgcctcccgctgtacctctcctccccgcggtgctgtcgttgcctacacaacgccaccgatgtttgtcattctgccaatgccaagggtcgtctctccgctctagatcgattagatatgattagtttgccgattggattgaagatgaatcatgaattactgaaatatccttttacatttggtggcaaattccaaacgtgccctcattcataagtatatactactagtatattgcactgtaaaagttcccctttctttattgctcatttttgtttgttcactatgtaaccatctaccataagcatcttacaacgtttattgaaactaagaacataaggtcagaggcttagagctggaaggtgcgtggtcgactaatcaatagtattgcctattttctgctagctcagcatttgctgtcctagatttgggactcctaattagcaatacgttgtaccggttgatcaaccagctattctatgttgaagaggcgtacgtgaaagcatctcccacttgtgttataggccagaagattctcctcccttgaggatgatcttatgcttaattcagcaagggatggaatttgacttccatccgtaactatttctttattgcagatttgcagaggcacaagagcgtgccagtttctattattaataggaagaagaatcactctcctttcgatgttaaagacgtgagttgattaaattaaatttctaaagttaaataagtttatgatattacttttcaaggtattaaatctacctgtaccatctctttatctaaaacatttgtgaaattatttatgatcaacgtttcaaaagtctaatcgaataatataattaaaacatcaaatattttatgacggataatattgcatggcacatacactactagaaaaataatttttttaagtaacgttggccttttatttttccaggcgggtatgaccattggagccaaatgaccgcctacaaaaatgtaaacccggttgaaactcgcagtccgcctgtgaaaatctattttcacaggcggaacatttaagcggtgtgcctgcaaaaataccctttatttttgcaggcggaccgatgccctttatttttgcaggcagaccgcttaagtggtctgcccatgaaaatcgacatggatataaatagacaccacatcacatcgattttttctaagtgtcacaggctcacagctctcctctccctcaggcctcaccactcctctcccttagctccctcagcatggcgatgggaggcggcggggttggcaatggcgaggcgtggaggcggcggggtcaacggcggcaacggcgaggcgacagggtcggcgcggctcccctcccctctctcccagatctagcccaagggggggaggagggaggagagattgtggtggcggcggtcccccctccctcccagatcaggccagagggagggcggcagcggcagcgacagtccccctccctcccagatccggctggaggaggccaggagagggcggcggcggcggcgacatgccccgtccctcccagatctaggcggagggaggctgggggaggacggcagcggcggcggcagttcccctctctcacagatctggtcggagggagggcgagggtggtggcagcagcggaggtgggtgtagcgcccgttccgtcgtggcgcctagcgggaaaactatctcttaaaaaccctatttgcgaatccgtttctttgcttgttgtctagtgtccgtgccatctcagatctcaaatccccgatctatcgtcaagttcaatcccgaatccaaatccttcccaaatcaaatccctccgcaaaagtctatttagcctccctcgagttcgatgggccgaatccctctcggcccatctccccctccctccccgtctctctctctctctctatccctctctctctctctccccgctctgcccgtgagccacgttgagctctccctctccactctcgcggccgttcccgccgatgccgcccaaatcgccgcgccgcccgcgcgtgcgcgcgccgtggtggccgaccggccagtcgccgccgccgtcagcgcctgccgcgcctgccccgcgtctgccgcccgtgtcgccgctccactccaaaccgccccgccgtcatcgccgtcgtcatcgactcggctccgcctctccccgtgcgtgcctccaagggacggaggcagagctcccccccctctgccgcgtcgccctctctccctcctccttttcctcaaagcggcaaggaggcaagccctctttctctccccctttttcccttttgcctcccgccggcgtcatcctccccccctcctgtcgccgttttggctgcgagcgccgagcgccagctcgctcccttgactgcccaaggtcggtttccaaaccgacatcgccgccctataaacccaagcgcctcccttcctctttcccctcccaatcttccccgtttctcgcccgcgccattgctgtctctctcgccggccaccgccgtcgcgtgtgccggaggagttggtgcgcgttaggacgcggaaggggactccaggcactcgtcttcttcctctcccccagcccgaggccggagagatcgctcccgtgccgtcggcccatcgtcactgcgccccatcacccccgcacggtagtgcctccctccgttctctctcctcgttccatctcctccccttagactcgggtagtagcacgagtagccccccgtagctagccggcgccgccccgactgctgccgtcgctcgccgtgtgctcgccgcagtcgccgcccgagctcggaagcgcctcttgtcgccggcctccctcgatgcgattcctcctaatccggcgcaaggggtgggttcccgtagccgcgttgatgctctcgccgccgggaatcggcccctcgtgacctcatcgccgtttcccccttctcccgctgtcggttgccgccgccgcaatccgccgccgtcgagcatcccccggcgaatccgagccattggctcgtctcccctcgtcctgtgcaacatcccggtgtgctcgccttcgcctgtatcgccatggttcgctccgccgcttgccgctgtcgtccgctatccgttccggccggcgtcgtcgtctacctcccgccggcccgcgtggcagccacgtaggcgccacgtcggcaccacctcggccgcgaccgggtcaagcagaccccggtccgccgcttccctccgccccctcgcgcgtgcggtccaccgcgagccgagaggctgcgcgtgggcccgccgcaccacgtcctccgcgaaccgcgcgcatgcgccgcgcctctctccccaaaccctagcacgccccgcgtgcacctcgctcacggtgagccgagtcgccgacaagcgggtcccacacgggaccacgcgggatggacccggcctaccggctctctctctcccctcccagcccgcatgtgcgccttgggccgccttcttgggccagccggcccattaagctcggccgagccgccccattctctcgggccgcgccctagccgcccgagggaagtctaatttccctccctccttcttttcttttcttttctttttcaaaaaggatttaaataaatccttttcctttagaccaaaaatccaatattcttagaaattcaatatcttcccaaccgtaaatccgtttgactccattcaacttccaaaattcctcaaatctcgagatctatctaatggcacgcttagaggtcaataatagggatttaatttcgccgtttgctgagttgtcccatttcgcgtgtagtttcggagcccgaagacccgcagtgcgaggatttcgaggatcaagctcaagatctcgagcgaggcaagccacctttgaacatcttgagcctatattcgaacttaattatgttgcttgaaaaatattatgcattgataggatcgcacttagtctgcttgtcccgtctgcaaggcagattggcggacctacctaatttgttgcatttgacccttccattgtaattgttataccatgttcccttgtacccacctagttgcgcctcggtaatcgtgcactctgcacgggtatcgacggtcaccttcaaacttaaaatctgagaaacatcttgggtaaaacttgggttttacaaaagacttggaaaacccgacacctgggtcggtgcttgcgaactaaatgaatttccaaaaccgcggaccggggaacgtaccgggtgtacggtttcccgctcttgcacttaaggaccgtttccttggaatttcatccgaacataagacaagtacgaccacatgggtggaatgggacacccctggctgagtaactagcttatcgggggagccatgatgctaagagacatgtggattcgccagggtggtgtcggggaggacccctgggcttcctggcacagtatggtctgggacctaatctggtgttggtctgggacccctctcgttggcatatggtgaacctatgtcggctttcgaaatgccttgtcatgaaagccttaaggtctctagtcgtggccgttctgcacgggctggatgatctgggttagtaatatcgtgtgggtaaagtgtaccccctctgtagaggttattaaaactgttcgaacagccgtgcccacggtcatgggcggatgtgaggtgattcctagcgtagttttgtttgactactgccttgtgaaatttgctgttgtggaatgggtttgatgtttggaaaatctgcggctgatgggatcagccaggccccgggtggccgtttgaaagctgttggccgggtgccaatcttgatcaatttaaaagactgaaacattgcacatactccgaccggacgagacgcactgtctcatccgtgtcgtttgagaagcactcccttagttgtttcagaaaagagtttaaataaaatcaatcgcaaaaaaaaaatagcggcctttccttgaagcctgcattaaacacttatttcccatggcttgctgagtactcctgtactcacccttactctatataaataatcccccctcagttgctgaagaagacgaagcggatcccgctgacgaggagttcttccaggagcaagccggctacgatgagttttagggtttcggcctagttcccaagtcgcgcctgtgatgtttggtccaagtcttggcttccgcttccctttt

SEQ ID NO: 28439 - DNA, 748 bp, Oryza sativa
agccactgagtaatttccatacatggaccgtcaatgcccacaagattttttgcatcttcatagagtgcaggtagacgcggatcaacttccaccactttgggaatgcttgaggtagatacacctagattggcatacctatcacggcgctcagccacctgcatgacacgagccttgagttcttgaatcttgtcggcaatctgatagcgagcacgcaaattcctgagcttgcgtgcagtcttcctgagcaagccatccttgttattaccatcaccaagatggtacatgaagacatcaatgcagtcctcgatgtcgtagaccatctcgcggatgtcattcctccacagcttctgctgtccatctagcttctccatatctgcaagattctccaacacagcattcatttcggtcaactcatggctaaggaactcaatgttcttacgcattcccttgagtttcttgcacttgttgctgagcagcatggcaagtttggtgaggagtggcgccatgacccccatggaagagttcactgctgccatcataaaaccaatgtgtttgctcgcctttgctcaatgggctagctggtcagagtggatgcctgaatggagaagcggtgctatcagtcaagcaatatattggtccatatagcctaccttaatttcttggaagctcgatcagttctcaattgctacctttggggcctgctattgattgacatgttggccattatatgttccatcatcaagaaatg

SEQ ID NO: 28440 - DNA, 860 bp, Oryza sativa
agttgtcatctaggctttcgtcgaagtcgtcgagatccgggtcgttgtagagagagctgaactcgtcgtattccacgatgtcggtggggcgcgagtcgacggtgggagagctgtagtagccatccagctgatccgtcgaaaccgtgccgagtggttggaggatgacgccgacttccctgaagctaggcgagatcggtgttgaagccgacttccgcctaggcctacgggatggagacgctgtcgtgatggagatggccgccaaatcatcggggagcttcatcaagaccggtgggtaagccccatcatcttgatctggtgtcgttggagaagatgcgatctcgcccgagtggtttgaagccgactcgattgagatggtcttggggtaacttttagccgcgtttgggagtccaaacgggactgaaatccggttctctcccgactggtttgaccccgagtcaaggagagagatcttgccgaagttgttggtgacgaagtcgaggctgccgaaccgaaacgtctgcccgggtgggaagacgaggtcgtcgatgccggagacggaacccattgcactgatcggcgaaaagcttgacgctacccctacctggcgcgccaactgtcgaaactagatttcggcaataataaaagggggtggctatcaagctagaaaagtgtatgggtttggagacaaaggatttatacaggttcaggccttcttattcaagaagtaataccctactcctgtccggggatgaatccgccgagtgtattattgattgtatgatttggagaaaatcaacatccgcccctagaggcacccggaccccccttatatatggaaggaggggtaccgagctcgaatt

SEQ ID NO: 28441 - DNA, 4596 bp, Oryza sativa
ctgaatcaaagcggtagcagaagttctcctagaaaatgcaccagcaccaagtccagatcctgcactggcaccagcatcaccaagtccagaacctggactggcactagcaccaaatccagaacctggactggcaccagcaccaaatccagaacctggactggcactagcaccagcattaccagcaccaagtccagcaccaagactggaaccacaagcagcagcaccaaaaattttcccccaagctgtctttttcttaccagaagaagagcttggggttgccctttgtaatctcacagcaccaaatttactttcatacttagcatacatgtcagacaatgcagccctaacctcatttaaatatgcagagtaatcaccactaataagttgtcccataatttggagaacattgctaaaacccctgatcttggccctaggatccaagataaaagcaaatgaatacagaaatggaatctcagaccagtatgacaagaacttatttttcatgggaacaacaacatttctaaggttccaatcattctcataagtatttagatgtccagcaatctcaagaatgtgatgcataattaatggagatgttggataataaacaccagacaaaataacagttgaatcataaaattgttcaaggaataaaagaacagtttcagcaattgtccagtgtaaatcagtcagtaatggctgaccatcagccattggatggtgagatgcaataaacactgaaaaaatgaccctatgtggcaagagatgcttaagcattagataagttgcattccatctaacatccatgtccaaaccaaatttacgaggacgaatacctttagcaatgcagaagtttttgtataaagcaatgcgctgattagatgcatttataaatgaaatagcagttctaaaatcttgaagcatgggtttgaagatttctagaccagccttaacaattaaattgatgatatgacatgcacaacgctgatgcaaatataaatcaccaatataaccagacagagcaggtttaagactatccattgctttagaattagcagaggcattgtccagggtaatagagaagatcttattagtcaaaccatattcttgaacaacagaaagcacacgttcagaaatattttcagcattgtgtgacacatcaattagcaccagtcccaaaatcctcttctctaattgccaattagaattaacaaaatgggcaacaacactcaaataatcctccttagcattaccagaccatatatcagatgtcaaagcaacagagctaacagacttcaaagtatcaataagcatagcacgtctcttgtcgaagaccttaaaaacgtccctactgatagtttgcctagagacaacactaaatctagggttgtgagcattctgaatatactcctcaaaagcagcagattgaccaaaagtaagtggaagatcctctctagcaatcaacctaaccaactcagttctagccacatccggtttatattcccattgactaacagaaccatcagcattaaacctaagcatggactgagacaaagcaccaacatttctaggtttgcacgatttaatatgcctaagcaaatgtccagtaccaccagttgaacgagcagacaatgttttatgacagtaattgcatttagcagaaacgcgaacctgagcgccattgcgctcttcaaagagttcttcaaagtcgtcccatacctcagacctggacctcttgttgctagcacttgagccagacggagcaccgttgccatcggcaccggtaccatcatcgtgtggctccggctgcgacagatctctcagaggtgaagcagtgttgccaaacacctcgatgcgttcctcctccaagtcatcttcgtcatcaccctgcgtccccatcaccctcgcctcgtagttgcatgaggttggatcaccatccatcgcaggcactccggttcctcaacggtggctgccgcctgccgctcagcgacctgcaagaacaaatgaaacaacgacgagaacagagagtagttacggatctgatcgaatagagaaaataaactaaaaaaaaagcttgtacctgcgcatccggagcaccggagttgccgttgatgatagagatccacagatctacgagaagacaagaggagagactagatttggggggtggatgagtggatctgagtatctgacgaagagaaacgatgagggttgcaaaaaaaaagtacagaatggagaggaaatcgacaatgcgaccgtcgatccggtgaccggagaggcggagacgaagagctcacggtcacagatcagccaaagagatgaaagaaaaggatagagaagagacgaccctcaagcccccagcgggagcccgctgaccctcggtgctagatccggcgaggcatccatcggagacgccgacgaagagggatggaggcgtggagggctgaggggtcggagcctggaggtggaggcggagcgggcgagcggcggatcggtcgagactccagactgatgtggctagggttagggtttgtcggtttgatgcggtttggggtatttatacccacccggcataacaggcctcggtcgggccgtgcctgccgttggaccgtgccgggccgtgccggcccaccgtgccgacctctttcgtgctgggccgtgccggcccaccgtgccgagggagcggcccaagcacggcccggctgttgggccgggccggcacgggcacgaccccagtcgggccgtgccgtgcctgggccgggccaatttgtcgtgccttgggccgggccgtcgggccccgggccttatggccatctatagcacgtccccagaaagccacgcattcgccggcgcgcgccatctctttccatcccttcggctcgtactcgtagtcggcggattcttttcttggaacatcgtcgtcgtcgtcgtcggattcctcgacgtcgacgaaggcgtcgctgaaaccgaagaagtcgtcgtcgctgctgcggttggactgtacggaggcggcatcatcgcctttgttctccgcgtcgtcggagttggattcctcgacaagggcgtcgctgcggctgccatcttcgacgggaacggagtagccgtcggaatcgtcggcatcgtcgtcgtcgtcgtcgccgccgtcgctgaagctggagtcggcgccgtgcgcggcgacgtcgctgtgcaggtcgatgcggcgccacagcgcgggctcgtcgcgcgcggcgcggcgccacgaggagcacgccaggccggcgccccggaggatctcctcctggccggccgcggcgaagacgctccacaggaggtcgctcggcagcgccgcccagtccttcgacgccgccgccgccggcggcgaggcggcggccatgacttgctagctagctagggtatttttgttgacgcagagcaccacgtgtctacgtcttcgtgtcgcctcacaaggcgtgcttatatatacaaacacgtggctacgcggaatcctaattttgtttttttaatcagctccctcccctccatattataagtttcatattataattcgtttgattttttttcaaattaaacttctttaaattgaacaaagtttataaaaaaatattagtataaaataaatatattatcaaaataaatttaatataagatatttaatgaaactaatttgatattttagatgttactaattttttctataaatttggtcaaacttaccaaagtttgactagaaaaaaccaaatgatttgtaatatgacacggagggagtatattctaatcgtgcgtgtcactgaatgtgctgtatcagaattgtattagaaacagggtttgaatctttgacgtatttttattttagagctagagcgtaataggagcaattcaatactcacgactttgacaacattcatatggagtacaacacatatcagggtttgcattacgtcggtaaccgcgcggtttttgcggttaccgcagggtacgataatagaaaaaccacggtaacctccttaaattcaaataaattttaaaaataattttaattttaataaattttgtatggttttgtacggttttccacagttatcgcggtaaccatacttaccgtggcatggtaaccccggccggcggtttgggaaaccctacaacatatacttcatgagaaaatcgaaatatcatcatgaactgacaagtgagcattggcatcgcaaaattcaccccttttgtttgacgtgtctaagagattgcagcttggggaaaaccgtggaggatccacctattatatgagtctaattcaactcaagtggcatgtgttttcataaaactttagctgcatatctccgctatatacatgtcctgggtataacacctaccaaacattttagttgaactacgtgacttgatttagaatagctacattagcgcaagctgagttgagttagataagttacattagcacaagttgcactaacaggggatattttggagagcacccaactataaaattagaagttactaagaataaaacccacattctaacaacgcattttaaaaaaacagagtgaagtgaaacaaaaaaggctatcacaacattctgcacgc

SEQ ID NO: 28442 - DNA, 2239 bp, Oryza sativa
caaaagaggctatcacaacattctgcacgctgtttaacaacagggcagctaacaggtagcttaaaatcacgagcttacagccacaaaggcagctaacttaacctcggatcatacaaccagttaagtacttaactagagataaaagttattggcagatgtaacgcatgccttcacctactttcatggttcttatttttcccccacaatctcagccagctcaccaatcttacctagagttcagatcgagttctcctgatctgcgccagtcctcttgcatatcagagttcccattctcaggttcattttcatcattaaggaaatcttcagatggatcttcatcgtccctttgagcatttccccatccatcttcaccttgctcttgcatcatctcatgactagggccatcttcgccttgggacgctgcagcatgggccctcaaagggccatgacctatcatctccgagtgcgcttgggcctccgctcgagcttgttcagccattgccatacgcatcttagcttcagcagcctcacgacctgctttctcccttgattctatctctgctcttagccccatcatagcttgcttttcctccattaacaaagcctgctccagcatgagccgctcctctgatctgaactcgccgatggctcttttcttggtcattatattgtacgccaaaacttgtttctcaaaagtagttgtgaactcagcaattttgaccagaatgttatgatcccattgctgcaggcgcgaaggaatctgtccagttgtatcactgtcaaggattctgtcatcttcttcagcctcatagtcagcaaccacatggtagggtagtagcctagtatgcacaatacataagatggtatcagtaacttcagatgtcatgaagcgatcaaataatctaaaagtattgaaaccgcacatttgagcaaataaactcaatccaagttatctgccaattcagaacttatgctcaaacatggcatatttgaaaatatctaagatgaaaaatgttcttgaaagaatggttgttaacattatcctgtcagaaggatttatataattgaattctctgacatgtaaagtgaaaatcattgattcccatagttgtattttcactgacagttgatgaagtgcacccatacaggaaaaagagaattggatgagacaggtgagatggtctacccacattggggacccccaccatactcagcacataaagaatttctgcatcacaactaaaatgtttgatcatgattcgatgagctatttcatcacaacactcttggctgcactcctttgcatccttgcatgtgatatcaccagtgaagagtgtctttcttctatcacgaggctaccccttcaaagcatacaaggctattgttgggataatggcccagaagaatttacaggtcaacagatttttgttttgacataactgttagtgtaatattctttactaaatgatttatcagacttatcagttgtttaatgtattatgcagtgttaagagttgtaggcccatatgccatgaggaaatagggcttcactcctgctatactaatcactctttagtgacatttggataggtgatgggtttaggaaaagcatatggagtaggatacaaaagactgggtttggcagtctgggtctataggtgttgatgtttaattctcttcccatattttgtaatcactccacttattttggttcggaaaataaaagtaaaaggaaatcacagaaaagaagaccagatcaaggagcgagagcagtcgagattagcagcaacattaattaggaatacgaccggctgaatggatgcgcagctggcaaagaaacgacgatcctgtatcaattcttcacgccatctcgcctaggaaatcagatggcgagtatctcagagtcaaaatgaactcaaggggatgattcatgaaggtgggtcttcagccgatggctaccgacaacagaacaacccacagagcaacaggcccagtgaatgggtgtcaacagcagagacatcacgctaatgctcaataggtgagtaaaaaggtgctgatgctctttttccacagcccaaccacccaaccaaacacacattccattgtgtttaggctttagaatcatgaaaaaagaactcatttttgtcccaaatcccaaatcaaaacccacttctcttccttttcctcctaagtcataacagggataggagatcccccgaaccccccttttcatttccac

SEQ ID NO: 28443 - DNA, 7942 bp, Oryza sativa
aaagtattgaccttaataagagatgcacgccacctaatccacctgaccactgacagaattacttggaaaaactagtaacagtactgtgaacgttagcatttatcactgaatggaaagaaggaaaaaattgccatcttaaagaatgagtatgtggttttgtctattcaacttcatttatgttgcataactcatgattgcttggacttcatgctttgcttataataacagaatcagtagaagaaaattagtcacagaaaaaaagaatggattatgaaaaagaaaggttaaggatgactggagaagttgcaaagacatccttatcagtagcacaaacattctatagcaaacctacgataaagcaatccatgaaaccactcatggaaaatctagtcgtaattacaacttaatataagtccagaaactaaagtatgccacattaataaaatattaaatatatatgaatcaaaactaatcaaggactatagccctaaaagataaccagcaattcgtgctatactggtcctaatctttgcaatgtgagtttcactcatgatccacatccagggtatgaaattgattgtttagatacatgcttgccaattcggtagattaggtcaagcttgtgaagggagggctaagaggaggatctttgtcattgtctcctgtagtatgtgcgcgactgcaaataatttttgttaaccttttagctgcttttgtgggaatttgccttgttgatcacttttggtatatccagttttgttctacagtaatatacctgaaattctgaacctgccttgctgttagcttcaacaggttgctaagcattaaacagtggagctgtatttgtttatattcatttaatttgaaccatcgggaaaagggaactgctatatctgcctgtgctcatagaattttttgattgtgctgtctgtttatatagaccttgtatgtgtttactcttgattttgttttctgaaatatgcacaacaagaccttgaccaggaaaaaacgttgccctggttctccagtcctagtattcacttttttggacaattttgtttgatgtgtttttccagagttccaagcattagcatgtaacaacatgcacaatccaccaaataaaatggaaattacttaacatttcttagatgttcccaatttttaatcatcaattggaaccccagaaacggcaaacaatccaaacaagcaagaataggcaacaaattcatctcgaatgctaatgctggaatcagtacaggtaaaaaataaaaataccctaatttcagccaagcaagcgaaaccgtactgatcaagattataggcgatatcatggataatggaagaaaaaggaaaaaacttcgatacggttccccacctgttcacggcatcctcgatggactggaagggtgtcttgatgtcggggttgcacacctgcatcacgtcctgcagagccatctcaacctcagggctctgcacccttgccacggctgccactgccgcctgctgctgctgctggagggacgcccacgactgcaacagcgacgggccccaggagtggatctgctgctgcggcggtggtggctgctggggcaggggttgctggaagcggatcgggccaggcaggggcaggtgggcatcgatgttggaggggaagaaggacatggcctgctgcgacagctgctgcggcgtcggtgtgtacccttgcccctgcgcctgcgcctgggcctgggcctgctgcatgaggaagatctggcgctggtgcagctggttctgcgccacggtggatgccgaggaggtcggggtggagttcgcggcggcgtccatggtgggggcggaggtggattggctagaggagaagatctgggggaaatggtggggcttttgtttcgggcaaaatttgttaaaccagtcctaaacttttttggaaaggatacaccagtcctaaacttgccagttggatgtgactacgcagataccttttgggtcaaaaccgtgtgggtccgaatggaaggtagtaatcttttttatgtgctccgctaatcaaaacagtgccgatttagtattttaaacatgactataacattggtaaaaatggtaatatctaaacagaaaatgtggtacacgccacttcaaaacacggcgtttcatgccacccagattcttaaaattggaaatatgccaccctgtaattcccattgtttttaaacaacgcaaattatatttaacaaaatagatgattacaaccctgttattgaaaaactaccaaaactaggactgatctgccttccatcatgcatgttaacaaatagaactcctgtggcaggcagccaaccaattttcagaggttacactattaaacttatggtccaagtattaagctttttatggtctggaagaaaaatggttgctgtgaatttaacaccttgaatgccagaggcaaccacatatatcaaaaggaaacaaatctagaagcgtgtatactgtgtgcccaactataccataaaaagataatagaaaaagatctggttaatatgtgcactaaaaatttgaaggaactcaagtagtaattgtatgcagttagtcctatcgtccacagacagttagaatatttgtgttctcaaaacatatttatataatacttaataatttttgcacagacatcctaacattaaaatcttttttcccagtttttctcataaagagtagtttcatacagaacaaacttgttggtacataaattggccccagtacccagaagcaactctttttctcaagaaaatattcgcactaataggtgcagtcatatttttctaagaaatcatacaaagatatataaggtataccccttccagtgaaaaaaatatgtcaatttggacatgtcctaagtcaaaacttcatacatgtatatcttttcaaatatttggattgtaagcaagaaaaatgaaaattgtatgtgtagatttgttacagaaagtacttttgtaatggagttaggttttataaatacgttgtaaaagaaattagtggtcattgttacattttgaaaaccatgttagtgcgcaaagctccatgcaaagaatgaacaggaagctctcattgtagggtggtcattgtgcctcatacatctcttggaatgcaatagggttcctataaatgttcccaatacaatatgcccttccatagttctacctaaatcattatacaatatagtaagatccgagcaaaataaaagagttttctactagcaaagaaaatactgctaaataaagtattgaccttaacagcagatgcataccatttattccactcaaccatggtcagcgattatttggaaaagctagtaaaagtattatggacctttgcatttatcaccgaatagaaacaaggaggaaaatttgctatcttaaaaaatactgaatgcagtttagtttattcaacttagtttatgctgcataacttctggttgctctgactacattctttgcttgtatgctcattaagcattttgagcagaatgctgaaacaagaatttttcagtcactaaaatggaatggatcagggaaaagaagttaagaatgactaaaacagttaaaaatcttatgtgggttaagaataactggagttaaaacatctaagataacaatctgctaagataaagcaatccatacaatcactcaagttactacacgaagaaaccagcttgcaattactggttagtatatgaccaaaagctaaaagtatgtcaccttaaataaacaaaatccccatcaatagaaaataaccagaggcacatatgccgaaaagcatgtcacctgcaattcgtgctaaactggtcctaaattggaccacgagtttcactcatgaaccacatacagcattaacaatctgctctgtggaaaagaaaagacatacaggccaaaatgttgtcctgatcctccaatcccctaatgcccctactattcaccttttgggagaattttgtctgatttgtttaacaaggaatgaagattaatgttaaaatttctaagacgctcccaaattctaataatcgaaacccaaaaaatgggaaacgatccgggcaagcctcgagcccgaattggcaacaaattcatccggaacgcgtagcctaaatcagtatacagttaaaaatttaaagcaccccaatttcagctgacgcagcgaaatcaaatggatgaggattaccagcaaaatcgtggataataacgtatataagaaaaaaaaaagatgcagagaaatttggtgcgattcccccacctgttgacggcgtcctcgagggactggaagggcgtcttgatgtcggggttgcacacccgcatcgcgtcctgcagcgccatctccacctcggggctccgcaccctcgccgcagccgccgccatcgccgccgcctgctgctgctgctgctgctggggggacgcctgcgactgcgacggcgacggggccccggagtgcggctgctgctgctgcggttgcggctgtggcggaggctgaggcggctgcggctgcggctgcgggggctgctggaagcggatggggccgagcgggcggaggtgggcgtcgatgttggaggggaagcgggacatggcctgctgcgacagctgctgcggcgtcggggcgtggccctgcgactgcgactgcgcctgggcctgctgcatgaggaagatctggcgctgaagctgctggtgctgcgccgcggcggccgcggctgcggcggcggcggaggaggaggaggaagtcggggtggggttcgcggcgtcgtccatggcgggggagcagcgaggagtgagatctgtgggggaaacggtggtggagcttcagtttcgggcaaaatccgttacactgcactgtaacacgcgtacgttttgggagaaaactgtatggatccgaacggaaacgggaggttttgctggatttttcacaatttggtctttttgaaaaacttatttcgtaaatagacttctaaaaaaacttatcctaaaaatgattctttttgtggtgccagccactctggcgccgtccttgtgctgacgtggcagggcggtgatgaggtggcagggggagggcatcagtgtggctggcgccgcccccctccccggcgccattttttttctcttctcctctatagcgtagaggagagagatgtccaacatttttatttttatttttttcacacttatgagcacacaagaaccaaccataaaaaaaataaactcgaataaatgaaatatgtgacttgtagaattttctaaatttctaccgaaaataggtgtcattcgggtgtcatttcttaaaataggcataactttctcatacagactcgaaattaggcaaataattagaaaatggcgcggcagttggcgcgtttattacttttataacgtgtatataacacttatgacttatttagaacatatatttattagttttctagtttttctacaattttcaattttgtcaattttatttgtttttaaaactcatggaaaatagattgtacatattttatggtttatttagaacacaataattttacacaattgtcagaacggctagttcaattctcgtaaaatttatttaggatagagagtttagttttgtactaacttatcgaagattaaaatatttccaaatatcataaggaaatttgatgtatttttgtaaaaaaaaatcacaaatctgaatattttttcctttacataatatttagtgtatatctctatctctagagggggtatgtggaaacatcataatttacccaatagagtttcatatgcacacgacatagcaaaatttagtttgatatatgcacatgaattacataacaaaattacttgtccaacttataaaaaaaatagcctacttattaataagttttatcttagggccatttataaatactccaaactgagggcttatttgtaaatttaaattttttgagatgaaaaagttcagcaaaattgttttggtagaactggacatttttctttatcgtctgcataatttttacccagggtgtgtaaaaatcataatttacccattagaggagcgtacgcatatcatttagcacaattttagtttgatatatgtacatgaattatatagaaaattttaatttgatgcccattgcctcatggcagagcaaaatttgaacttgataaaattagttgcgggcaacctatcaagcaaaaggcacctctcttgctgtttttttttctatccacgtttcattttattcctcgtttcaacaggtgaaaacaatctatctattttattataaagatagcttgaaaataatacggtatttgctttgatcgcatagaaattgttacattaattaataaaaaaatataatagttgtatatacgtaatataatgattgtatttatattaaatgtcacaaaactacaattatttggttaaatctaatcatgtttttaaaatatgttacaaaatatattgtataaaagctaagaattgcaaatttaattctataattaaaatatgttgcataaaacaatagttgcaaaaaagaagtacatgtaatcctagtgatatttgcgtgtgactttcgtcgagttcgggtagaatcatcgagagtttctacagtatttggtgcaccgtactaccatactatataggttatttgctcagtgaatcatagtcgaaaatactcattatttctcatagttcttgttctatgagtgatagggtgcaccataatattcaaaaactgctatccacttagcatactcattcatcagagtagcttggacgtaacgacaagagatagaagtgcttgctcaattacatcgagttagtgaacagaacacttggtttgatgatatgattgagcttctaggtccattataatttcgatattgaatgtatatgtctgatatactatagattcaacaaacttctagttcgcgatatcatcagtcatcttggttaaaattcccgcaaataattccaatatattttacgtaattatatatatattacagcaatattaattaaaaaaataaaagcattacaaataatcaataatcataaatgcgattaataaattttacaatcataaatatctgaaatataatttaagtgtattttacaaatttacaatgtcattcaaacaaatattccaaatacagagggccatttatatattttctagaaatgtcaaggtttgaaacgcaaagtttccaatgtagaggaatatgcgattaattttcgaaaaccacaagggccattttgcaaaatatatggagattttttccttttctactcttctttccttcttccttatctttcttcccttccttctctttctttttctttccccttcctcccttgatggcgccagcgggtgcagaggccggacgggcggcggcggcgcggcgggtgcgaaggccggtgaggcgttgcggctggccgtagacgtcgtggccgggcgacattgaggacgaggccgtgcggcggctccgtgcgatgtggaggccgggacggcgtggtggggctggctgcggcttcggatggaggaggcggtggcagcggctgcggtcgctcgcgaacacggatccggcggcagcggccactattgcgcgcggatccggcggcgacggccgctcgagcgcgcggatccgggtatgtgccccacggcagcggcgcgccctttcactccctctccttctcgtccccttcccctctcttctgatccggcggaggcgtcggtggcccggttgcggcgccatcccctccgccagatccggcagcgagaggggaggcggtggcggcccggcggcaggaggcggtggcggcgtggcggcgggaagcggtggctgcccggtggcgagacgattatttagattttagatattcttgtgtgatgttttagtgaatgatttctgtgatgtttttcaatgtt

SEQ ID NO: 28444 - DNA, 5668 bp, Oryza sativa
gaattttttttttttggactgggtggagcaccggatgaggagggccacgtggcacgatgttaggggaggcaatcctggatgctggtagcgccacgtggcccaatctcaagccgggtcttggacccggaaatcgtatatagagatatatccacgaatatctacagaaaaagttacatccaattcttgcaagagactccatggagtatgggctccaatgttgggagccgttggatggttgctgatcggtttgattggatggttgctgatcggtttgatcaattgagtgtatgagcataatgggtatagacccgtttagagtgcaggttttaatagtgaatggattcaatagatttgaatagattaaaaaaggaagtaatacatttatatatgcatgcatgcagtgcggatgagagaatttccataattgcgtgtacatttcaaaaatggaaacattaattgccagtgaaatttgaaataatatcttgtaaatatggaaagttacgtgattgcacggtgaggtttgaatatatggtaatataatggtgaaaaatggaaactaatcatatggaaaattggactttttttgccaactaggtatgtaatactaaatattgatccttcgtatttgaaaacatggaaactaattattcggaaacatggatactatatatcgcagcacatttttatggtaatgtatctaccaaattattccattcatgacaccattaatttagctatttgagtcacaaaatatgccctgcgggtcactttccaagttttaggtacacagcttgacatatacacgcggacgtaacaccaatatacttcggagtgtatatactcagtgtcgacgtttgatgccgcgattccggtatttgcatggtatggggatcgttggtactaggatatacgcgagactgaggtaaaagagacggagacgaggatttttatacaggttcaagcccctgaattgtcaggtaataactctacatcctgttggccgaagccgatattgctcttattcaccataatcacaccagtataatatttggggtagcctatctaactgttgtcgacatggcggtctgaagatctgactcgtagtcgacaacagggtagttttcctcctcaaatccgtgcccggcgagatcagagatagcgcttttgtttctcctaacagtatctggagacatcgtaggggactagccgtgcctatccctgaagtcgatatccggtgtcttgtcttggcgtatgttggcttgtatgttgttccgtctatggtgggtgttgatcgtgtgtttcccctctcctcctagagggccttgtatttatacccatatgtgtccccttgtccaagtagaactagggaaaccaatatggatacaattcgattagtccttgtcgtttccatgtagaactctggtttttttttccttatccggaactccctcgagatcagtttccgtataagacatggtatgtggtgggctctgtcgagatttagtcaactactattatgtatgtggtatccataaccctgacagtagcccccgacttcaatgcaaatgagcgagttcatattctcaaccgcagaccttggagaaactgttatcgagctcacgtgactgttctcggtgagttcagagataacgttagacttcctttatcagcctcgtgcgggcacctaaagggttagtttgtgtcaatctctgacgtcaaccaagaaagtatagagcatatgactaagtctcctgtcttgctgtaatcgagaatttggattgaagtcaagaaattttatctcggccggtataccatctcttcatttcgtattccttgtcgatatccaccaaccgttctcgagtgatcaagaaggcgcagagtctgcgacggagccttgtcaacatttgtcatactcgccttagtcgatcttggtgtagaaccatagagacatgaagtcttcgacaatgttgaatagaattttcctgaaatcaacactcagaaaagaacattagataaaaatagcccccgagcgagtgctcaaagggtaacatgttatagaatgtatggaaaactgaaaatgaattaggtttacaaaccaatgttttgtatatgagcgtccactcttttaccgacttcgaccaatcagtttgttgagttatacactctccctagcccccagccttgtcgtcggagaatcgttctcgggtgataagactcttggacctttgacctgccttagttgaacaagtactgatcctagcccccagccgtgaagttggaaaatccatttccgattacacggcttggttaatacgcacggtgagaactcttacacgaccagatcttacatggtctttcgtctctgaaggatccgacaaagccttatccgctctgggcgtccccagccgaagttcccttaggttcctcagaggctttgtcaagacgacgtaaagggacattaggataggtttcaatgctaggtgtcttttgtggtaagggatctctgggcaaaacacttggcgatattgtgcacctgatatcaactctgttggagtagaggtaatgggagaatcgctacacctctggtcgaggaccaggtagtagtcgtaacccgaccacttgaagtgaaaatagtgggagaatcgctacacctctggtcgagaaccaggtagtagtcgtaactcaaccactagaagtaaatgtacgagagatcgctacaattgactggttgaggaccagtgagtaggtgtctctcaatcatttgaagtcgtggtgcgaggaccgcttgtgttattgctgtagtcgttcctcgaccatctgaggttgcggtgcgagagattgctacgtactggttcgacgaccagcgaacgagtaaaattatctctcgaacaccaatggaggttgcggtgcgagagagtgctacgtactggttcgaggaccagcgaacgtgtagaattatctctcgaacaccaatggaggttgccgtgcgagagagtgcaacgtactggttcgaggaccagcgaacgtgtagaatcatctctcgaacaccaatggaggttgtggtgcgagagattgctaagtactggttggagaaccagcgagcgagtagaatcatctctcgaacaccaatggaagttgcggtgcgagagattgctacgcgctggttcgaggaccagcgaacgtgtagaatcatctctcgaacaacaatggaggttgcggtgcgagagattgctaagtactggttggagaaccagtgagcgagtagaatcatctctcaaacaccaatggaagttgcggtgtgagagattgctacgcactggttcgaggaccagcgaacatgcagagttatctctcggacaccaatggaggttgcggtgcgagagattgctatgcactggttcgaggaccagcgaacgtgtagagttatctctcggacaccaacagaggtgctagagttggtttattatgtgcgtctcatgtggctagcttgactcacacacccaacttgtagcatatccggatgtccgttcacaatcatatcgggtgatcaagccgacggtgttcgcgaggaattgtccgttaacaaccttttctcaagtagtccagccatggccagtgctatgagataggttgtcggtcttagttggtaggttgggcgcgacgactctgcatttgttgagatcgttctcgataatatggtgtactcgaccacaacctactcgagtgctcaactgttcctgaaaaatgttttctagaaggcaagacatatagcaggtaatatcgagtatgtattcgaaaaactgcatggatcttctagtattatcaggatataacgagcagattaaatatcaggcattatgtacaccgtaacaagcatgatttatacagaagaaaatagagcgagcccccagcgttataccgtagtcgatttaatatcggggacacttgcacaatagatattgtataaaaaacatgctctaggtagacataataaattactgatctgacaatatcgtataaattagaaaaacaggtacgataaattacatataaaatattgcgtacctgtgtagatacatgccggatgtatctacaaaattagtagatcaattaaaataattgatccaccaattacctgtatcgatctgtaattatggaagatgattgggcttgagactttctaagcagacctccattcacacgtagcaaaggacatgccacatatatgacattgaccgatgaccaatcgccgagtaaacttgatgagtcctgaccactgctcggtctaataaccacacgtgtcatgcacatggcggctgggcctgtaatcctccgtatcatgtattattccgtttcattgaccgatacgaagacgatcggaaggcggacacatgattcagaagtagctctccctgtgactggcgcacgacgtggtgatgacccgagggcataatctgctcgaagcctcagcgttgttggttttgatgtcggactgacctgtaactgacattgaattggcatcctccgtggcggcgacgtggtttcaaagtaatcaatcgggccaaggcctcacgatcgacgacattaaaccattattctccgcggtagcgacatcttgaagcttggtcgatctcgccggatcgaatagttgatgatgatgattccgatttcgtcggaagacgtactccggtcgtgttagatctccccacagccgaagtcgtcgagtagtttgttgttagagaatccatcttttgaatccatctcatcaaaatcctgaagcaccaaaatgcccctacctggcgcgtcactgtcgacgtttgatgtcacgattccgttatttgcatagtatggggatcgttggtactaggatatacgccagactgaggtaaaagagacggagacgaggatttttatacaggttcgggcccctgaattgtcaggtagtaaccctacatcctgttggccgaagccgatattgctcttattcaccataatcacaccagtacaatatttggggtaacctatctaactgttgtcgacatggcggtctgaaggtctgactcgtagtcgacaatagggtagttttcctcctcgaatccgtgcccggcgagatcagagatagcgctttcgtctctcctaacagtatccggagacaccgtaggggactagtcgtgcctatccctgaagtcgatatccggcgtcttgtcttggcatatgttggcttgtatgttgttccgtctatggtgggtgttgattgtgtgtgtcccctctcctcctagggggccttgtatttatacccatatgtgtccccttgtccaagtagaactagggaaaccaatatggatacaatccgattagtccttgtcatttccatatagaactctggttttctttccttattcggaactccctcgaggtcagtttccgtataagacatggtatgtggtgggccctgccgagatttagtcaactactattagatatgtggtatccataaccctgacactcagcatatattatatatatatattatatatattatatatatatataatatatatattagcaaaagtggccgtgcgttgccccgggtgattacggagtgtgcacagtgacaaaacactgatgtttggtttagccaccccatatgctaaaaaaaatggttgtt

SEQ ID NO: 28445 - DNA, 2407 bp, Oryza sativa
caacggagataaggccaagcaggcgagctggcgagcatattgaaaggaaccgagccggcggggcccaccgaggagataaggacgagagcctgagatccctgattttctttctcgctctctcgtattcctctcctctctctcggtcctctctcgtttttctctcctctctctcggtcttctgtttcgctcactcccctctctctatcggagcggcggagccgaggcggcaggcagcggcgcaagaggggaggcggctggcgacgggtggcggcggcaggtggagacggtgcggcccagcggcgggaggcggcatcagcggcgatggtggcgccctcccctccacggcagcagcgtgcggcggcttcggcagcgtgtggcgggaggagtggcagccgcccggaggcgccatcccttcgccagatccgacgggaggaagggcttcagagccgcgccgccaccaaatgcgccggttgccttgatgctgtccctgccgccggcccgcgtcgagctcgtccacaagcccgacaaccacgccaagcacttctgccgccacacgtcgcctgtaacccgacatgcctcctgctgccttttgtttgccagcaaattcatatatgattgcctttgtttgactttctgtattgccggatcagattgggagggaggaaatacatgggtattaggtttattgtggggatcaaattcatgaggtcgagattaaatttggtattttcgtgttgtttttggttgtctggttgattaattgatttgggaatctatctcggggatttttttttaagacagactcggactcggggagggacggattgcacggacaggtgaaaattcgtgcatatggacgaaaatcatgtgacgaccggaaaaatactaatatttatattatatatatatatatatatatatatatatatatatatatatatatatatatatatatatgacactcatatggggcaccatggtgcccgggcaccatggtatctaatgtacaaaatcactcaaatttttcaaaattttcaaattgtgagtatatacctagttataataattcgattcatatctatacctatcaacaaaacaactcaaatttaactttatttcacaatccatgattacatacctaactaattatatgtatggatgctatatacctagaatcaaaatctaacaaaaacaagtttaaattcagtacaaacatgctttgaactagttagtaaagtagttaatgttaatacctaagtaattgaaaaagtttcatactcatttgaattgggtatatactcaatttcaacaatggtgcccgggcaccatggagcaccaaacaaatttactatatatatatgtatatatatatataggatcaatgttttgtactcccgggagtacatactccctctccttagtggataacccattagcatccaattaaattgctggggaaaaataaaaattttaatttccactaatcgctgcatgatgcatgcatgcacaggtatacacaccacatttggtgcacaattgaaccggggtgcatcaaatttgaacattgaacgtacctaaccatcctctaaagacatggatcttctaccgtgcaaactgattagaaaaatccgattataaacattttagtatatacttttttttcctacttagtagtagtataaactttactcattttagttaattagagcagcatatactacttttttcttgtacagtatatactgatttattctccgaaagagtatgtaccgatttatttcacaaagaatatatatgaatgtacatatgtactgctttctgcatactctattatagcaacgtagtaaatagtatgttcgcatactcttataagtatatactgtttattggaacagtatatactgttttcttataagtatatgcgctacttataccttggaacagtatatactattttcttgaaatttctagccagtatatactacattagtattgaaggagcatatactttttttttagtttggccagtatatgctgctatagtactacttttttgttatgctttcttgtttgctcagtatctgcatatactactcttactctttttgtttcttcagtatatggtgcatatactgcttaaataagtatatacactatttcttagatttagtagtatataccactattacttagataagccatatatagcttttcacgtgtgtagtataatatgctttttcacgagcaaaattcagaagtatgatacaaaattcttcgtaaataaaaaaacaagaggtatatatatgatctcatgcatgctcacaagcgaacgaaaaatagagaaaaagaaacaagaggtagatgcatgtatatgcttctgaaaaattcagaatctatattcagttat

SEQ ID NO: 28446 - DNA, 20273 bp, Oryza sativa
  unsure (1)..(20273): unsure at all n locations
accacagctaaactaagggcaggctcctccttgagcctgaagaaaaaaaatagtagcgattgttacagcaatatctaacggattcgcagcagtcggcaatcaaagtaaatgaaaaatcaagctgacaaatgaaagcatggaggcaagcaaattcttaccccacgactagctcatgccaggtacaatccatcgattccaccgtgtttctacctcatgtcggtgacgacggcatccggaggctgccctcggcgtcaacaagaaggggtgaaggcaaggggggagggggactactgcggcggcggaggcggcagcgggtggaatggcgatggcgacgagatcgatctagggcgccaccatgagctagagccaacgatgagaggggaggagtgactgcatctcgatccccttctcttgcctcagtaacctaatttctgagccaggggcacattggtcacaacacagccgattttgtgcgttaatccggcgaagatggagaatcagcgaagcagcgggttggcactccttggcgatggcattttagcgaagcaactttgcggagtggcattacagcgaaacccactcttgagagtggcataatgtccattttctcccaacccatgcgttgcatactctattaatattcatattataaataataaaattttaatcatgtgatgaatgtgttagttatattttagaaaataatttcttagaataaaataatacttggtaattactaatttcgaaattaaaaatattattttaataaaatatgaaacataaaatctatgatggatacactcaatatttattaatctgcattatggaattattaaaacttaaaagataataaggtgtccatagtattcgcaatgttatttcttatttaatatgaattttcaatactattcacaatacattacgatcatatgatttacccaatcaacggttatatttctagttaacatgggagttttcttcgagagccgaatcagtataagtgttaattctaattttcaaatattattctagaaaacagtagattaaatttcataattgttttgacactgtggaataagaaaatatttctttatttttttttgcgaacaaaatatttctttaacaaaagcatgcgttgcatatattaattaaatctacaaaatagtgaagtgcaaaaataatgaatcgcggatttataatattgatgaaatttattgtgtaaaggagctagtggaggtcgaacaggagcaaacgtcaatacatgcacctttttttcgttgattttggaatacagtaccatcaggtattttttgcctattttgccaggttatttatatcaccttgtactccttgccctgtagttgatttacaaccttgcgctgttcctggtgataccattgctattaacgttttatcagcatatatgtaagcggattgaaaaaaacttctcatcgtaattcctttgcattcaaccgcccccagcatacagcggctcctctgcggagatcaatctgcaacctgcgcctgcagtcattaacatcagaattgctactttcatgcatcgccctgcatggaatttgtgtgtaccgtatacgtaccgccttacctgaaggagtcctgattgatgttggttcagataaaaatcaattttggtcagggtctgagtcaatggagcttaaattgatggctcgagcgacacccgtcattggcgaagaagtactgctcgtggctgcctccagcgaattcctctccttgcgttcccatctcttcttctcgtgatacgtacgtgcgcttggagattagttctgcctctcccggacgctttggctggagattagattagatgtgctttttgaaagagcccacgaccactacacaatgtaaaagcataacatacaatctacggtcctgattaaaccacttatttatctaacggttatatttttctggttaacgtgggagctagtagaaagtgctcaattagtatagatatatagaggtatagattctacaaatcaacatgcaagcatatacaacgtcacctctcacatcattcgcataatattttaccaaatctatctatcatctttataatatttaatatatatacttatcaatatgttttacattaaagcgtggatatcatttgtattttcatgataaactccgatgttttattttttttcctttttactcatagcttgattatcgaaaaaaatatattgagaattgctttgtaattacctagccaagcatggggagtcacctagtacacaaagtctgtatgaaaaaaaaaaaagaggtagctaagccatcccattacttctcgtgtgccacaatgcatgaagtaaagaaagggatatagcttaaagaaccaacatttgtaatgtttcgctaataattaaagtttggatttcatagagaacttgtggaattgtgttttcttccctagcttttaaattttcaaccctatgatgctacgggaaggtttgtactatattacatataagttaaattatagtatagttacaacgtgatattacaaatagttaaacaaattataactcactataacatctatataatttagtataaaaagttgcatatattttttaatactttatataagttatattatagttatggtaaaattatattataactatactatattatagtaaattttaaaggttccaaaaaaacttgtcgtagatttttaatagtccccttaaagttttaagctgaagaatgtagaaaaaaatatataggcattacaattttaaatggttttacattaaagactgtagaaaaattataggccttgcatttttaaacggagagagtatttaagtaggaaaaccccactcctacaaacacaaaggtatgagggtattttttttagtatttgaatatgattggactttttttcatatcaccctttttctagtaagtgtatatatatattctagttccagtccaattagagcaagtttaatggtatagtcaactgttagctctaattaatctatagttagtccaatagttaattcatgcaatatttaactataaatatatactacatcattaataagtaatcccatatgtcatacgcatattatgtcttgaagttcatactatagcctattttttttctctctcctctctttatctccttcacatatgcttgtagctgacttaggccattcccaacccaagacactagacagtttctataaactccacatcattaggaaattagtactagacactactcttccaatgcaagcaccactattctatactaaaatttagtgctacttatctcacatgatattttgaatgttgtgtagaaaccatgtctcatgcatcttttcttatttattcacttgttatattattttttatcctaggtggcagcttgttgggttgggaatggcctaatagtctggtattgttcatgctcttaacgcatgcatccgctcctttgttccctttgttcaggaccctgtgttctcactggaccaggaagcttcctttgtttcacctcgagatcattattcattagtgccttcagcgttccaaagaaaaaggaaagttgccaccagccgaccagcgtcgtccactcctgtccctctcgtcattaatcacgcattaggtagattcgtggttcttgatttgaataagtcgagctcaccatcatgttcctatccagccacatggaaaaagacgagcagaagaaacgacaagaatcctactccctccgcccataataagcgttgttgtaggtttaattgtctaactttaattatccgtcttatttaaaatatttttattgttattagatgataaaatataaatagtactttatgagtgacttaacttttcaatttttttcataatttttttaaataatatggacggttacacgttgggcatggaaacttgcttcacttataatgagacggagggagtaattagcacagacacgtcaggaggtaattaagtggcgggcgtttttcggcctatacaatagacgcgttttcctttccttttacgcagcgaatctgcgaatttgagcaagactcagaaaaaacgagattagcctaacttttatacgtaattagttcctataatcaggtcaatcaagataaatgtttcagataacattttttttattttttactaaaattctgaaaactttcaacttgaattttgaaaacttttaagtcaagttttgacaactttcagctcgactttaaaaacgttcaactcaaatactgaaagctttcaattggaattaaacactttcatctcaaatttgaaaagcattcaacccacagttcaaaattttcacctcaaaactaaaaacttttatatcgaaatttaaacttacaactcaaaattcaaaattttcatctcaaattgaaaactttcataaatcaaaattcaaatatttcaactcaaattttaaaatttttgttcaaatttcgaaatccgtccattacatatttaaaactttcaactatttttcaaaattttaactaaattatgtgtatgtgttttctgaaaaataatgctaatgatggtattttttgctaattatgtaattagcggtacggacatggtgcgcataggtgggcctgagcgctgggagtcggactaagattaatatatgacaaaatgggaaaagtgtgtgctaactattctattggcgcagacacgcgaactaggcgccctactggcgcctggcggccatggctagcgctttttctatactcgaccgctccctgactttttctgtcatttaatttttcaaatttctgttttcaagagcattcttcaatttacagcttcaatatatacgtgatatcatacccctaataatttcacaaaactatttgtgcttctttattttattttttttcttcttcgtttgcctgctcctgggcgtgtgatactgtgattagcagccggcaaggcctaagcatgcatgagtccatgattgggctttaagatgctagcccgtgcatgcacccgtagcactcatagatgtatccagaattcgcgagacggcaagagtacccgtttcccacgctgcaagaaaattaccgtccaaaattccaaagatttatctgacaatttgatagctccacgtggaccaatcagtagtggcaaacctgtcggcttgagattaatagatcaataataatatatattattttgtctttaaaatgttttttatattaaaatattaacgaccctaaataaaaattgtagttacaaaataggaaggagagagggaggattgcatacctacaatgtaagtacatcgaaaatgctacgcctcggtcgctccccctcccccacgaagcgcggtgcgcccttgccccacgatgtgttcctatctatctgctacgtgtccccaccatatactccggtgcacaaatcacctatatattttagaaaccctctattanggaanntcgttcattttttngttcacannaaatgtttacctagtgtactcacaatgtttcactatgtatagatataatgttgcagtgaattaaagtattcctttgcacaaattcacccacatatattttgaaaaccctctattaagagaattcgtttcattntttgttccaccaaaaatgtttcacctattgtactcataatgtttcactatgtatagatctaatgttgcagtgaacgaaatattcttttgcaacaaaatcacccgtatattttggaaaccctctattaagggaattcgtttcattttttgttccacggaaaaatgtttcaactagtgtacttataatgtttcactatgtatagatctaatattgcactgaactgaaatattctttcactacttgcagaaacatggccttctgtgcttcgggtccccactagaagtcgtctgttttctttagtagcttaaagaagggcatcccccgctcgccaagtcttgaaacaaatcggctgagcgccgccatgcatccagtcagcttctgaacatctttctgggtacttggcggtttcatgttgaggatagcagtaactttctccgggttggcttggatgcccctatgagacaccataaaaccaagcagcttccctgacggtactccgaaggtgcacttttcagggtttaatttcatcctgaaagcgcggatgctcgcgaaggtttcttctagatccaagatcaaatcatccttttgcttggtcttgacgacaacatcatccacataggcttcaacgttgcggccaatctgtgttgagaagcatctctggatcatacgttgataagttgctcctgcattttttagtccgaacggcatggtgacgtagcaatatgctccaaagggtgtgatgaatgaagtcttcaagcagtcggattccttcagtcggatctgatgataccccgagtagcagtccaaaaaactgagaagctcacagccggcggtcgagtcgactacctggtcaatgcgaggcaacccaaaaggatctttagggcaagatttgttgaggtcagtataatcaacacacatacgccattgccccgttttcttccatactagaaccgggtttgccagccagtcgggatgaaggacctctttaatgaagcctgccgctaacagcttggttaattcctccttgatcgcgtcctttctgtcttgtgcgaatcggcggagtcgttgtttgataggcttggcatcttctttgacatgtaaggagtgctcaatcacctctctaggaataccgggcatatcagatggtttccacgcaaagatatctttattgttctgaagaaaggtgatgagcgcgctttcctatttacaatctaactcggcgcctattacagcagttttagtagaatcagagggatctaggggaatctttttagtcttggcttcgctttctccactttttgaagtcttggtagcgggcacttctccttcgctcgtcgcggctgcagccagtcggatatcctctcgggcagacgccatctcgcgggtttgggccatgtcgcaactctccttgtcgcatgtgacggcttgtttgatgtcgctccgtagggataggactcctcggggaccaggcatcttcatcatcatgtaagtgtagtgcggaacggccataaacttggctaacgccgggcgtccgagtatggcatggtatgctgtctcgaaatcggcgacttcaaagctgatattctctgtgcggaagttttcccgggtgccaaaggtgaccgggagagtgatctggccgagtggagttgcggataatcctggaattacgccgtgaaaaggcgcattgcttggttttagctcggagcgaggaatctgcatatcatccaaggtcttggcgaagaggatattgagtgcactgccaccgtcgatgagggttctgcgaagcttgacattgcggaccactgggtctagtaccagggggtaccgccccgggtggaccactcggtcaggatgatccgagcggtcaaacttgattgcaatctctgaccatcgaagatattggggcgtgtcgggctgaacagcattgatctcccgttcggtcaacttttgcttccttttagactcataagccagggggccgccgaagatatggttgagttccttgcggtggtcttgaaatcctgccggggtgtcgccgtcgtccttcttcctcgacgtgctttgttcttcgtcggagtttttccgtgtagtcttggtgtattgctccgcaaactgcttgtagacgaaacaatctttggccacgtggttggagttaggatggtgcgggcattgggagttcatgatcttgtcgaacgtgttgacgcgcgaacgctgtcgagaagagtgagtggcggttgcaacaagttcctcaggcttacgcttgcggtccttatggttgttacttccacctcctcccgtagccggcgtacccttgtttggcttccaactgggacccgactgctttgatgcggtgacggcgtcttcagctttggcgtactcgttggccttttcaaacatgagcttgactgtcctgggaggcttgcgcccgaacttgccgaccaattcttcgtggcgaatccctttggtaaatgcggcgatgataacgtcgtcggtgatgtcggagatcttgttacgttgttcagaaaatcgccggatgtaatctcgaagggattctccggacttctgaataacgttgtagaggtcgtattgtgtgccgggacgctcgaaggtgccttggaagttggcgatgaagtggtcgcgtaattcagcccaagatccaattgtaccatggggcaatccatggagccaagatcgggcggaatctgctaaagccactggtaaatagttcgccatggccttgttgtctcctcctgctgcgcggattgcgagaccgtagacggtaagccacgattcggggttagtggtaccgtcgtacttctctattccagtcggcttgaagccggctggccaatccactcgacgcaggtcatcggtgaaggctgctactccgtcaaggtcgtcgtcgtggcggtccggcgaatgatgatggcctcgagctgctcggcgttgtatgattgtgtcgcgaagatcgacggggcggcgacgaggtggtgagcgaggccgttccactcggcgctccctatgatgatcgggaggcgagtgaatggaccgctcgtcgtgacccctgctcctgcgattggatcctgcgccggtgatgctgaggcttggatgacggtagtcatgagatcggaagtggggaactcggctgccagtcggcgtgtagacgctttcggagttgactgggactgaagccgcgatcatggtcttcgtctggttcaagatgttgacgacgtgatcagattgattgagctcgttttctttgaggagggtgtcgaggagggtgatcgcggcaaccgcattctgttgaggggtgcggaaaaccggcgttccttcaacatcttgttggccgatgagatcacgcgctcggcgccctgcttccaaagctcgctgccgtcgatcctcagcctccttcgcggtccgctcacgctcctgctgctcacgccgttgccgttcttgttcttgtgcttgatgctcctcctccagtcggcgacgctcagtctcgcgacgtgcttcggtctcccgggcttggcgttgctcctccgtctcgttattggccatgaagacgccgaagaagagaggggtgtagttgtcatctaggctttcgtcgaagtcgtcgagatccgggtcgttgtagagagagctgaactcgtcgtattccacgatgtcggtggggcgcgagtcgacggtgggagagctgtagtagccatccagctgatccgtcgaaaccgtgccgagtggttggaggatgacgccgacttccctgaagctaggcgagatcggtgttgaagccgacttccgcctaggcctacgggatggagacgctgtcgtgatggagatggccgccaaatcatcggggagcttcatcaagaccggtgggtaagccccatcatcttgatctggtgtcgttggagaagatgcgatctcgcccgagtggtttgaagccgactcgattgagatggtcttggggtaacttttagccgcgtttgggagtccaaacgggactgaaatccggttctctcccgactggtttgaccccgagtcaaggagagagatcttgccgaagttgttggtgacgaagtcgaggctgccgaaccgaaacgtctgcccgggtgggaagacgaggtcgtcgatgccggagacggaacccattgcactgatcggcgaaaagcttgacgctacccctacctggcgcgccaactgtcgaaactagatttcggcaataataaaagggggtggctatcaagctagaaaagtgtatgggtttggagacaaaggatttatacaggttcaggccttcttattcaagaagtaataccctactcctgtccggggatgaatccgccgagtgtattattgattgtatgatttggagaaaatcaacatccgcccctagaggcacccggaccccccttatatatgggaaggagtccgtgttacaaaagataatctatatccctaacggaatatgtagatacagataaaatacagccgtaaccgactaagtctcaaggtgtttccttgatgtacaagttaagaaacaaacccgagatacaaataagatattctatctatattcggtatcctgtattcagcccaaataccgtcgccgtgtagatatgggatatccataatctccacacatatatataaacatataattatcagaatttacaaggttgaccagacgaattatggagcgtgaaataatagatccagaacataagtcgtaatacaccactatttttatatattttgccattttatggtatggcttatgctagcttaagtgactaataaacccgtacgcaccattacacggaagtcaggtaaaataggacacgcaaaccgaggaggccaagaagtagcagccctcatcatgtatcagcccctgtctagctttcttctgtgttaggtttgttcctctttgttggcctcttcctcgattgtgtccataggaggtgttgctgattccatcttggccttcttcagtgtttccactaaacctgccaggcactcgtccgcgtctctcttcctcttgcaccgtagcatgtgattaccggccacgtctgccggtgcgtcgatctcatcgatcagtcgactgatttcaccgttcctcttaccccgcggcatgaggttatcggcaacatctgccggagtcgtgtcggtctcgtcgagcagtctcccgatttcaccaaaaagcgagtgctcggtgatgtccaggtagctcttggccagcaccttaaaggcatcgaggcggcagtaggacatctcgatgtgcttgtccatcctccccggccgaatcagcgccgggtcgagcctgtcaacgtggttcgttgtgaacacgaacaccctctcgctgccgcacgccgaccacagcccatcgacgaagctgagtaggcctgacagcgtcactttgcttttatcatcagtcttgttggaaagctcgaccagcacatggttgttgtcgacttcgtcgctgttgtccatcttcttgcccttgcgcttggtagtgagctcgacctcgatggcgtcgatgtcctcgataacgatgatggatttgtccgtcgtatcgaggaagagcttccgcagctcggcgttatccttgacagatgttaggtcgaggtcgtagacgtcgtagtcgaggaaattggccatagccccaatcatagtggtcttgccagtgcccggtggcccatacagaaggtagccccgcttccacgccttgccgaccttggagtggtattccttccccttctggaacgccctgagatcgtccataatctcaaccttcttggcatggtccatggcgagcatgtcgaacgtcgacgggggattgtacgggacactggtccacatgctgatctccccttgtttggagtggttggtgaacagcagcctctgccggtccttggcggttagctcgcgccaccgccggatgatgccgggcaggtaggtcttgagcacgagctggcggtggcgcttgtggaacaccagcctgtagcaccgcggctcgtccgtgtccccggggaacatgctgatgatggtgctccctgtgttcttggaggccttggggtacagcctccaccacatgcgagcaccatccaagcagtcgacgacctcctggttctcgtctagaatcacaagcgggtcatccccgatgttgttgccgagcttggccttgagcttggttgcgctgcccaggcacgcgctcctcaggtaggtggagacggcgtcgaacatcttgttccgccggaaccgctcctcgccgtactcggacacggtgatctgctcgtaggggttgaagtaggacataaccatggggaccacgctactgatgatgtacctagcctcctcgtggacgtgctccggcatccgggaccaaagcaagcccacgccggccatggccgacccgaaccctacccacgtctccagagtcgccatggctgcgcagtgcagtacgacgtcactcctttgcttaatcaagctggcaagctaggagctctctgtgtaattaatagctgccgattgtggatgtgtatgtctctccctccatcgtcgcttctctggccccagcttatataagggtgttccttgggtgtaaaggtctcgaagtatacggacacgtatttgaattattaaacgtagactaataacaaaacaaattatagatttcgcatgtaaactgtgtgataaatttattaaaactaattaatccgtcattagcaaatgttcactgttaaatcatggtgtaattagactcaaaagatttatctcgtaatttacgtgtaaactgtgcaattattttttcccccacatttaatacactatacatatatctaaacatttaatgtgacattttttaccaaaatttttagatctaaacgaggcctaaccggtgatttagcgcgtaaattaatgatccacagttccacaccgtttcagcgtggaagaaggtgtgagaacgcgcgcgtcgttgaagcttcgttgaaggaaagaggtcgaggtctttgtttggacgtgtctctctataatagggggctccactggtcgtgcaactatatataggtcaaccatggcaatcagcaatcatgccacaatctaacctatattttcataaagttataattatagccatataaccatgccacatcatcacccattagcaataattatttatttaacctcatgcaagcatacaacatcatatatcacgtccaatttatttaactaggaaggtagcccgcgcattcacgcgggcatgcgtcgtacgccaagtttgaggtatttataaaagcgacatttaacaggagaacatctgccacaatttctccatacattatttttgtcagcattaattaattctttaataatattctaacctattagatttatattatatcaaatataagtagtatctataagtaattatttataatattcttcatcattttaaaaaaaaggtagatttattttctttagaaaacatgtcaacgaaagtaaaagtaagtgtaaaataaaaattaaggtgtttttatttttttaattgtataatatattatcataatatgttaaaggatgaattgggtgggacattaatctacacaaaaaatgcacgggtttatatagcctaatatgattgatatattttgagaggcgatctacctatgaacatttcatgtagagtgaatgagaggctccacgcaacctagcaggaatacaataacgtcgaaatatcattgcacagtaatatttttaaaatgtcatgtaccatgaataaacacttgttagaaacaatggttctaccggtttaaaaggtataggagcgcacacatgcatgttatgcagtgagccagacagagattctgatagaatttgttttttccgaaaagatagatatgatggtataaaaattgggtccatcggtttaagtggaaaccgatggtcgattatatgagtgtttttgtaattaatagaatgccacatagcgacttagaagtgtttaggagtgctaggagcaatcatatgtatgatttagatgctatgatcattttaagatcgtttatttatcttttaaatttaaaatatcatttatttacaaaagcatcaagatcaattcgtatatgtaaatagcccccaggtgtatgttgtgaggaattaataaagtttttttatgaagaaattaattaagttggtagaaagtcattagatgtctaataatgtacttttaatgggtttaacagtttcattaaaaaattagctagcatattttgattttcaatgacaaattttaatattttcttttatttagtggagcactcaagatggatgtaggtctagaacgcaataaatctaatatagatattaaaattatatatttatttgaaaaataaaaatagatatataatttatggtacaaataattgtaaagactcgtaaaattaatccggcctttattaaaaagtctaaaatagcacgtttaagtataaattagttaatatatttctttgttagtttaatgcgtacagaatgtaacgatataaactttataaactttatttaaatagtgtattatttgaaaataatgctccacataaagggttcacgtatacctttatttaatgggtaaaaatatagtggtgtaaactttattttggaagagatatatcataatataatcatataagttatgattatataaaatttaactatattaactgttatctcgattatatatatatgaaaagaaaaaggagggagggagatggaaccgtacgtacgtacgtacctacggatggtgtggaattgtacgttttaagatcaatatagttaatctgacggtttctaatagtggacccactattttaaaatcaacggatagatgcttttcttttttctcagaatttctttgatttctctaatttattagagcgccaactggtggcttaagagcgtttgtaggaagattaatggacttttagtatataatagatagatagactagtcgtcaacccgtgcgttgcacgggttattattaaagcatggttggagcaatttgattaacatgcatactacctcaaagtgcatagttagcacaggaaaataaatatgatataatttcataatttgtaattcaaaatttatgagaatcataattttagagctaatataccaaggtaccttagtttgcaggctcaatcatagatatccaaattggtaattattttcatgaattcaattcaaaaaaactcaatgaactggtgtactgcatgctgtctcaattattataacagaatccataataagtttctcttatttcattcaaaattatatagatatccatcttagtttacagtctcaaatatatattttttttcataatttcatttttttcaactttttacaactcgccatgatgtaattccaaaattggaattaataagcatacagctgtattttgtgccggtcctgtgcattcacacgggctatttaatttataacatattatttttcacctatattagaaatatggaaatcttaaactgaaagtgtgaaatatctcggtcaatgagcatcgtcagcattattatcctttgtattacatgatctttactcatggatgtatgtaaatatagtatcaatatcatcaaaaagaatatcacggttataaaaggggaggaatgaataagaaatataaagcacgttataataaatataatctatttctcaaacactgtagatatagatcacccttaaaaattatatatagattcagtaaaatgttttttgttgaagcaactgttatattatctaatagttgaacttacctgaaatcttgtgtgataaatctatgtttgacttgtgcaaagcataaacaaattaactaagaagtctcgatagcatacctgaaaaaagataatatgttccatagtatttatcgaagttactttcagctgtaaaaaccccgaaataaaatagtagcacaatttacacatgcatggtgataatataaaacaaaggcaaggagttagtgaatttagatttatttgaataaggcctccataccaattagtatgccaacccatgagaaaatggacattatgccactctcaagagtgggtttcgctgtaatgccactccacaaagttgcttcgctaaaatgccatcgccaaggagtgccaacccgctgcttcgctgattctccatcttcgccggattaacgcacaaaatcggctgtgttgtgaccaatgtgcccctggctcagaaattaggtcactgagacaagagaaggggattgagagggctgcaggcggcggtggcggtgaccattctgcggcggcggcggtaaatccgcgttgccgatgccctcctcctccctccctccgactgttgccaagcaattttgggataccaaacggacctccccagatggtaatcttaaagtggccgatttaccttcttttgcaatcagtttcgctacagcacctgctgctctagctaattgcccaccccttccacgtgtgatttctatgttatgtatggccgtgcctaagggcatatcggttgaagtagattcttcttttctctcaaaaaaccccttcccaaactgtacaagcttcttccaaagcatacggctttctagatgtatatgatgatctctagacagatagatcttatatgaatcgtatgatgaagtaccacataagtggatatataggaaaggaatccaaatctgccgaatcgctcatgttatgatcttctacatcctaggtctccgcgttccatcatctggcttatgttcttcatgtagcattcatatcgaatgactctatgaaattacgtcgatacttctacatattatgggtaacgtaggagacatccctattttcccccgggggtcttaattaccacagcttagctttcaattcgcctctgaccatcaaattaaatgtgaataacccgtcctcctctctttgaaacaaggggcgcttggccgacaccgagagcagccgccggaagccgtcgtcatcatgcagcgaagacttgccgccggaagcgatgatttgggaatgtcgcaaggtagctcatatcatgctcggctgcctgtaggatttagcggccggcctccctctcgttcgttgccctaggtgtggcgctgcaggagtcgagtgcagatcgatgaggcatggtggaaaggttttcttcaaatgtgaggaaaacgaacaagatgtgagtattccatttgttgcatttggtgtcttttggtctttgttactaatgtgcatttgttactaggtgccaaattcttgcaagtttttcaagtggatcgaatgttacaagaagatggttgaaggattgagtctacatgcagttgatgaagctcccagtgatgttgcattggagcatatggttgctgctcctgtagagatgaagctgaggtcggttgatgatggaaagatggataagttgataaattggattcaagttttagtgatgatcaacataggcctgctagttctttgttttattggcgtgcttgtgatgattttcaagtgaactggcttcccggggatcctctagaattagaccaggaatgtaagcattgcaatgtatctatttagactaatgaatggcatcttttgattgtcctgcttgcttgctgaaatatcaggaatggtattatgttattttcgattgttgtgcaattacaaaaatttgggcatttccatttgagatgagtaattttggcatgttttatgcacaggtgacagatctccatgaaacatcagttcagcacaagtgcaagaagttgttttgtaggaaatagtcctgcaacacataattccagacaatagcatccataatttcagcataagcatccatattttcagacaatggcacataaattcagtaaacgcatacataatttcagacaatagtgaaggcatccataatttcagacaatagcggtgcagcagtgcaccacataatcaagcatccatagtttcatacaaaacatggcataagcatttgtccacatcacaatttaggttcacacatagcacttaggttcaaatatattacattggactcctcatggagcaaaatggcctaatagatgaagtttttaggctaattcgaccagactaaaactaagttcaggttttaagtttcttctttggtgtgagcttctttctaggagacattctgggttgccagcttggtgctgcattgcttgtagcctgagagcttgaagcagcaggctgagagcttgaagccccaatgtcagcagtaggttgagagcttgaagccctaatgtcagcaggctgagagcttgaagatggaatgtcagctggctgtgaattagaagctggaatgttctgagctcctcccttcatcaatgatgctagccggctgtaagccatggtatttgaacaaatgagtgaatagaccgaaataggacaaaatctaaagtaatgtgaatgtattttagatgattaccttcttgtaattcttcctagactttcttcaagtattgtctgcactgttggtcttttgggactaggaatgtcagaagtgttcccatattttgtagtgttcctccttggcttcctcttccagcaaattacaatacaaaataatgcattacagttatgaaactgtactccagacaaaaaaaattggtattagtacactagcctttttttgattccattaagggaacacttgtagcttgtttgaacatgaccaaattccccacatcccttgcatcttctcttgccccttaccagcaccctcttccctgagtcattatcagttggagtagttttggctttagacttgccaccaccctccaggcaacttttgatcctaagctttatgtatcttccatttgtcttctttggcaaaggtgcacccaacacccatggcaattcaacctgtggccagtaagacttgtcacccaatggctctataattctcctataagccttcctgaacagctcaactgaaaaatagggattcacaaagtcctcaatgttgacatccctattttgttgagaggttatcaaagccaatgcatgctgacagggctttccagtgtgctgccactcctcacatgagcagtactgattgtaagccttcacaacatgtttctcatgggtggtgctgttgtcaacaatctctgcacagaagctatcagatttcactactgagaggtgacccaaacccctagttcttgccttaagcttctgtgttacagcaggcaagatgttcccagtcatcttctctgcaattcttctcctcttgttccacaataccataaccaacactctgtcttgtctgcaaggtcacatattggcaatgtcttataatccttgatccaattgttgaaactctccgccagattgttagtaatatagtcacactttattgctggattgaaaccactcctcatccacttcaatggatgataggcttcaagccaaggaagaacatcactacaagcttcaataacttcttttgtgtgactttgccaaatctctttcctgtatgcccttgctgctgggtatatgtgtgagtgcacatcaccaccaaatctcttcacaaagttcttcatcaaatgccagaagcattccctctgctcagcatgctcaaacacagtatgtacaaccttttctaagcctttacatgcatcagtacaaatagctaatggattcacatctcctatagccttatgaagttgtctcatgaaccactcccaattatcctaagtttcagcattaatggacccaaaagctaaaggatacatccagtgatgcccatcaacagaagtggcagcagccaaatgaccattccatcttccattcaaagcaacggaatctatactaatatatggcctacattcctataggaaaccgtctatgcagggcctcaaagcatagaaaaacctatgaaaaaatactttcccaccaacctctacagtgtctatctctatcacactccctagtgaagttcttagaacctctgccctccatctataaagcatgtgaaaactttcttcccatgtcccatatagctcaaccatagccttttctctacctctacatatagtgtcatagttaattgtgcactcgtgatcttccattagttgggtctacaaggctttagggcccatacctggattctttttaagaataggaattgcgttacttgccacccatttagctgttggtgtggtagtctttcttctgctgctagaagtgcatgtatgcaagtcttgtaacacagtcacctacaaattaaatgcaagaatccatcaattctgcaaccattatgccaaaatcaaacaaaaatcactgaaattaaatgccatcactgtcttctggttaggttgtttatgccccactatatgccaagggcaaccttcaactttgcaaccacctatgtatctttcagggtcagttttcaccaacttcaactcaaactcagcatttatagcaaactgtctcattgccaatctaaattccttcatgttagggtacactgtgccagccttcatgcaagaattattggggtcataggccatgaccctctcccctggtacttgatcatcgacaggaattgctgccccagtta

SEQ ID NO: 28447 - DNA, 1355 bp, Oryza sativa
catatatatatacatatatacatatatccatatatatacatatatatatatattatatatatatagtatatgttgatgcgaaaaacacacactggcataggagatctacttaattccagtgcaggtgctaaatcttgctcttgggttcaaaggcgtgccagttggtttgatcctgtaaccaacaagaaacaaagaacgaaataaatgaggttaaatccataaacgatagccgatcggctaatggccgatgacatatcgtttatcctttagccgatgtcatcttgaattcgatcggcaatgaataataaagcaaaataagattaaatctactcgatcggctgtagatattagaaatatataatctatgtcttgacatatgtttaaatcaagtgattgggatagatcgaacatcatgccgagatagtataaatcacttatatccaaaagtacttcaagatagggattatatatactcatagcttagccgatgaagattggtctaatatgtatcagctattgctccgatacttctctatattaagatattaaaacaagtaaaatacaccgaacggtaggcttaatatattttaatgcactaagattttaatataaagggcagatttagtatatcaagtaaacatatagatgacatgataacttaatcagataatatcggctaaaaccccgacactatctctattgatgatcataaaacaagctagatattatggttctaaatattacctaatagatcgaacctaaccgatgcagcattaagcataacgagaaacaaaagatctaggcaagttgatgaaaacctcttgaagatgaccgatatgttatataacctagatcaacgatggcatctagccctattggtcgctttctgatcgcagatgtcagccgattcaaggttagatgacaatatcgatagagattatataacatatatgataactcgacgatttacttaaacaagattagagtatcatgaagatgtaagcactaatcccgagaacgcaagccgccataacaagttttacctcttactggagatcgaaactgatgcagcccaacttgaagcaagaactcgtcgaaagtaatgaaaatagaaaagggtggcgatgcgctgaaagtgttattgaaccgtcgttgttgtttacatgggatcgggctatatttatacctgagatacataatgggtccttgccggacataactcttatctctaacaaactctaagatatgaacaagtctttacggcagactcttaccggaacatatctctaaaggaactatttaaaatatcttaattaatagatacaattaccttcccaggactcaatccatacgtg

SEQ ID NO: 28448 - DNA, 8789 bp, Oryza sativa
  unsure (1)..(8789): unsure at all n locations
cgcattgtagattggataagtaatttacgagaaaaatcgttttgaatatcgttaaaggtgcatgtgtgtcatattggagatagagatataggcttggatatttgcatgtgcgtcagaggcagcatagttattgtctgcccgatttttctcgtgtccgggcatctgaagatggagagtgctacaaatcggacgtctgatatttttcaaaatatcggacggtgttgcactgtattattgcaaaatgtttcacatgttgcactcctcgataaaaaaatgtttcacttaaaaagttttagatgttttatcgatcgaggaaggtgttgaactgcactgttgaaaaatgtttcacatgttgcactcgatgaataatgtttcacttggaaagtttaagatgtttcatcaatgaaggaaaaatgtttcatcgcttcaactggaaagtttcagtttcagatgtttaatcaatgaaggaaaaatgtttcatcgcttcaatggaagtgtttcaaccaaatgcaatcaaaacgtattgattgcaacatgaagattcaatatgtgcaacatcaaatcaaacaaaaatgaaacaccttaatacaatggagtgccacaagctaaaataataagatgcaacgtccctaaactccaaacaaaacaaacccacctccatcttctccgagaatacaaacccacttcaatcttcctcaactccggtcgccggcccccgagaaaacctacctctcttcttcttcaacaccggttgctggtccccgatgaaccactctcttctccattccgctgcgatggccgccgctgccgccacccccaacttcctcctcctccgacgcccgacggcacccaagctggccacggcagcctagcagctccgtctccccacgcgggctgctaggaatctcctgcatggcagtggccacgcccgcgcagtcttccttctcccccaccggcggcggcgtcgccgctaaccgcaaggtcttcaacttcgccgtgggcatggccacgctgccgttctccgtcctccagaagcgcaggcggagcttgtccactaccatagctccggcatgaggaagatagatggaaatgtgtggggaatggagtaagtagtcagtggggaggagagagagagagagttaggaagttgaagggataaggctaacatgtggctggtggagttgaaaagtgaaccagtaaaatagatgggatggtggagtgccgaccgatttttttccaactgccggacgttcggcttaaagcattatagatccgaagatgctcctatgcatacttggatggaaccaatcctcggatgcctatcgagggcttccctaaatgaaaccaacacattattgtaatcagatgtgattatgacgtcttcaaggctgtgaaggtgctgaatgccatatagagacttggtatcttgttctgcctggccaaaaacaataagatgcataattctaagctttggcattgctcctggcttgatcgacaaactggaggtggaggatccataggtcaactttagttctttgagaactgaaaatgatacactatctataatgatctccatgccaggaaccatgaacacttgcaagtcaaggtaagctaggcagggtaaccttgagagaactcgcatatcatcacccttgagttcaacgaccttgagacacagactagttaaggtctcaacctgttgtatccaatatggaaccctatggaacgccttgtaaaggtgacacctctgaaggaattgtggaggaggagaccagctgcacaagaagctaatgggtggttgcctgatattcccctctagaacaactctgaaatctagacagcggaggttgcagccgcccagttccctgagagaagtggcaagagcagcaaactttaccatatctatcaggtcatcttcatcgttgcctcgacggcgattgtagatgacaccaagcgtccttagattggtcagcaccccaagatgtcggatgttttcaacaaagcaattgcagaagttaattccttcaagtgtacgtatagaggtcagcctggtaatccccctgccgagctcttcactccctgcagctctcagatgccgcaatgatggtaaacaagcatcacgcagaaatccacccacgagtacgagattagtgccgcaatttatgtcaaccacttgcaaatatcgcagttccccaattgtatcaggaaactggaaaaaaataccttccaacttcagatacctcagttgaaaaaggttacatataggagacaaatcgtatattgcacggaatgaaaaataaccttctattctcatatgtagaaccctcaaggctttaaacatgcgaagacgaggcaagctttcaccacgctgatggagccaattcccaaaataagtgatagatcggacttgatgtaaagactcacttgcttggattatgttaccacagtttgatcggtagttgagccggcgaatcaaaaagttacctcgtcttgagcaatcttgatcagtactaattacagtcacaaagttttcctccgtcgacttctcaacaataagatcaagtaacaaattgtgcacaacacgacaggagacaacctcaccatacttaaactgaactggctttatcaggcttctatttatgaggtctctgaagtagctctcagcaatatcttccaggtctcggttatctctttgggtaataaatccttctgctatccattgtcttaccaagtctttcttcatgatgttaatgttttcaggatacatatgaagatataggaggcacgtcttcagatcccaagataaattattatagctaagtttaagtatatgcttcatccatttagagttaggatttgtttccagttcaaaccccatagagttttttatcttcaaccaattatccagtttgttaacttctctttgactagccaaaagactagctatgacatctatagccaacggaactcctccacattttcttaaaatatcaacaacaattacgagttcttcaggttcagggatgtagttatctgacccatataatcttctgaagaataagcttctggagtccgtccaacctagtggtttcatcttatagacaatgccacggaagctagagcagcaggcatttgctacatcctttgttcgcgtagttgtaataattctgcttccactgttgttttcgacaaatgcaccactaatactgttccatgtttctatgcttgatatgtcatcgattacaactaggaacctgagaaacaaacatagctataatcaatagcagaaaaccatagatatctatagaaaaccatatcaagctatttttgttataaaccatatagttaaatcctggccttcatactcattggtatatctatatctatacctaccccgggcattatcttgtccagataataaactgttaaaatttctatcaagtctacaatcagatagagaaacgatgactgaatgcagcatgggtacagaacatgcgctgcaacagaaaatattagtacagattcgtaacgcccattacaaattaaaaatggttctcggttatgtaagttgagcatcttcattgtttttagcggtatggttaactggtcaaggtgatattgttacttatcatattactgaaaacaacaagatttataggtttaaaaagaatgccctaaaacaaaatcagaaactaccacatggtaaacatgctgatggtgtaataaatcaagataatttagtattaaaccttagacattaagttttcagaacatttatttggtgaggcatttcaattattatcagcaagaactacacatgatgattatcagtttgttgcaagaataaatttatccatttatttttattttagatatattttatgacaagaaattcattattcatcaagaaacaaagtggctagctcacactgaaatccaacagtattatctaaaggaccttctgtagtccttgttgatatagtactagttcaaagtccaaacctacttactcattgttttagcaatactaatattgttcttgtgtgcaacagtacagatcttgcaaactatagtctttttatagcacttgtgtgcaacagtattagaaggtacaaaattaaatttctagtcgttanttctgggtaatantttgggacttatgnaagatcanantttnacatannnaatatgagtacctcacaagtatcnttatcnagtnaccataaatatctcacaagtataatgtacctctataggacccttaaagagctattcaattgttgttgctgctgctgcatgttattgctgtcattgtttttgcaattttaaacctagttcaatgttatactcaacataatttacattgaagctgaaatcactcatcaagtagtaagtttgtgtgctagtgtgacaattatgatattttatatataattcctttttttttgcagcagttgctagaaaacattggttaaaatcttttgtgatgtttgataaaaaggcaaaattagatatacagttatttgatggttcttcatgtaatatttgcatatgatttgttcttttatagggaaaaaaattatcatatccaatcacaacatgttaaaaagaaaagaagatatattccctaggatcaaccaactatcctctcgttcaagaattggccatcggctgattttgtggattgtggaactaaaaaataattcttctgacacatgtgtagagttgttgataaacaaatagatgcaaaggggtggatttttttcgaagttctgactaaaaaggacaataattcttgaagagctttcatgaaagtaaaaggtggtgcaggagtattgtgaaaagaaagtattaaacaatggggaatgcacaagttttgcgaggaagtttgggttgttaaagttactttgtgagtagaatatcctaagccatgagtctcactctggtgccctctacctagagtagaaaaaaatctgaactgttgatctcatttgatccaaaggttcatatctatttctactaccaccacatttagtggtagtagaattgtggagggctactttgtccaggaaaaattatctgcggagggatattttcgtcctttaccctgaatcgcgcatctggagccgatgcggagagaaccccgcggctcccatcaccgccttgacgacctcgcctgctccaccgccctcgacgcctcctactcccacgcctccgccgcactcgccgcctcagccaccctcgacgagctcgcatctccgtctgggattgccagagctgcgccctctcccaccgctctcccgcgttggcccaccttccgacgagttcgcctcccggatctccgcctctgacccagcactgcgccaccggccgtcaccaagacctcgtcctcctcgctatccccttcctcgtcgtcggcctcctcccccacgctcggctccagccctgtccatctccgcccgccgttgatcccacagccgcgagggcaagcccccaatccatcgcctcccaagcggaacccgcagcctccggagccaatgactaccgatctctcgacctccgaatcatccaagactcctctcgctggctatagcgctgctctccaacggattagctgacatgataagactcttgttctgctttgcaggtcagatttgatttgttttttttgctgcttgcaggtttgcagctcgaacatctgtactgaatcttcttttttgttggcctctagttctcgaatagtttttctgcttgtctgctcaagctctgaatttcttggtcataatttttcctcctagaagaagggattcaagttgaatgctagtaaactgaatccggagcaagtgagcttgttcagaatagctgagcttgacaaggtggacaagctaatgatcactacgtcaatcaacgcttgagagattcctggtgtgttatgtcctgtaattcctgtgaatccattatctcaagatggctttgggtggctttggcttgttactgatggccatgttttttttcagcttgtggttttgaaagtgcctatctgtgtatatcatcgtttttgtggttcaatgtatattacttgttgtaattgcaattgtaaagtctatgtaaaacaacataccggattattcttccgttgccttgtatctgtcattgctggattggagtgtttcgatttgtccattgtgtgtaatattcagatatataactagtatatttaaattttatatgaaataatcaagctgaatggaaaccaaatacctacagcaagaaacagtacatctatggaacgcgatgcacaagcgccggcggtggctagacttcgcgatctgcttttctttttctttccctgcgctctccttttcgattaatgaggaaacggccactctgctgtacgatggagagggagcgagcgacgcttcaaatgagaaaaaaaactaagtgccaaatttacccctattcgtttttagcactttactaatctgccctttaaaataaacggtcaagattaattctacttgtagtagaatactgcaagtaaagggcaccggagcgtctctctatgttattagcaatcaacaaaagtgatcagttaaagatatggttttacaggaggccttccgaagaaacttcattgagaatgaataggagcatattatgttcattactggagaatgtagaattaaactttgacagcgatgggttatctttgcctcacagcacaaatgggagatattctctacaagatccttatacagaatataatgtatggcaataagagatagattacccgatggccgctctcttttacctgtttttatataagactcttgtattggctttttttaaagtaaagttgaattgatattcttgtgagtttctcaactgtttaaatcccaggccattggacttgacaattcaaagaaaattggggctggcaacgaactggctccgctgtaagtttttttttttataaaactatgaaactattcttgtagttacctaggaaatattaagatctcgaatgtgtcttttgctgtaacaaaatttttgtgctgttgtttttgtatatatgtggttcctctttaatagttttcagaacaatatatatttgccagaaaacctgaaacttgaagaaaaacattggaacattttgctcaagcttttgtcatataatgttgggaactacaaaaaaaatttcataaattttagaagcatatgatgaggccaactatttattacttcttccgtttcataatgtaagtcattctagcatttctcacattcatattgatgttaatgaatctagacaaaatgctagaatgacttacattgtgaaacggagggagtaggtcatctttgtccataagggcattatggccttttttttcagaaacatatctgcttatacgtatcattaacatgactaggaagttgatttatcgatcgtatataaggaatagagacaaacaaaatgcaaataattgattggtactgaactgagtgccaaggaatataattctctttaaacacctaagtaggaaaacccaaaatattatggactattatatcaagctgtttgctacatagacctttgatggtacactaagttgttgtgatccatccattgccaattggaatagttgtattgacacaacgaaatagaaacatagaagcatatgctctcatacctcttgcaagcgagtttttctctggttgcgtcgatcagactttgtatgtcatcagccgatccatcgtatttgagttgtgaaagaatgtcctttaaaatcactgacgcgctacggtttcgtgatgcaaacacaaacaccacgcactcaaatctgccatggattttattataaacctggatggccaaagttgatttaccaagacccccaagccccacaatggagagcaccttaggatgctgtcctgactctccttccatgtcctccattagcaactgcgtaatcacctcacacgggacattgatgccgacgagactatttgcctctccacacaggacaggtgaaatatcatcatcgatttcgtctatctgtctcggattagagctgatacactcgtcaacgtcgagattgtatctctctactcttttgacttcctcgacagcataataatccttgatttcgtcgattttggcgaacaagttagggagcatcagctccatcgtgtcagtgagcaaggtggccttgtcaactgcagtgccaaaactgtgcatgaacatgtcaattttgtcctcgacaaagtaggccagctcacgtaccttgttcctcagctccctctcctgaatattcagagcctccatgtcaggcagcttctccagtagagcattcatgcagctcaactcctctttcaagttccagatattgttcttgaaatcaaattgggtagaaaattggaactctgccaagtcgtatcgacacacctcttccagcttcaccaggagtgagttcatcaccccagtcgaaatgttcacggccatggctcgatcaattcctctctctctctctcgctcgctctttcttgatctatgcttgtcaatgatcttggcactgcgtttgaatgtcagtagctagcagatcaaccctccagttatataacataagatactagctaattaattgttctttttttttctttagaatgacagctactaatttggaatgttcacgaactttcctacgtgaagagtattgtacgtcgatccgtataaaaaaaaatgaaccgtgaaaatcttataattattgctggtgatgcacatgcatgtt

SEQ ID NO: 28449 - DNA, 5273 bp, Oryza sativa
tgttcacggccatggctcgatcaattcctctctctctctctcgctcgctctttcttgatctatgcttgtcaatgatcttggcactgcgtttgaatgtcagtagctagcagatcaaccctccagttatataacataagatactagctaattaattgttctttttttttctttagaatgacagctactaatttggaatgttcacgaactttcctacgtgaagagtattgtacgtcgatccgtataaaaaaaaatgaaccgtgaaaatcttataattattgctggtgatgcacatgcatgttatctctctctctcttaaaagaatccatggatgaaactgtaggcgaattttctcccgttgaccatttcatatcataaaacatgttggccacaaggatcaatttgacaaatcttaatggttctacatctatcgttccttcgtttttagcagtgacactatggagtatggacagagcaacatgatcaccaaaacacctagtttcattattaacatgtaggagtataaaacatatggaaatatacagcaatgttatactattatttgaaactaattttgaagataaatctggccacgacagtgtaaaaaaaattgaattgaagtacgaaaaaaaatatgaatgagcaagatttaaagttggcctcatcttttcgcttaattatatttatacttataagctaaaatttgaattttcatctttaaatttaaagctgattttgagttttttaatcaaagtgtattttttatcctttgtttttagatcgctaagaacacatatataaaagttttgttcacaaattatttttcatttgcaatcatgtcgttggcttatttcacgaataagccaaaatggcagggtaatttccttgccacgaataatgactatggttcataagttgacctgctaaccatcacaacgtaatcccaacgttggtctaatggccgggcacatgacaacccttagtttggtggaaccgattgtacgggtatgttttttttcttctgtgccgggcaattaatataccctatccgtcaataaatatttgatgttttaattatattattcgattagatttttgaaacgttgatcataaataattttacaaatgttttagatgattagagcaagtataatagtgagttataagcattctataaccttatgtggaggagagaggtaaacaaaaaagaagggtgttgactctcatgcaagagctagcttaacacaagctccaagacaaatacattaaatatataagtgagagatagagataggagaagaaaatcataactaatcttatagctaatctataatatgtgttgactttaggatgggctaatagtagaaagtaggctatatcaggccattcccaacccaatgactaggatggtgttcatagcattaaataagttgccacctaggataaaaaatgatgtggcaagtgaataaatgagaaaagagaaggaaaccatgtcttgcatgagacatagtttctacacaatatccaagacatcatgtaagataagtagcattaaatttaagtatggaatagtgatgtttgcattggaagagtagtgcttagtactggtttcttgatgatgtggtgtttatagaaaccatgtctagtgtcttgggttaggaatggccttattatctttctcttaaagagatagtacatgtatatttcattaataccttgaaaagtaatatcatgtacttttctacatgaagagtattgtacgtcgatccgtattaaaaaaatgaaccgttaaaatcttataattattgctggtgatacccatgcctgttatctctctcataagaatccatgaaaaatactgttggcgagaactttctcccgttgaccatatcatcataaaacatattggccacaacccacaaggattaatggtttacatctatcgttacttcgtttttagcatatatgctacttccagtcgtgaataagtgatactccctctgtttcaggttataagacattttgacttcacttaaagtcaaactgttttaaatttaggcaaaatttgctacaggacactcaaaaattatgtaattagctgagagacaccgcaaaaaagtgacattgcccatagacactataaaaattatataattagctgtaggacaccggacgcattattttattatttttggactgaaagtggtgagttttttttcaaaatgaccggagtgcccctgcccctcgccatctatcccagacttgggtccccggttgaaccaaacccggtaggattcgtcacctggtgttggcgagcggatgagcaccctgggcacgacattggcgaggcgagtgggtcctgctgccgcgacatcgactagtaacaggtggctgccgtccacgtcgcggagccccacatgtaagcccctctctccttctctctttccagatgggggcagcagagcggtgactcgtcgtgcctgccttggcccctgctcacgaccgtgcagcatcgtcgcagccgaggcgtcgcatcggcccgtgccttgccgtgccagagccggcgctctccctcttcctcaggcttgcttgaagaaatagcaaagagagagagaatgagggagagaaaataaaagaggagaaattccttttccacaatcatcagataattgagttgaatcaaacactgcaatagtgcaattccttcaaatccaccacaaattcagagaggaattaaatcacaaactcaaccaaaggaacaaacaaatcaattgtgcaatcactagcaaagctaggcgcagccatggggatgcccacgacaagctttagttcttgtcggcagtggcaagcttgcacttgaccttctggaacaccaccgccggcggcgcaagctgcagcgcttgagcaggcacggcgcggcgagcttgcacttcgtgtagtgcgcctggtatctgacctcaccggagactgtcacctccaccttgaactcccttgtcgcgttctggcgccacctccaccacgtcgtgccggccccagcccctgcgtacgattctgtagcgtcgcctcagccgaggcaccacaccagcccacgcctcgccgcgccgtcgccggagctctgctctccctcgggctcgcttgaagaaggagcggagagagtaagagagaaaagaacaaggaagaattaaaaaaattagaagggtagatccgtacttacacagctgtttctctctccaattcgtccggatataataaaataatccggtgagtgtccaacagctaattaccagttttttacggtgccctgtagcaactacccgttattgcggtgtctcccagctaattacaagatttttttggatgttctatagcaaattttgccttaaatttaaccatatttatagaaaaaaatagtaagatttttaacccaatataaatttattatgtaaatatacggtagggctattcgcgctctacaacgtggaatattagttcgagcaccgcacaacgccctctccttccggttttcccgttttttaccacctcacctttcctcgcatcccacttttctcggttcgttttcaatttttaccacactatctttcgtgtttcttttttctcttttctatctcatcggtgcttcatcaatgggtccgataaatattaaccatccatatttttttgttttctgttttttttccttctttgtagttttcatgttttcgcgttttagtaaaatatttaccgtctattttttctttccaagttttctgtttttctactatatccgcacattttaaaagtaacgaatttactctgtggagttttttatttactcccagcctcccacatctgctcattcaaaagtaacaaatttacttgcatgaatacctccacatcgtatgacgctatacctagatagtcgtaaaagaattactaccaccttacaatgctagtaattcttttaccaatattattaatattgtttagatttcgtggtatgtgagtaaaacaattactaccttcctctcgatataccccataatctcgtagacaccgtgtattaatatattcgtagcaaccgtgtattaatatatttactgatgtgttcaatacacagcataagagtaaaaactgagatttcgtggtctgcgaataaaacaattaccaccttcctctcgatatagccatgatctcatagccaccatgtagtaatatgtttactgatgtgttcaatataagtataagagtaaaaactgataagagtattgttgatctgtatcacaatatagtcttatgaatgaaaaaattacaggctcaatcacacacaagcaataaaattactcacggtgaatcaaactagaaaagaaaaaaaatgatttagccaaaaatccatctggtggctttgctcgatcttgctgtaaggatgaagagcacggtctgtgtcttgtgactagtagtggagagggcaaacgggtggcaagcagtagtcgacgatggaatcatggaaaaatgtagtcgacgatggaatcatggaaagatgtagtcgacgctggaatcatggaaagatgtagcaatgtggtatagagatgagctcgatgttgcgcagtagcatccacccatcatccagcaagcacgaaaaaaaatgcaaaaacattctcgttcgtgtcaatagagatgacgagcaaaagaaaaatagcaaacaacctccatcaccagcggactccaccctatcctttgcggccagccacatggagcacgatgtacaaatgtaggacctgtgcagcccatcaattgagataaggtaatattggagattgtacattaatttgatttgcaaaaaaaaaaattggggcttcatgcatgaagttaaaggagagtatgcagatgcaaatcagagtgtcatttccttacttgcttactctatcaatgtcgtcgacgtggagcaaccgctggttgttgctattggtataggtgaacacctccttgctggttaaggtgatgcccagtgtccggcagcgaggcccgaagtagtgccttcgtctcatccgctgctagccaccgctcgtcggccaccgccatcaaccaccacggtgtcgtcgttctcctccatggtgtgtcaccgatctctgggttgggatggtggatcgattcatatacgaaaaaaaagggaaaaaaatgaagtggggggcaagagtggttggttgggtatgggaaaaatagaatatataccggaagcaaagaagttatttttatcgtagtaaatcatttactccgat

SEQ ID NO: 28450 - DNA, 601 bp, Oryza sativa
cacgtctttgatacgtaaatccgaatccagtcgagggaagaagatggtgacgccggacaagaagaggaggaagaaactcgcggagccggagccgacgccgacgccggcgccggagccggtacctcgtctcctccgcgttcgtccagggaacaagaagaagaacaagggggcctcacctgagaagcagccgccggtgtacatggtgttggcgcacggagtcgaggaagagcccaccacccactccgtaatcgaggtcgccgcctgcgccgccgcccgccgcctgcttaacaccggcagcggccgcggccgcggccgcggcatgtcgttcgccgcggtggggacacgcaccgtgggcgtcggcgtggagttgaccaccgtctacgaccccgagacatccacggagcgcggcggcccgcgactcatcttccccaaggtgaaccccgtcctcatctcgatctctgacgacggcggcggtgtagtcggcggcggcacgctctacgctctctcccgcaccccggccgtcgtgaggccgctggatttcgagccatggttcttcgtcctcgacgacctcagccacaccgtgtggcgcgaactcccatcg

SEQ ID NO: 28451 - DNA, 1155 bp, Oryza sativa
  unsure (1)..(1155): unsure at all n locations
ttttcataaacagacggagatttgtatagttgccgtccgaatgaccttctgatgggacggcccacaactacccccactttcgccgggagcaggtgcgacgtggaatcgtggctgtctgctgacgacatgaccggtatcagaccagtcacgtcggtcattcttgtccaccacgtgtcagcttaacaatctacatgctcgcccttcttcacacaacatcttacctgtaatggttaggatgaagcctggcatatatctgaccaggactaacgtgccatctttgggaggtaacacgctagctccagctggggacgagcgcctagaagccctcgtcctgacgggatggggcgaggcgtgcgtcagatcgcttgtcgccacctaacccgcgatctgaccggtctgtgactggtcacagaccggataaacgagtgcactgcactgcgttacatgcggcgtgacacgctcagccaaaccgcaataaatgtggttaggtgagccccactgngctcacctaacccatacccgcggagcaaaaacccacgaggggtcggggctccctcggccctcggggccgaggggggttgccgccccaccccctcggtgggactaaaaggagggcgaacgcataacccttgggcccgacattccttcgggggtaccaggccacgtgtgcgattgtgtctgcctcaaacctctagtcatgatactcctgatcccatgtcaccgacagtagcccccggcgttatgcaaggcggatcgccctctttaaggaaaacggtcgggcgtgacgccactcttaagacctggtgacaggtgggaccggtctccacaattgggcagaaacccaacggtcccaaaccacgcacatcggcaatggtaactcggctgtcaacaatgagcggtctcttcaagactgccccattacttgagtagcccccgaatctggccatggcgattcgtttcgtctgaagatatggtaacgtcgcttcggtcggcagcgtaattaacgcgcgcacgatatgatctatctcgattgccacaaccgcatatccacttcatgcgccgcaagcgggcgaatgggattagtggaagcgtgggcgcgagaaacgagggggcgaaatagtgggcgcgagaagcgaggagccgggcacagcgttg

SEQ ID NO: 28452 - DNA, 655 bp, Oryza sativa
ctttgctcatgtatgttctaggccatgcatgacattctctaccacaactatcatattgagaaggtaatcatttctgctagtctatcaatacaacatgcttgatgcttatttaatttctttcttcaatttgctgcagtatgatcatttagaatttcctggtgttgtccctcggtcatttataggtaatactatgttcacttgaagccttgatctgtgcactatgctacaatttttccgctaatgaccattgcttggctcaagcataatgaaatggcaagtagatggtcaaggtcagatggcattaccagtttaccacaatatactcctactagatatgcctgtagtgtctatatatggtatgactggccttgcagattttgtaatctggacatgacgcagatcattaacaccgtttactacatatattcttcaggagcattggttgtatctgttatctcatcgcctgcagtcttcgtaatgcatttatgtcatgttccaaaggtttatggtcttctagcaggtgctgtcaataacttagcacatgtcttcttgcatgttggatctggttttggtgccatattgatgttcttctattttgcccttttagttcggatagtgttgggtagtattatcctgatgactttgagacttctcc

SEQ ID NO: 28453 - DNA, 659 bp, Oryza sativa
gtgttcattttatagtaccacaatatgggtgtctgaaatagcaccttagaacccacaattccacaaacaaacaccatgggtgctgatactatccgcatatcatacctgatgctctccatttgaaccatcgtacggtacctctatccggttctgtaatctctgcagacaacactcctgcagggcagaaaaaaaattccgtcattcgtgaagagaacttccatgcctcacttactaccacattggcatcacattatcacaaccaccttcgctagccatctctccaaatgccaattaaggttcgaattaacctgattcaattttatttttcttataaatcacaatctacgcttgcagggatcgatcataccaatactaccataggccgatttgcatacatacatatacccaccatccatccaaaaaaacaacttcaagctacgtaaaaaccgatcgcatgatcacatcacgacatggctttaccaagcattgacgaggagcagagtattttgtttgtgcattgtggagtttcacctgagcggggctcaaatcgaaggagatgcgctggtcgctgtccctcctctgcgcgcagacgcaagagaaccccctcccgatccacgccgttgaccccgccacgacctccgctgcggcgcgcaagccaa

SEQ ID NO: 28454 - DNA, 624 bp, Oryza sativa
taatttcatatcgaacttaaatttgttggaccagattggtattgttgagttaaatcatatatttacccacagccaaagattaaacagtgatgccattgttgcttttgtgaaagctctttgcaaggtctcaatgactgagttgcagtctccaacggatcctcgtatcttctgccttacaaaaatagtagaaatcgcgtaagaatttcctagatccacttgtaaaacctacctttcactagcagatagtagctgtgacccagtacttgtcaactattctaattctgaactaaattcgtgcaggcattacaacgtgaaccgcatacgtttggtgtggtctcgaatttggaaagttctgtcagaattttttgtatctgttggactgctagaaaatctttctgttgcaatatttgtgatggattctctgaggcagctggcaatgaagtttctggaaagagaggaactggcaaactataacttccagaatgagttccttagacctttcgtgattgttatgcagaagagtaatgctccagaagtacgagagctgattgtccggtgtgtctcacagatggttctaagtcgtgtcaacaacataaaatcttgctggaagggtgtttttatggt

SEQ ID NO: 28455 - DNA, 8579 bp, Oryza sativa
tgatcgaattggatggctcctacaatttttttctctcttttttgcgagagaccagcaagtcgcggcaaaagtgctgagatggagcatggccatcttgagatgaaggttgacactaacagtgatcggtgcctgtcgatctcctccattgccaactatataatactccctccatccctaaatattcgacaccgttgacttttttaaacatatttgatcgttcgtcttattcaaaaacttttatgaaatatgtaaaactatatgtatacataaaaagtatatttaacaataaatcaaatgataggaaaagaattaataattacttaaattaagatgaacgatcaaacatgtttaaaaaagttaatggcgccaaatatttaggaacggagggagtatcttcttcgccattattggaggaaccatcgagaattcgaattatagcctgttttgtaatcaaaagccatacataagaacaattcacatctgtgttcagaaatacgtcgaatcttcagtcgacgagcctttgcattccatcccttagggcctgtttggcacagctccagctccagctccacccctcctggagctggagctcagccaaacagtttcatctccactaaaactgggagtggagctgtctcacaaaatgaactagagttgtgaagttgggtttaggcagctccacaactctactccagacccaactcctgaagttaaatttaggagttggagctgtaccaaacaggcccttaatttgagtcgtggagtctgtatctatcattttggcaatgcaaaactaagatgatctcccagcaaggctgtgccaactactctttttctgtttgggattaaactttagtgatccaaaataacaatctgcagaaccaacaaagcaaaaccagccagtcacacaggcttgcagaaccaacaaaccgtgcttaaaaaagagataaaatatgtatcttaatcagaaaaatgctctaaatggcatataaaaataggctagaagaacaacggcaacttctccctgaaaattgacgaccctatgtgttcgtaatggcccatgtttagcaggccgccctgtaataagcccaacttttgctctccgttagaaaacgaaaaaaaaaaaggaattggcccaacttttcctctccgttaaaaccaaaaaacaaaataaagggaatttctagattaccatcgacattgctccgttaacttttggactattatatttgctttaaaattcatgctagcaagtatgagaacaaataaattggcaagtgcagctgctgtgattcaatctcacgcccttgagttcattgaagatctatgctgccatcgcgccatacaatttttgtgatagttttatcctagttatatacaagttacaatatacttacacttttgttacactatagttacatttgaatgttttgtatagaaaaaacttgtgacagtttcttagatagtccactaaataaataaatactactataaaccggtataacaatattaccaaataatcatgagggaaggtacgttattacaccttaatgatttgggattcgctgaacttgtttttgacagtggatggtacatttggtgggaaaggaggcaaatggtgaaatgattcagatgattgctacatcagctatatctattgttgctcttacactaaattataaaatggtaaggaaaaacatggatgcaaaccacatatgaaggatgtagatgcttcttttggtattgtttcgagtagaggaggagccggagcaatcatacaagacgcacaaggaaattttatagctggttcttgcatgtacttacctcatactatttgatgtagccatggtagaagactaaaggctacgtcctcagggaaggatacattcttacctagcaaattagcaaattggttgtcaaaatattattacccaaacatactacttgcaagtgggggaaacgatgtaacccgaatatttttggacaacgttttttaatgtgatattataaaagtctttgtcgagcgctataatagggaagctaattttctagcaaatatacttaaacatacgtctattttaaagtgttcttgattaggttgatgagcctcataattttttttgctaaacattctagctaacgatgtaactgtattttcatacaataaaacgcgccaagtggctttcctaaggaatatgaaaaagtactaccaaaaataggagtacaacagcaaagcttccaacaccgtccgattctcatagcgaagatcagaagcagcataaagccactatctcccaagcgagatttttctttaccagaagcggttaaaaaaatgcagaaacagtaaaaaaaaagaagggaaaaaaaacaataaaccggagcgggtgaaacaaacccgctttagttcaaagcgttccccctgttcatttcaacctcttttttcctctcccgtcgtcgtctcccccgtctccggttagggtttcggccgttcgccgccttcgcttccgcttccgcttccgccgccgccgttcgccagggggagcccttttaacctaaccgttcccgtttttctctccccgtcgaccccgacgggctacggttctacaccctccccggctcggttcgtgtctgttcgcccgcggggacgctgtttccggcgggcggaggcgcggccgcggcgtcgcggctcctcctcggaggcacggtgcgggcgacggccctcctcctctccttccccgaccctctctctctatctcactctctctgccctagccttctacgctgtgtggaggcgtcgtcgcgcgcgcgcgcccggacggcgagcatctggatttgagcctaattgaaggtattttgttcatcctcctatgcgatatgggcttggatttatttgtttctctctaattaacacttccaattcgttcgatttgcttaattttgttgcatgcgtggtgtggtgctaatggcagtttgtttgtttccaaaaataattttggggtacagctgaacccccatggcccagtttaggtctgcgcctgtggaaagcgaggcggagccaggcgccgatggccctgtggatgaagccaatgctgtggaagaggagaaatctggtaagggtgaggatggcattgaggaggctgccgataccgttgattccgtgaaggattcagcaaagcctgaaggcatggatgcaaaggaggaggcggtggagcaggagggtggggccgcagcggataaggcaaaggatattcctgtgactagtaacggtaagacggatgctggcggaaatgaggtggctgaaatgaaggttgaaaaattggagaatggtgatgggcatttgaaggcggacggcgatagcaatggtgataacaagggtgctgatggtgagaaacagcttatgttagcgtcagctggggaggacgtggaggacccggtgctgtccaagcttgcaagcaactccttcatgtttgattacagctgtggtggtgatgactcggggactgaggaggagcaggctgctttcatgaaggaacttgagcggttttacagggagaagcttatggaattcaagcccccgaagttctatggtgaagggttgaattgcctcaagttagtacaaggacctctttgtctgtatgttagaatttgttatgtgctatggacatgaactaattttatcttgattttaattttttttataggttgtggagacaagtgactgggttgggtggctatgatcaggtactcattttgatgccttattgaataatatctgaccatctgggttatagtgtcttttggattacttgcttgctattatgcattgcaatggacagcaaataaatagactacaaaactcaaaacaaaaaatacgaaaaaaatatttccaactcaaaacttgtatgaccacatgagatcatttggcctatatatgatcatgtgaaaatgatgcatttttccttattaaaaaaacttgcaaacaatacatccatgtctaccacgtatatatagccacagaagatcctctgaactgagggtggctgtagaacacacctgtcactcccaaaaggttccaagtccttttgtaagattaaatatttactttctgcacatattatgtatttatgagctgggaacattaagattataggactacaatatactgttttacttattttttccctttataaactagttcaagaaaacaaatccaatatatgtatcatacagggttggttatgtgagttttttttttggcacttcggcaatatgcttatccagttgttacttccttttgttatgttagaatggaaggcccatttggaattttgaaaatgattccaacagcaagctataagccaagcaaaacaacaacaaaaaaaaaaggatttaggcttttagcatgtaatgagtttttggtatgccagtttgttatcataacgtgcatatctgattccacacctgtatataaagtggaagatgtggattttaatttgcctacctatttttctttccatataccatcagatcctattaatttgatgcattgtgtgcaaagtgtctgccactattatttctgaatctaatctgttttcggaccttttctcctgaaatattcaactgacctgattaagtgagtcaagaaaatagagatcaaaatcgacacttctatttcctacagtacatacaccaatcatgatgacagttccatttgcacagtagtgagactgaccatatataagttcagttcttgttcaccaaattgatatctctaagctattattaatttctttgtgttactaaaatatttatatgccgcattgtgatttcgtgacattgttgtataatctttaggtaatgtgcactgcatgcttgcttactagttgcatcaacaggtgacatcgtgcaaactgtggcggcaagtgggagagtctttcaaacctccgaagtatgtatctgatttcttctgcattctgttcaggccatttggtgaatctcaattgaattgtgcaatgatggaagctcgaacttggttggcataagctcagatttgaatactctttatgttttatgcaggacatgcacaactgtttcatggaccttccgtaacttctatgagaaggtatgtagatttcagagcctggacaaccttgtctgcagttttagttctctagttgcagcactgttgtggttgaatcctgtattcccctctcacgtcatgagccaatgacaaccacagtagttaattgaagaaaaaaaatcaattcatttaacatattctaagattttgcatgattcttgtaaaaggagtcttgaaacaaaagtacacgcaatactttggaagttttgccaaactgtcaacataagattatgcccttaaatgcgatcccatctcgatgaccgtcacatagatgtggatcatatttgaggctattttctcttggtttatattacttggtagataagcacaggtgctggtttgcatgatttgtttttctctttgaattgcacaagcagaatgcagcaggaacactggttcttatctgggggaaactgcgtgtataataaaatttaaacaccaatgcattttgtcaagagtagtgttgtattttaaatcagcattggttttatttttgcccccttctgtctcaccgaccctctttattgtttttgttccatgcaggcactccttgaatatgagaaacacaaaatcgaaacgggcgagtttcaagttgctgcatctaatttaacagagaggattacttctgaaagtcaggtacagtagtatgacggctagcataagttttccatgatccctgtggaaatcagacataaatgggtcctgtttctaactattatttatgtcccaaaatataagaaattttgggcttagacacgggtagtaagaaagtaggtgaaattaaatggggaaagattgtgattggttgagaagagaatgtaggtagagaagttatattttggaataaattttgaaatgctagaagttatattttgggagtaatttaaaaggaactgatttcagatggaatgaagattcattctgcatttaaatttttgacttcctttattgcagatgtttgtttagttgtgttaaatacttcagcaggaaatatgttatttttttgagatgtgtaagtaaggatcttaaaaaggatgagcttataatcttgatacaggttggcatccatgcttctggttctggaagagctagaagagaatctgcaacccgagctatgcaaggctggcactctcagcgcttgcttggcaatggtgaaattgctgatccaataattaaagtacgtgttcgttcaagtcaaattgtcattagtgacttgcaatttgttgtatcagtaaccttttgtttttaccaggataaagggacggtgtctgtcttaaaaaaggataaaactcctaaaagcagcggtaccatttcttgatttttattttttaaacatcatcatgctattatttacttatgttgctttttttaggttctgccaagaggaaaaggacaccgaccttggaagatgacaggattgtaccatataaacctgacaagctacagtaagtcttgcagatgattctctttcctttgtcatcgagcatccacaggaatcatgtaatattactgtaggcaccagtctgttcttttgaatgtcacgatgatattataaggctcatccagttaactatttgggttttggcatgccaattgattttttcactcttccaccctcaatttgtatggatgtgaaactgtgaactgatttcaattatttctatttggcagaaatgactcaatggttcttgaccttggccctccagctgattgggtaaagataaacgttcggagaaccgtaagtatctcatttggatcatcatattttacctttttcatgcttttttggcctcttttagccacttgcccatattttccagttctagtagttctccacagaagttctgaaaaacaatgctagcgaaacgcatattatgtttgaaatctgtagaactatcgtggaagttagaaacagcatgtgttaaccagaaatcaggggaaacatatttttcatggtcattttgtaaaggaaaatatcttttttcttgcagaaagattgctatgaagtctatgcattggttcctggccttctgcgtgaggaggtaaataaattctccattcaattagcaagcatgcagttagacgcttttggttcagttatcatttaccaagcactcctctgtcataagttggcaacgtgtcctatgcacacaagttccggttgcactaactgtgcacaccaactgagagatgccctaaaagaatccaaaagaatttctgcgtatacttgtaatcttattccacctatctatgaatttcaagtttagactcatactgcaaaagttggaatgactttggtactttggttctagatattccttattcatatctaatacattgatgcaggtacatgttcagtcagatcctgctggccgtttgatagttactggagagcctgagcaactagacaatccttggggtgttactccattcaagaaggtctgtcaagtgttaaccttttgaatttatttgatgtttcattttataattgtattctttggcattgaaaacggtacacttacttcaggttattagtttgccctcccgcattgatcctcatcaaacttcggcagttgtcactctccatggacagctatttgtccgtgcaccattcgagcagtcaaagtaaatggtgctctacaagatgaagcgcaacatgcaagtatgcccttgttccctaaagatgcgctgcaaacttacgtgttctgaagttgtcgtctgtatgaaagtaatgaaaatgaaagcatgttagtgaactggtaaaattttaagatgggcgcagaggatgttagtgaactgtaaatcttgtgtagtcgtttagatagtttcttgtggttgaatgccattgaactgttgtaatctgtttgtttcctgagtcataaatggtagaactcaacattgttgttgctggacagtagtaagttgcaatgggtttatgatttgcattctttagtgttattttcgagttaaattaagcacatgttttgagactaggacacacctgaactaatccacttcctttcttgcagggttgcttttgtaggtgggggtttatgtgattgacttgggcctgttcatcctgatcttcgttgcaaactagttactttctgcttcattactcctgccatgttgtctattctgtattgattaattctagttaactagatggtctagttatgtatcttgtagttcgttaattgtgatatgtagcttaagttcagctctattagtttagaatgttaatagcctgatgctaaacatgttcatggtttctttcttccttttttttttctcaactaaagaaaaggtgataatttgtagcatgtagcttgtgaggttattcctaatactcagttctcatactactcagaacatgaagacaagatagattcttggatgtaactgttgccttgtgcattgctgttgtatctgtataact

SEQ ID NO: 28456 - DNA, 1390 bp, Oryza sativa
tgtatcttgcaattcgttaattgtgatatgtagcttaagttcagctctattagtttagaatgttaatagcctgatgctaaacatgttcatggtttctttcttccttttttttttctcaactaaagaaaaggtgataatttgtagcatgtagcttgtgaggttattcctaatactcagttctcatactactcagaacatgaagacaagatagattcttggatgtaactgttgccttgtgcattgctgttgtatctgtataactgaattgacaactgtgcctgaccatcccttgaaactattactgatggtgtatcaattgtttttagtgttatcttgaaacgagtcttagttctaattggctaactacgtgaagtgaaatatcacagcgttgtcaagtcagttaaaagatgagaacaatgctgttctctcttttcttggggattggccttggtgcttgcagaggattcagaacctcgttgctttactagtactacattgcttataatatatcttcaaaattattgcagaaattttgtttcattattgtgttattcatgccagtgatagcaaatgaaattaccctttcagggctcttcttgtcctatcagtctatcacaatacaagagctactatttaactacaaggtgctgaatgtactagcaaacgacaaacacaaaaccatggtacaaatatatgatgttgaaaacaatcttaagaaattctgcaattgcaacgtagaacacgaggtacacggttcgttattcacccatgatacgctgataggcactacgtactgacagagacagacaccaccagaatcacacacaaactttaaacttgttacgtggagcaactttgtttagccactatgcttacgtacggcttgattagatttagatcacgtgacaatttcgcataattacgagatggatattattttggtcatcctcatggctccccttttggttttgtgacgccgctgctgccgtggttgccaccggttgtggtgatcttacgttggccattgcctgtgccatctccaccatgcttgcaacggtggctgctacagatgctcggaccaggtacaatgaattgacgaacgccattagcatcatcccctcctcctcctcctcctcctcctccggcgccacttacatcgcctctgccaccgccaccaccactactctcccagccgccaccgccatcaccgctttgcgcattgtcgctaccgccatcacctccacctcctttgtttccaccaccgatgacatttctgctaccaccattagatccttttattttgcctctgccaccactgttgattcctcgatctccgttttgaccatttccacgacctatgccactgcccatacctctacctctaccctac

SEQ ID NO: 28457 - DNA, 4259 bp, Oryza sativa
tgagctaagctgccattttggggtggctggctcgcgtatttatagccttcagggcgactttggtgagcagagcactatagagtatagagatccatgcactttgtatcggtaagaacatgtcggcgaagtggaggagttccgtgtaaatcgcttatgctacaagcgatgatggatgtgtgcgtccgtcctactacagaaatgattttcacggaccataggtttttcttttcggaatcaggaactgaacaacacagtgacagtgtatgattggttaattatctgacgactctcaggatccccgatgatttatagatggtgatcactgagctcataaccaatttggagatttttataggttatgaaacggatgtataaaaaatgtgccagaccattgtcttacaatatatatatcctttgctttcttggaaaaaggctgcaaaattccagcatgggtcatcgatcaatcagtgcctctttgctttagcaacaaatcaaatacatgcatatatactcttacataggctacggtagtagccattcttcaacatcaaggatgaccacatagcgtaaaaggaatcaattggaatccatctcccaatcttaacgaaattggtcgaccgaacttttggccaacccggcaaaatcaataggaatccatgactctctaagtatgcccgtaaccataacaggttaacaaaatcggtcggttttcatgaaactgtcagcggttggtttgtaaaaaccgattaatttgtatggagttgactaacagtcaaacaacttttggcatgttttcgtttagttcttggcaaacggcggtggggactgattttcactttaaaatatctgaaggtaaacactaccttatatcaaggcttagtaccatgagaagttaaaaccagtgggtcaccatgctaagcacaaatgaacaacactgcacggtttaatcaatttcatatacacattatatgattgatacaaggggagaagcaccgataatatgttggtgaagttgtaatgtatgagtctacccaccaagatttaaatattggtgtccataaatattacgtgcatatatgtacacgcttttagtaagatttttaaataaggtggaggatttatcgttggtcttcatctcttgcagacacgttcgcagggacgtggcgctgggttgtttatctatggactattaattttgtggagagccaatacaaattttagcaagataagggatttatagctagtctccatatcttgagacattcgccggggtgtatggctaggctgttcatttgtgaactatttattttgagagccaatgagctaatccactagccgttgagttgttcttctaatcttgggcttaagattgctcgatttggttttagtcggttcgaaatggaactaggtattagcaccccaattatgtgatgtatagtggtgagtgcacatattgatacatgtttttccatatctttctttactagtttaaaaccatagttggtcttctttctctgtaaaaaaccgcgccctcttcttcctttaaaaaactccctagaaaaccactcccctttttctgaaaaaccacccatcaaatccgtaagtagtaataaaaaataacactcagatttgatactttcactatgcaattaagcatggcaaaaaccatgcaacacagcacccgttgatctttttagataatgaaagcttaaatacaccaagatgatatatttcaatcgagtctatccccggcctctgcatagaatgtacacagccaaaaaactagatctaagaagacttctctatcacaaaagacagaaactagtggctattaatccgtaaactagacctccacccatgcttctgggtaaaatccagtaaaaaaaaaagagcaagaaacctcacgtacgtgagaacgaggcaactagcagatcgaatcactgtgatcacggcgggcgccgacgaggccagctagcggcggcggcggcgacgacgacgacgtggttaatttgatttctgttcgatcggagtcgcagctgtttgttagatcgctaattgttttgtcgacgacaacgctttctgcctgacttcctgccaatgggaagcccacgtacgattgaattgcttgtacagataaaaagaggaagcatatatatacatcgatctggatgtgattaattagtgagtgccagcacggcatgcacactaattacttaatttaatcggttttgctgcatgcataatatgcatcagtgcgtcgtgttggtaggtcaattatattagtcatttgagttcgaatgaaattatgaactcctttgcaatgccaatgcatatatagtcagttagtaacacaaatacactagctagtagcaagtacatgagcaataattgcgagccggccgccatcgtgatgattgctctggccttttagctaagaaacaagaagaaaatgaaagaaatgtttacagcaacaacctgttggtctctcgtctcttgatgaaagcaaatgtaatatcaggagagtgtttcgagtataacccagtgttttccctgtttaggtaagagaaaagggagagaactaatggtactcaactcaccattacgtgaaagcattgggcaagatctaccatctcaaatgacaacgaacgaaacaattcgtctggaaatagcttcaaatgatacagacacctcgtgttttgtgcacctgatcagccgccatatttggggggaccaaaagaatagatctcaccagatcattttaaacaggtactaccaattttaaataagtactccacacactacagattcacagcatctaaaagtaaactcacctttgccagtaattgcttatccctattactttttttctttaatcatttcctaatcataatgggctagcagcaatcacaaggctactgccaagataagagaacgaaggctagactttgcttgaaaataaaggctttcatatttcataactttatctatgcaccacttacagtggaacaaagctgactcactgaagcaatccatccttgtgccttctccatttcttttgacttgagcagaaatgctaacaaccttgaatatgacaccaggtaaaacagttcatgcgatacgcgatctgcttcagtcagcagatcgctccgataattaccattatttgtcaatgatttctttcagtaatctgacaattctacaatgatacagatcacattgccaacgctcttaacttacacatctaaactaatgccctggtgtgccttgtgtgatctaggctcttacatgttacatctactgctacaaaactggaaggttaatggtacatggtcgcgccccaaagagagttagtccacaggagaagcagattacgaacagcacacggtgcgcattcttccttgaatctccaggttccctcgggaagcagtgaagcacacgcagccacgctggctacaaactcgggaagcacaggcatgccaatcaatgttggttcctcccctctgttcttcggagtgagcttaaatctcatcatcatcatcatcatcatccataagttcatctggaaggtgtactttctccattgcagactgttaaacatcagatggacatggacatggacttgtgactcggttattcagacgcagatgaattgcagcattgagacttgtacgataatggtaagatactaaaactgagaaacaaaattttaactagcaatgattgctggaccaccgtaggaagagacaccaagataagttctttaaaataatatgtagtgcaggaaacaaaatgggggtggagggaggcaggtggagctttgggagtgggataagcaaagatagtgtactataccttgattatagcaacgtcagcagcaggaggtttcaaatccagggcaatgccaaagcaaaatacagccttgtcaagaatgttaagttgcttgtaaatctttcccatcagtgcatacatactactttcatgaggtgcaatttcctttagccgttccaactcatccagagcatcagggtatttttgtaggcctagaaggattaaagccttttgatacttggggagtggattcttcttatcagcaaatatagcgttctccatcatttccaaggcttcctcattcctctgaaagtttcgattcagaaagaaggttcatagttaatcattgtccagatgatgatgaaaattctagttttgagggtaagtggaaaccaaaaattagtatatggtactccctccgtttcgaaatg

SEQ ID NO: 28458 - DNA, 28749 bp, Oryza sativa
catttcgaaacggagggagtattatatcacctttaaagcatgcaaggccatcccaagatagcacataagaacagaagagcaaggatttatctggaatgcccttctgaaatgatgctcagcaaactcaaacttttcctggcgaaggtacaccactccaaggccataccaggcattgtagtgtctttcatctacctgaagtgcagagcggtatagttttatactgttctcataatcctccaatgcagaatacctacagttcaaaggaatggcagtatagttagaaattttcgacaggtgatctcaaacattaatacaagataagaaactcatatgtgcaccagttataagatagtgtgaacgaaaacatactcgtgaccgcatagcgtgtgagcgtatgcaactcttgagtcaagctgtacagcacgttgaaaattcttcaaggcagtctcatgatctttcctcaaggcaaagcaatttcccacagcacaccttttgaacatttaaaaacagatacattagaaaatgtaacacaatattatgtcagcttaaaagcatttccactaaagatctgtaattgtctccttgcttcatccagatgttttgcacagcatcaggactaagacaaagttatcatggactaacaaaatcaatcaagtagatgtgttgctttaacatctattaattactttcagtaaagcacatttgcagagttccattttggcatttggtccaaaatatcattcacttgctgggcataaaaagacgaaccatgcttggggagatagtcgatcaatagaaacaagatcttgagcaaggtaacttagccgcatttcctcattcaaatgctgcaaaagagaaacaaagctggtgaaattggaggcaaaaggtgggaataaagtactctcaagtacaagagcagttagtccacttacataaagaacagtggagtaaatgtccattccctccaacgtgcatggtgatagtcgatgcgctaactcaaaaaaatgatcggcttctaaataattgacgagttcaaaatatgtcttcccaacctgcaccgttgaccaaaatgaaaacaatttttaattgtgaaaaggaacaaaattacagggtactgttaatatctgtacagtgaaaaaaatattatggcgtgactttttattattaagttgagtatatagaagtggaaatgaaataccagatgtagagtggctcatgtgcaagtaaacatggttatgctgagtgactggaaattccaacaatcagcattcagggccaatgttcaactacagttcaagttatcattttactaatgtcaattctccagattgacccaactaacatatatacaattaccataatgaattcatcacattatcacgtatcagattaatttaaataaactcgtagtttcttttagaaaacgaggaaacaaatatgctatacattacgatacagaccctgaatcattactatacagtccctatgcctcatgccctcatgaataacgtagatacactcatacaaaaccagttttccaaaagttagccctaggagcagagtaaccaccccaattaggcattagattgtcaattaggcggcaaactatccatgaaggttctggtgtagctattttagtgttctattgtttaacttctatgtcatatacttgctaattgcttgggatttactaatcatgttggacctaggctacggccctgcagaccctctagcgcctaccaccttcttgaaccatgtacaaaactaaaggtttttcattacaaaatcaaaagcatgaagataagtcgccaaccattttgcaggggctgtacctggcaaagaacccatccagtattaaattgtgcctctgggagctttctatatacttccaatgcttcctgatcattaagtgaatgaaatcaaccacataacaggatagtaggttagcatttccaacacaaacatcgtgaacatacctgacacttaaacaagcaagaaagcctatacccttcccctagtgtccgcaagagtgccattagctccctgataccaatagctaatttggagtcctgtgacagaactcgttcagatttctcttgctcgggatatcttccatcaactatacttgtagaagacgaagttgaagttacattatctgtccacatttcatcaacaacgtggtacctgtttcctatggttcagaaggggaaataaaaccatcgtgaatattaatgcaccattcatatagagaaagctgatgcgattattatgataattataatttcacaaaccacgtaattatgatatcgaaaaggataagttgatggattggatgatcctgcatccagtgaaggagaaggatgtgtgatcattttaaaagtcttaagtgttagggctcttgaaacaggattcatggtgcaagaaagttctttcgatttttttttatcacaataatcaggaaaccctatccataggagtgaaaagttcaaacaagcaatgatacagtaaaaatgtatgaatctggatgtaaatatttatgtattttaggaataatgatctaacatgaggcgccaaagaaaaggataagcaattctgcagttcatatgctacatgaagaagaaactaaaaacaatatgataacggagacacttcaagggttgaatgatagctgataatgttctggtggtattatagatgcttaaaatttcagctcaataatagagatatttaaaaggtatatggattaacatgaacagccaataaattcggtgagtagttgcatgatgtttcttagcatcctaaatgccttgtgagttgtggcttggtgtcattattgtacttttcaagtacaatcaatacaatattgatgagtgagttttactaatgtgaacccattgcacatgaacatataagcaaacatgcagatatatcctgattgcagtgtctataacaacatatcaaccacattttttgcgaggcttatataatttgaggcttatataatttgaggcttatataatttgatgagtcatccatgtcgaaatggtaatcaccttcatcaaaattttctgttgcctgtggtttccctttcctaacttgcacggaacgtagagctgttgaacacaattttgatggtgtggacgagtttactcgcaatttacctgacgagtgatctgttccattccctccaaattgagagatatttgagtttgagtttattgttgtatctctagaaagtcttgcacttcttcgaggaactgaatcactactctgattaaacagccttccagaaacctgagaaaataatcttttaactgagaaaaataatcttttaagtctggtatcatcacaagtcaaatctaaagtggggtatgagcatggtgtgaggactatcaacagaaagaacataaaagagactatacagccagacctcaaagcaacagaacaatagaaacataggtccaatattagacgagatgagctctaacgaaggcaataataaatcaaagatgaaaagaacgaaactacaaaaaatatttgctggttccacagtccgtactacatggacaaacctgtgaaaacaaaatgaaaacaatgataatatcccactattattgaacaaaaagaatgctgatggaaaagtgaagaacgtaaggcgctatgcaaagatgaaaatgaggcaacaatctagcagctagaatgttacaaaaacaccatcggagatatacttcaaagttaatgaatggtaaactatcaaaaattgacaaatcagctattatcaggtaaactatctcgtcgctggggttgggtgttggtacaaacttgatgggtagtctggtactgtcaaacagaactatccatagtcaatgaatcttaattaatgggcaatacaaactaacaaataaaaagaagaccgcaatcacaaactttgcaatgcagacgcagttaggtagaagcaagggatcaacatcttgaatcctgatagaacagccatgactgaaactctacagactcatacaaccagcaagtattaggctgtaaatgcaatgagccaatgaatactaatgcattaacaagcaatgctagtatgcacatctggagaggatcagcaagtatgtggtttactccaaacacgtatcattttccgagaggtttaatctaacaatttaaattattgaaagaggacagtcgaccgagagaaacctagaagctcaagagatcagtagaaattatagaagttgcaagacagtatctttcagttgaggaaacaacaaccttctttaggcttgcttcatcgatgtatttttttcggagtgtcaggttcggagcattaacttttggtttggaaggagcattgccacctgctgtattctgataagcatgcatattccgaaagagtggtggtggagcaatgccagaagcctgcaaaaattaaattaattaaatagaaaattgtgatagcgcaaccatagatcacatgtctttacactgtattgtgatgttgtttaaagtgtgctatatgcttctgtcactctttcactgctcatcatcatatccaccatgaagcatataacagtgaaccaaaagatacaaactttgctgtgagtataatttgatttttcgctttccttttccttgtgatttaacatttggcagattatttacatttttgttactcataacatgtaattagtttgattttgatttttttacacctagtcagagtaaatgagaagtacatcaagaaagtgcacaactgcactacaaagggtatgttgcacttcaagagctgctgtctaacaccaagttgttactcttcatgtgcaaaaaggtcaactgaaagcatgtgattcagagaaacaataatgacaatatgccaaatctttcttgcaaacaaaggtaagaagaggatctagataaaccaaatgtgcagattctggagaattcctcaaagtacgaattgattgtatctggttaatcctactgggtgaagaaccaaacaagttttgctgacctgcgttgaagttggcgatggagtgtcaaactgtgataaattagatggtgcaccgttctgcatatgcaatgcagttgactttacatgaggataaccagatacttctgcagtggtgttagcatgcagctgtttaatttgcttaggactatcaccaaaacttgctgacacattggaagatagaaaccgattttcattaacaaagtttgacttttccacatttgatgtggatgtgagttcctgctgaagacgtagagctgttgcttcactgaaacattcatttgcatcttcagcaacacctacaagatagttaattagtgacacacatggtatatgcttgcttttatatttagtgagtatgaggccttcaatataaggactactgggccatagtgtaactgcaacggtatgcaaaaataataatgtatcaacattaggcatatcaatgggcatgtatggcaatgaactaatccctgttttttttataaggtctctaaatgtgaaaatcatgataacaagaaagtactttcaaaagtgaatctaatgacaccaattctgtatcgcagcctctgcatattgttggactatttgttggtcaaaaaatcgacagagggagtaatgaacataatggctaaaaatattatgcctgtttattgatctatcaagctaataatgaatgacagaataaaactactatgatgcaaaacacataacaggcctattgaaggtctactgcaagtcacatattttggatgacgtgttcttcttcagaaaaatcaacactgtacttttcatttcctactactagacatttaggaaataaatctttgtggtgaagcaacacttgacgcatgtaattctaatgtataaaactaggaatggaggtgctaaaaaacttcactcatagtgtattaacgcaccaacctagtatgcacaattcctcgtatgctgcccatagaagaggatcaagagtcagagcttgtacaaattgctcagctgcagcttccactctgccagtgtacctacatgcagatgtggtaaatacaatgaactatctgacacaactaatggatcaagatatgctgtgattatagatttagttacgagttatgacatgaatattaaacctgtaaattactccaagaaggtagtgccctgttgcaccacttggaacctgcacaaaggaacgaaacaacatataagaaataagttaccaaaataacaatccctcagtttctatttataggtcatattaggagttgtcaagttggcacaagattaagaagagtctaaaaccatgagaaagagaggttaagatgagtagatgaccattctacccgtacttaaataaattcgaaatatagagctgatggttagtgagttcattcgcattaatttaagaggtattatgtcaaaaatgagggtaaacaaggaataaaagcaataaactcacatgcattccttatattttggaaaagtattgaagaagccttgcaaaaaagggaggaagtataacagtaagcaaagatgcaaactgattttttttccacatcattacttcacccgtgtggaatcaaacagttagtggacaacctcaaaatgctgtcatgcacccaaagaaaaaaaagatgtctgcagacgtttctatgcaagcaaaacatcaacttgtagtgacaatgtttctcgtgtacatcacttaatcatacatgcatattttcttttaagacatgatacacttcttgttttcacattgataacattgttgatacgatttcattgacaggcaaccaatcttaatgttttcaaatggtatatcaccagttttggaactcttaattcatgaataatcaaacatgctgcacatcccattttctacttctgatttggaatccagaagacaccatggaacaaatgatacatcatgcgaccccttgtccagaacaaaacttgagttcaagcacttacgaaaaaattaagagcgttggatgaaatatatttcaggaacacaatgaacaaataatgtttaaaaacatgctatatacctcaatatttggttcattgacaggacacaaggcttcttcagcttcccgtaagaggttcattcggaagcatgacatagcaaacaagtaccgggactctggcagcttctttcctttatgttatatcagaaataaaaatcagaaatcgctccaaagaccaaagcactttgcgaccacagaataaaatatactgaaatcacaaaacaggatagaaatgtgcccaaaaagatggacagatactatattcacatttctttgatttttaaataatgtgatttcacttctacacaataataagtggtcacgtggtgagcatatgttattacctttcaagatgtggtatgcagcatatggctggttgttgtgaaggtagcaagtcgctagcaactggacatttgtctgtgcacatgagtagtatacatttagtacaacatgtgatcctggtcatatacgaactaagagaacaaaactacacgctatcagcgatgagaaaactgaaaagactcttattacagcaaacaagtatcggattcagtttactcactatctagcttcatctcaataactgccaaacaattaaagtcatatacaaaagaaaattgaacacatgaaaaaagtaatatttggtctgcccaaacatagtcctactcgaattgttaaaagctaaagcagctaaatccacacactccagtagtccacgttgcaagatactccctccgtttcaaaatgtttgacaccgttgactttttagcacatatttgaccgttcgtcttattaaaaaaatttgtgaaatatgtaaaattatatgtgtacataaaagtatatttaacaatgaatcaaatgatatgaaaataataaataattacttaaattttttgaataagacaaatggtcaaacacgtactaaaaagtcaacggtgtcaaacattttgaaacggagggagtagcatggtagtatgggtagctaactacatagtattaacgtacaattaatctagcctttgcaacttacaatggctagtgttctaaacacccagtaaaataataagatgtaacacatcaccatagctatttcccaaccaaatcactaaaacagactgcaagagtgaaatcgtatcctatcttaggccataaaagtctttcggcacccagattatccataaaccctatggcaaccaattacagtagctctagttctctacagactgaattactgaaaccacttccccaaatggctaaatagctagaggaagcccttctcattcaaccttcccatgaacttggcccaaatctcaccactgaagctccaggcgcacgcctaaacactaaaacctaaacaatgccaataaatcgacccccccggcgcaggcgagcgcccgcaccccaaatcgccgcccccaccccccgaccaagcacccgatctgaaccgcgcttactcccagggaaacacatgcatacctcggcggggaactgggcgcagaggcgctcgcagaggaagacggcgttgcggtgcatgaagaggcggaggctgccgtggacgcggtccaccattagggtttccatcgccgccaacgctccagcggcggcggcggcggcgatgcgtgtcgggctactgcggcggcgcgcggcggccggcggcgagggtgggcaccgtttgaatcgaggaggaggagaggggaggggttgggttagattcgagggggatttttttttttttggtgttgtgttgggatttttgatttttttggattggggattcggacgaacggatcggagtttgggcttgcgcctgtgcgcgttggtgtgagtgagtgtggcgtttgaaatggtgggctgactggctggtgcggtggtgctggcgattagagcggcgcgggggaaccgcggctacgcggacacgggggatttgtctggtgcgtctgtgacatgtgggacccggggttggttgttttgaattgcgccactgtgatgtgtgatgtggggcaggctgtgtgagatttgaatttggttcaagtttaggggctgtttggatcattggatgggagggactagactaaaattagttaatctcatctaaacagggcattagccttaagatccaaactacaaccttctagatttccgttagcatgcttcctaaattgctagtataaaatatgttttgtggtaataattaatactcaattaatcacgcactattaatgatttatctcgttgcgcgagccaccgaaaatccccacacaactgctgaaacaaacgcacccttagagcaagtttaatagtatagccaactactagctacaattcatctatagccaatctaatattcccttcgtactcataaaggaagtcgtttaggacaatgtttaagtcaaaacttgggaatataaatcataaataactctcaagttgttgagtttgaaaatgtaaaaattatataaatagatttgtcttgaaaaatactttcataaaagtatacatatatcactttttaataaatatttttatagaaataagaagtcaaaattgtgttttggagaccgtgtcgctgtcctaaacgacttcctttatgagtatggagggagtagttcattcatacaatagttacatactacactattaatacatgatcccacctatcatacacatcgtgtcttggagtccgtgctacagctagttacaaatctgtagcccgctgcttttctccctagctggcttacttatagcctgctattgtacctgcttttaggcttcgccgtgtttggctagatcgtgttctttatggatgggcacggaccgaccatgcactcctcaacccaaactcgtttatttagttaaactataatgtaatttaccttacgattatgccgtaactcagtgttcagttaaaatataatggtgacaattgggcaacacaagtttgaatttggaattaaaattgtattgcctcactggggctttctttataagtacaaacacgtggggcgcgttcagtagaactaagtgataaatgcattggaggtattgttagtcatttgatctcacctctaacatgtgtaaaagaacatgctcgcatgtgtcttgactcttgagtaagggtggtggtgttgtgttttgtgtgtctttaaagggttgtttgcttcgatctcatgtattggaggtgttagtcctttgatctctcctttagcatgtgtaaatgaacatgcttgtatgagtgtggagcgagtgtagtggttttctaaggggttgtttgcttgttgcctaagtttgcacaactaatgttcggtgagtatgacataatatagaagtgcgcccatgaatttattggtcaccggtattgcatggttagcctagaaatttaagtggatgattcatgagtccaaatttagaggaaagtatagtaaagctaacttatgacactgaagcaaagaaatgtataataaactatagcatgactaaaatatgatgcggtaagatgagaccatgagccaaacattccctaagtgcacactaaaagtattcttaatggtacttatttataagagtaaatttcacaaaattatagatacttggaccaaactatcacaaatcaatagatttaaggtcttatatcacaaaactacagatttagagcaaaatttttcacaaaactacagattttggatggagtgtcacaaaaataaagattaagtagcaaaattgttacaaaactacaggtttagtgtcgatttatcccaaaactataagttctaacataatgttagtaccatggatttaaactctaaaaattgtagttttgtgataacttaaatattaaatatgtagtttcatcataacttcagtataaaatatgtaattttacgaaacttggcattaaatatgtacttgtgtgataaatttaccgctaaatatgtagttttatcatacaacgtcttcaatctatagtcaaaatatctgtagttctatgaaatttactatatttataaactcatggcatcatgttgttcatcttgaccggcttttattattgcttatcgaatcatttttctatgttcatcttggtttctacctctgatatctttttggcttatggattatgaattatcataggtacacttttcaagctttaaattgtactatttctttgaactctcttcatcaacacttataaacatgcctctttaaattagcttttcaaatctataatatttagttcgttcgtttgtgtcctctaattgttataaagtcaactttatccatcatccatcagcactttagaacaagatcttaaaattaatttgagaaaatccactcgaacatcgattcctcgagtggcgactttacaagtatatggttctcagaagagtatatgggttgctataattccgtttggttggaggaagtttttaggagagattgggagtttagagggatgatgctattaactgttttgtttggttgggagacatgagatttttggtaggatggggatggggaattgaggaagtaactccctccttttcaatacctgggtaggggtggtaattgcgagggaattcctcctttacttagcctaaacaaatctcaactatccgttttcaataatgaactaatctccaactaaactccctaccaatttccaccacctctaccaaacaagatattgggattaaaaatcaaattcccatctcaccatcaattccctcgtgtaaactcccaatccccttccttcaagttgccagacaagcctaagtcatttggttggagagatggactagttttcatgaataaaccaaaatttaactcgcttgctagcctggtactataaaattagaagagtaaatttcacataactacaaatttcttgtcaaaactattactttgctacaactttagttagacatttttcaaagctgcaacaacaaagtattttcaatcccctatcaacctatttggcaagaaaagggaaaaggaatgggagtttgaaggagggagttgatcgtgggattggtcataggagtacatttttagtccccatccattgtttggtttttgtatggaattccctcccagtctcatgaattaacaggcctccccagtaagagatcggtgggagctggatcccttaattctccatcccaaaccctctcgaattccaagtctttgaaccaaactacaaacttaaactcctattccctatcaccaacttcctccaactaaataggacgtatgtttttttacgtcagcccaattttcaacagtgtgcctgataggtggagccggttaaacatttgtaattctctggtaaaatcattgatgcacttttgtgaaactctcagctgaagttgaagcaaatactccatctgtcctaaaatatgcccatatctatagtactatatggtatcttcataaggaaaccagattcgtgcatctttcttaaaaccttcgtagaagctgcagaaccagtccttgagcagctcgaccgacagctttgctccaacatcggttggtgtggatgcatattcttcatatgacatgcatctgcgatgggtgcgctctttttcttcatcttccacaatcggctctggcagtgggaattcagcttctgttacagagggccgattgacaaccttcatgactatcaggtttaaccaagtttgcagcagccaccatggtccacctgctccaactactgagccgacggctattttagccgatgcattgttcaacatttgatacagatagcggagaagtattttgcccaaagggaattctttctttgattctagggcttcggctacaaactgccagttggttatagggccacagctggatccacagaagaggaacttttccagccacataagcaagaaagctacatgctctcgaggggtaacggatccttggcccatatatgccgccacatagccagactaaccacctatgcttttggtcttgaagtcaaattggttcttagtgttcatactcatggggttagccgatgaagtcacatctaatccagtaatcatggtgatgtcgattaaagttggagtcatcggcccttggttgaataagaaagcattgatggtattcgaccagaagtaggtggtggcagccatcagaggttcatccttaacagaattggctatggtgagagcaagtgcttggccgattccaatctcatcccagtgaactttcttactagccgatacgcgttggtaccaggtggtccagctcttatcaggtgtgggtttttcgagatatggccaagacttgaaggtattcttccagtgacccaagtcagggttggctagcctgaaggggatccggttggtttcaccaatgatgaaatcagtggggtcgagattgccgattgggctgagaaaatagtggtttttgtgtgaaaggctgggaatcgcgacttggtttgagagatgctacaaatccaagacaaccgagagaaagagagcgatgtaagataggagaaaatcgatctgctgctaagaaaggggatctagccgatggggacttacctcagcatactcggctgatggcgcattagatggattggtggaagacgacatcgctacaggcggaggtctcgtcggagatgaagtcgcccgggagtcgcttttgcgtcggaggaatcgccggagagagagaggataaagtttcgcttgagcggtgaaaacggaagtcacggtgtgagattcctcgagggtgacggttagtatttaaagcacggcaataatggtcggaaaacggcaaagtgtgaaacttgctcggagttgatttacagcaaatccgaaacattaccaaatattccggacttagggggcatgtgttaacaaccaaatttggtaatatcggcattggaaaggaagattagattgaagcgaagtcggaggcagagatcgagttcgaaaacagagcagggatcggctggagtccagatcggctacgatgagatcggctgagtctgggtcggactaggtaagctgatgtagccgatcctagcaatacaacttgatgtgtgatgtcgggttggattgaggtacttcaaggtgattgccgcacatggataaagtcctgaggaggcaattgtatctattaattaggatgttttatgtaatttccttagagatatgattgggcaaaagtctgccgcaaagacttatagtatcttagagtttgttagagacagtagtcgtgtccgttatggacatatcttgtaattctcgggtataaatagacccgagccctatgtaacttttaacacacacgttcaatacaatttcggcgcatcgccacctttttgctttagttttatttcgacgagttcttgctttcgggttgagctgcatcggtttcgatcttcaacaagaggtaaaacttgttatgacggcttgcattctcgggattagtgcttccatctttatgacactctaatcttgtttatgtaattcgtcgagttatcatatattttatataatctctggcaacaccgctatctaatctacaatcggctaacgtccgtcgaagagggcagtcgattaggttagatttcgacgttgacctagattatataagatatctaccactgtatgaaacttctagcggcttgattgtctagatattgatattcttttcatacttaatgctgcatcagttgagtttgatatattaagtcgtgcttagaatatcaatctctagcctgctttctggttgccaattagggtagcatcggagtttcagccgatcttatctgatttaattatatttgctctatatgttttattgacatgttaaatctgccctttatgccaagatattactgtatttgaatatattaggcttttgcttgatattctatacctgttttaatatcctgatataaagtagtatcggagtattagccaatacatgctatatctatctgatcggctatgctataaacatatatagtcatgttattaatatatatttcggtctaagtgatttatactgtctcggtatggcaaccgatctatcccaatcacttgatttaagtatatatcgatataaggagttcatatcgttaacatctacagccaatcaagtagatttagttctttcttacttattcaagattgccgatcgatacacataggacatcggctcaaacataaatgatatgtcatcagcatttagccgatcggctatcatttatagatttaactacgctttctttgcttctatttcttgttgattataggatcaaatcaactggcacgctagcacatccgaaggcgagctttggacctgcactggagttaagcagatctcccaggcctcgtgttttctgtcaacaagtatataattgcaaaattggctccatgccttcaaaagttcccgggttttgatttacacatcgagagtttccgatgcacttaaatactatccaaagtttctattacctttttataccacaaccgttacctttctatggccttgggactccatttgagatggttttgcaagaccaggatgtattatatctggtactgcggttcaaaacattcttaaactcgctgtcaaaattttgttaaacttgccgtcaaaaataagacctaaaatgaacttgttcttagaagtctttcaggacaatattaattaggccaggcccgtttagttcgtacaaggctttttctcggcccaattcctaagcccggcctgaaatatctggacttacatgggtctctctggcccaaaaggcccacataaaccaaacgaaaccacgcgagatgacatggcacattcaagccctcccattggccatgccacggcaccaccccgcgtgggccccaccacctcccttcgccgaaactttcccctcctccttcctcccgaagcaaaatccgagcatctccgacgagtccgccatatttaaacacacccacgagcggcaacccaccgcgagagacaaaaatatctccatcgcgatctccatggatgtagagttcttcgccgacctcgacctcgacgcgctcctcgcctccttctcctcctccgccgccgccgccggctccggcgtctcgggcctcttcgccccgtcaccgccgcacgatgcggaggcggggtcgccggagtcggtgagctcccggcggcccagcccttcccgggaggcggcgctgtcggagatcgagaggttcctgatggaggagggccccgcggcggaggagggggtcggcgcggaggatttcttcgacgcgctgctcgtcgacggcggggaggaggaggaggaagaagaggggaaggggagtgaggcggggggaagcacggatggggattccgggaaggagaatgaggtggctaccccggacgcggagaaggaggatgtggaggcggaggtggatggcgatgatcccatgagcaagaaggggaagaggaggtatgtatgaattgcctaaaaacttgggatttctaaaaatcagggggatttcgtgtgtacaaagatttgtgaatttacataggtagctaggaataatggtcaggttttagttcaacacaattgatcttattcagtgagtgccagaagtccagaaccgcactacacccatagtacattttttttattaattaaaacattatatatgtacatacatgagtatatgatctaatttgtcgtaataagatgcatggtctttttagtgctaatcctttgtgaaattgtaagaaattgctaggctttcaattataagagtgtatggtcttttcaactataagatgttttccgtaatcaaagatgttctagttagacaataatctaatagtatgtgttatgaatttatcaggcagatgagaaatagggattctgccatgaaatcgagggagaggaagaagatgtatgttaaggacctagagactaagagcaagtatctagaggccgagtgtcgtcgcctcagctacgcgcttcagtgctgcgcagctgagaacatggcgctgcgccagagcttgttgaaggataggcctgtcggtgccgccacagccatgcaggagtctgccgtactcacgggtaagacatatcgacaacattttctgtttcatacttctatttcgacatggatgaacaaatcttttcttgccgatcattttgaattgctcagtatgctgacaaacttgtgcttggcatcaatatattcggtgtggtctcatggatgatccgcctaagctaatttttgttgaattcccatgaaatcaaacagctagctattgtagttatagccaattgttgactacattttctgtgtacaagtatgcgtggtttatgcacaaatctgcattgtttatacaataacacttgcttagccttttgttttccaactttggacctaatcagtcaccgaccgaagttgacattaactggaacatggtttctttgctatcctacagtatgcttgagtcataatcctgatgctcctacagtatatttgtgtcataaacctgatgctaaaggtaaccttttcctgtttgcagaaaccctgccgctggtttccctgctttggctcgtgagcatcgtgtgcctactcccggtgcccggtctacccaaccgaaacccggtggctcgaagcagcgccggaagagatctcgcgacggtaaccggaaagggaacaagcagtgaacaacagctagaagaaacattactactccatgggaggcgttgcaagggctcgagggcgaggatcaagctagataccggaccgttccgtttagcagcagctgcttgctaggctgccgcttccttgcaaagttgtttccagtctgtattgtagctagcaaatcaaattggcgtgtctatcgcctgtcgtgctgccgcttatccatggactatctttttctttttttggttccttccccccttgtttttataatatcctcctatgcataatgcattatccaggtagttttgaaatctggctttgttgagttgtttgctggcttctcatcttgtcggaagatttacagttgctcctacactcctacttgccaggctctctggaagtgtatggcagtaaaaaacagatatattgttcctcagcagtatttgccttgatgtgagtaaatgaaacaaataaacaaacaagcgcaaacatagttgatctttgctttccattaatcattaatcgtgaacatataatctaccataaattttcgacagtaaacgcaacttcctgtccggtatgattttcagggaaattttcccatttgcttcagttcattatagttctgtcgaaagcttaattgtatgcccacccaaaatcaccattgagtaagataaacagtttctcgtagctactactaacccgaactgtgattacgcaacacaaacaaagttggccatggtgttgacagttcaactgttcaaggttaaggtcctgtttgaaacagctactgtatttccttagattattgatacgggttgtttacacatgattagtatgataaattagaaaaataaaattcacaaatagcttaggatagacagtctaatgcagcagaagaaagcttctaaaaaaatcatctttttaaaaacgtgaagcaaataatctgtagcaaagatcttagcaaaaatctgggaagacgggctaagctacacaagtagtaaggctgtgtttagttcacactgaagtttaaaaattttgttgaaattgatacgatgtgatagaaaagttgtgtgtgtatgaaaggtttgatgtgatggaaagttggaagtttggaaaaaaaaacttttgaactaaacagggcctaactgagaagacgggctaagctacacaagtaatgagaaacgtttaggggtttttcagctagcttcataagatggtggacagtggtggactagttggtttgggttcgaagtctcaccccattctatttatttgatattaggccattccataaatttgtggtttttacacaattaataaagacaaactaatttctatacgcatagggcttggttgtcacatcggatatacggacacacatttgaagtattaaacgtagtctaataacaaaaaattacagattccaccagaaaaccgcgagacaaatttattaagcctaattaatccgttattagtaaatgtttgctgtagcaccacattgtcaaatcatggtgcaattaggctcaaaagattcgtcttgcaatttccgtcagaactgtgtaattggtttgttttttttcacatttaggacttgtttagttggggaaaaattttagatttagttgtcacattagatatacgggcacacatttaaagtattagatgtagtctaataacaaagcaaattacagattccgtcaggaaactacgagacaaatttattaagcctcattaatccatcattagcaaatgcttactgtagcaccacattatcaaatcatggcgcaattagacttaaaagattcatctcgcaatttacgtgcaaactgtgtaattgttttttttttgtccaaaattaatactccatgtatgttctaaaacattcgatatgatgggtgaaaagtttttgttctagaaactaaataagtccttaatactccatacatacatctaaacattcgatgtgatgagtgaaaagtttttttttgaaactaagggccagttcactttgatgccattttcaaccttaataaattttgataaagttgccaaaaaatagctacatttagtttgctaccaattttttggtaactatataagaaatcatgccaaaatttgataagttgccaaaatttttataatgccaaaatttggtaggtttttttttcatcaaagtgaataggccctaaacgagcccattaagttggtcatgctattattaagcaaaaggtacagtatctacttataatctgaaggagaatcagatgttgggctggtggctgctgctggttctcagctcacccgccgtggtggtggggactttctagaagaagacggcaagtgtcaagacttgtagtttactccgttgatctgctccaaccaaacctcccatctccctcccccctcccctgccacctccacctccactctccccttccaaccacaaccccccatcagcgcgagctcccccagatctccccccacctccactgccgatgacctccgccgcctagcttcccatccaccgcaatgtcgtcgccggctgcgggcgaggccgacgccgccgcccgcgtgctcgcccgcgccctcgacaaggtcatcaagcactcctcctggcgcaagcactccgcgctcgtcgccggctccaagtccgccctcgacctcctctccgcctccccggatgtcgacgaggccgcctccgcctccgcttcccctatccagggggtcgccgcggccccccccgacgcggcaatccgcgctctcctgatcgcgctcgacccggcctcccccaaggtcgccgagcccgcgctggagtgcgtttccaccctcctctccctccgccttctccacggcgaggtcgtagccgtcgctgccgctggcgctgctgacgccgacgacgccgcctcgccggtatccaagctcttcgcggccgtggtctcctgcggggggctcggggacgagggcctcgagctcgccgcgctccgcgtgctggtcgccttcgcgcggtgcccctcggtctccgtctccggggactgcctgggccacgtcgtgagggcgtgctacaacctatacctcggcagcgcgagcggcgggaaccagctctgcgcgaagctggcgctcgcgcaggtgctcgccatcgtgttcgcgcgcgtcgaggcggatgccatggacgtgcgcgtgcgcaccgtctccgccgccgacatgatggacctctccgatcgcagcctgaatgactccagcgtagtgcaggcggcacaggcgttcataaacgaggcaatggaggggagcgatgtgccagaggaggttcccccatcggatttgccagctgaggcagatgaaaatggagatgatgtggggatgagcaggatcagggaggatgggctggcattgttcaaaaacctttgcaagctgtcgatgaagtttgccacgccggataaccccgatgatccggtgctgctgcgggggaaggttttgtcacttgagctgcttagaacagtcgttgacaatgcagggccattctggaaatcaaatgaaatgtatgtatgttttggattgatacatgcttgtgctaattatatccattagaattcagcattgcctattttgttcattaattttgccatgagtcttgatatgtgctaaaagacgataattaaggtggatttgccaaatgtagaaaaacttcagctaacaatagtggatttttttttttggtgggggggggggtaaggtttacgatttggggtatgggagagtagtatttactatttctctagccagatgacatctgcccgtgttgtttctgcatgataggttggccaggtgaagatgcatgtcgcatatgaacaaggcagttgttgtggagactgatgtgtttagaaatatacttttagctatgcatgctttgataagttcttgatcaatctaaaaagaatattcctgatattagatcaattttgtttatagttagagtcagaatcgtaaggaattactgttagataatgaatcttctagctcttccaaatgatataccgattattgagcaactgattctgggttctattggagattttcaatttctagtcaatttgtggcatcccttcaaatcctcaataaatgttccaaacgctggcagaccatgtagagacagtggcgcatgcaccctgtgacttgcagacctgcactgatcatttgttaggaaagaagagcaaatgtcacttgacacttatgaagtcatggttaccaatctaaagttgtggggttttagtttatatgttgatgtccccacttcatgttgcgtattaaatcatttttcatcaatagtttaaagtttaatattcaattcatacatataggaatgcatcaaataattgcacccaaacaaattcatgcatgaggaatttgggtcattccatgtctaaatgttgaactgaatattgggttcaacagaaggtatagctcagtaatactgaccttctcccctactgatgcaggtatcttgaagcgattaagaagcacctatttttatcattgctgaagaacagtgccttgtcagcaatgagtgttttccagcttctgtgctccatttttgttggtctgctgtcaaggtttagatctggcttgaaagaggaaattggattattttttcctatgcttatcctaagagttcttgaaaatgtccttcagcctagctttctgcagaaaatgacagttctaaactttttggagaaaatatgtaaagagcctcaggttatcattgatatttttgtgaactatgattgtgatgttgatgcgccaaatatttttgaaaggtactctacttttcttcttgatggacacacacccttatttttgttttgtagtcaataagaaccattagcattacttctactgaaaatatttgtcactctctttataactttcctatcaataagagccattagcatcacttctactaaaagtatatgtcactctatgatttcttagtaaagcaattttaattccatcagatcttcacaggattgtcaatggactagtaaagactgctttaggtgtccctgctggatcaacaacaacattaactgttgcacaagaccaaacatttcgaattgaatctgtcaagtgccttgcagttattgttaagtcaatgtgttcatggatggaccgacaactgagaattggtgaattttccctgattagttcagaaactccaggctcaatggacaatcatactaccaatggagatggaagtggaatggattatgacatgcaacctgacacaagcagctctgacatatctgattcttcctcacttgagcaacgacgtgcttataaaatagaacttcaggtgtaacttttttccaatttgaattaggtttcctaatttttacgttgtttctctctttctttaggctgaagtgttttttttttcttctgttcaatagtttgtactttggatgactgatgggcctacaatttcttttggcagaaaggaattgccttgtttaacaggaagccttccaaaggtatcgattttcttgtccgcagcaagaaaataggccattcgccggaagatgtggctcttttcttgaaaaacactgctggcttaaatgcaacaatggtaggagactatttgggtgaaagggatgacttccccctaaaagtcatgcatgcttatgtggatgcactgaactttaaaggcatggacttcggtgaagcaatcaggtttttcttgcaaggtttcagattaccaggggaagcacagaaaattgaccggatcatggaaaaatttgctgaacgctactgtaaatgcaatccaaatgcttttactagtgcagatactgcctatattcttgcttactctgttatcttgctaaacactgatgctcacagtgtcatggtgaaagataaggttagtctttggtgatcttcctattttgtcatctgggaatggctcgcttatattgcaagatttcttgtgcagatgtctaaggctgatttcatgcgcaataaccgaggaattgatgatgggaaggacttacctgaagattatcttagtgcattatatgaccaaattgtcaataaggaaattaaaatgagtgctgattcttcaacgacacaaatcaaacaacccaatagcataagcaagcttcttggcttagacaatatcatcaattttgtcaactggggacaggcagaagacaaagcattaggtgcaaatgacttgctcattaagcacatacaggagaaatttaaagcaaaatgcaggaaatcggagtaagatcaacatgatttttctttgttaagtactcatatgctctgatatttgatgaggttaagcttgtgcatgatgcaggtctgtgttctatactgtttctgatgcaaccattttaagattcatgatggaggcctgttgggctcctatgatggcagcattcagtgtgacactagaccaaagcgatgataaggcttctgcagcgcagtgtttaaagggattaagatttgctgtgcatatcacatctgttatgtgcatgcagacacagagagatgcttttttgacaaccatagccaaattcacatccctccattctgctgcagacatgaaacaaaaaaatgtcgatgctatgaaggtaaaaggccacacaaaaacattacccttttttgtgcaatttacataaaaatgttgcttctgacttccaagtaaccaacttctactttaaaaaaagcatataaatttataatctttgaagcatatagatggagcatattagatgtgtttgaacgatttcagctcatatgttctgtatgtgcattccatgtctggcatatctgactgttttgaaacagtggaatgatatacttagtctataatttcgacaggctattatatccatcgcaatcgaagatggcaattacttgcaggaagcatgggaacatgtattgacttgtttgtcacggtttgagcatttgcacctgcttggagaaggggtacctactgactcgtcgtttcttacagtacccttagttgagtccgaacaaaaaaatcataagtccagctctggtctatcttcaaagagaaccaatgctcttcagaatcctgctgtaatggctgctgttagaggaggttcttacgacagcacagtggcaaaaaccagtgcctcgtcattggttactcctgaacagatcagtaatttcatatcgaacttaaatttgttggaccagattggtattgttgagttaaatcatatatttacccacagccaaagattaaacagtgatgccattgttgcttttgtgaaagctctttgcaaggtctcaatgactgagttgcagtctccaacggatcctcgtatcttctgccttacaaaaatagtagaaatcgcgtaagaatttcctagatccacttgtaaaacctacctttcactagcagatagtagctgtgacccagtacttgtcaactattctaattctgaactaaattcgtgcaggcattacaacgtgaaccgcatacgtttggtgtggtctcgaatttggaaagttctgtcagaattttttgtatctgttggactgctagaaaatctttctgttgcaatatttgtgatggattctctgaggcagctggcaatgaagtttctggaaagagaggaactggcaaactataacttccagaatgagttccttagacctttcgtgattgttatgcagaagagtaatgctccagaagtacgagagctgattgtccggtgtgtctcacagatggttctaagtcgtgtcaacaacataaaatctggctggaagggtgtttttatggtatgtattgcagcaacgtttctctcatgaaaagaagactaaaatatgcattattatggtgtttattgaattatttttgcactgtgcaggtatttacttctgctgcagctgatgatacaaaaagtattgtcctattggcatttgaaactatggaaaaaattgttcgagattactttccatacataactgagacggagaacaccacattcactgattgtgttaactgtcttattgcgtttacaagcagccaatttaatagtgatgctaatctcaatgctattgcgtttctccgattctgtgctgttaaacttgccgatgaaggatttggttgtcaggaaaagtgtactgatgaacccaggaatttaggcatgtcagatggaaatgccactgtggacaaggatgattctatttccttatggattcctctccttgcaggtgtggcaatcttttagtgttagttactatcatgcagtgtgaatcttgttggattaaaaaacgtaaggactggttcatttgtaagattattattttatatttccttttaacctttcaggtttagctaaattgactagtgattcaagatcaaccatcaagagaagtgctgtgggagtactttttgacattttgaaggatcatggacaactcttctcagagtccttttggaccaacatccttgaatctgttatttatcctctatttagcagtgaaaggtcttcatcaaatgatccgacctcaacaccgagtatccctgaggatgacttttcaaatcttgaaacccaaacattggcagtgaaatgtttagtgggtttgtttattaatttctttgatgtgatgcgtccagaacttgctagggttgcatctatagtcacatattttatccgaagtccctacaaacattctgctagcataggtgtatctgctttgatgcgcttaattgagggagttggtggtgaactttccaaggaggaatggaaagacatattgctgcgcttcaaggaatcggtggcacatacttttcttgtattctccaaaattgtgagaatgatgcaagatattgaaattcctgatagatttgaatcttattcagaaaatgatcagtactcagatcatgaaaattatggtaatgaagaagaggaagctaatatggagacaacttcttatgctattgtcaaactgaagaatcatatggctctgctcctcttagttgttcaggtacttttctctgttaaacaaattatcttgttaatccacccataacatgttaagtttgattaatggcactttttattcacgtcgactctgggcctaactctacaattgggaacctagtcctaggctgtttacttgccgtccaatactccaatgctctagtgactatgacctgaaaattttagtcgtcaattaaggcagtaacttttgaaagagcagagtggaataatgatgttattacgaaaagcaagggtgtgagaatcaaataatcaatcactacatatcttgaccttgcctagctacctctatggaacagtttggtttttacctaacggttatgccagttcttatggcaaagtagggttacgaagcatgttccttttctaggtgataattgggaatctcttgtcctttcctaggtggacaacaggacaagtgacccagatgtgccatttgctgtggcttctatttcgctctaacatttccagccacatcactgtatctctcagtcttttgcccttttttgcagggaataattaaattatatgaagaacacagaaaatatctgtcttccgatcatattaatattcttttggagatgatatcagctattgcgacacatgcaagtgaagtgagctctgaatcttccttgctgctgaagtttcataaagcatgttcccttatggaagtatctgagccagcaattgtccatttcgaaaatgagtcataccagacctacctcaagcttctgcaagcgctgtttcgtgactatccatccatgtcggaagaaatggacattgaatcacaaatacttcgtgtttgtgagaaaatacttcggatatatctacagtgtgcacagcgagaaccatccaatgaagctttgcacagaaacgcatctatacattgcatagtgccactgggtgctgctaaaaaagaggaattggctgctaggacttcattggtcctcctcgtgatgcagttactgggaaacctggaggaggattcatttaggagagtactgccctggtttttcccgttgctagttgatctgatccgttgtgagcatagctctggagaagttcaacatgcactgtacaaaatcttccaatcatcaataggccccatgctaacagtataatagcacatatttgttctgctaggtctacgattttgttactctattttgttcacgttattccagttaactaagggggcccaggactatctttcgacatccttgatttatcttatctgtttcgaaatcctggagttcaaggtaaaaattcattagttctgtgcacttgcatattatgctgtatgttataaattcaactgagatcaacctgcttatcttatattttgcagtttaatatgatcaatccagatacgtgagggaatagaatcgattttgccagcattcatttcaggcaatacgagactatcagtaaatgaacattgtagactgacatagaatttgccccttatggctggactctcttgagaccgatgatgtgttgaggtaatatttcgcaaccctataatgcggacataagatttacccgatgtgtggaggtaatatgttattgtcaaactgaaggacagcatgctcattgctcgcaaagccacaatccatcatgtatattactagttccatagtactttcaaccatgtgccgtggaaacacctgagctactagatgaattcgctctatgaaattctgtttttgtttttctttttgtaatagcttttgttgtgaaactaaagtagagctagactagccttgtacctaaaatgagcaatgttttgtatcgtattcctttgtttaatgcataatatagcgaaaagaatgttgttttggctactgacatatgcaaactgggatcaaacagattgctaggagcgtttttaaaggcaatgaatatagaattttgctagtgttgagtggaaaaatatttgtctcggacacagctctccaaactatctacaagacaatataggtgatgtgaagtactccatattagagacaacaactgtcttt

SEQ ID NO: 28459 - DNA, 25351 bp, Oryza sativa
  unsure (1)..(25351): unsure at all n locations
agttgattattttctaggattggaactgccattatttagttacacgttgcatataaagtgatataaacagttttacagttttgggatgaataatttacacaaccagccgaggacgcgacccaacgccctaatgctgtacataatgcaacacaatcacatgcattggagatgacgagaaggacgaagatgagagaattgggctatacacaactgtaaccagacgcatcagcaacgtttgaaagaattgactagctctacgattttggaccctacttgagctattatacacagggctggattccggactccatttccggcatccagttttggtccatgtacaggccaccagctatcagaattcctggcaggagatggggaatgcacagacacttgacagaagcagcgcaagagtggctttgaaactctcacgccttcctgcccctttcaacggagcagcttgacattcacattttatatggatcaggtaaccatggataaggagaacctgtggaataaagcgataaacagatgattcaatctagaatatagatgtagcattctccaggtgaaaaaaataaaacagaagcatggtcaggttagatgaatttggataaccaacctttagaatgcaaaagatgacagtttgcaagaaaagaagcatgccgcccaattagcagttctgctgttcttagtcctgctgcagactataggatacctgcaatgacaaaaggcaagtgtcagaatattatatctgacaggagctgaaaacatataataacaaggtggatgcacctcaaatttgtacttgttggcatccttatgtcagcccgacgtttgttccgaaatgttgtttggtgtgaattgtgcacgagcagggatcaagagctgttgctgagggcgtggagctcctgtttccacaaaagtggcagatgttagaaatattaataatatagggtgtgcgcgcaaaagtattctcaatccattcatcaaagattgacttcttgcctggaggatattgttgctgaactgttgacatgcgtacaacatttgcagcattctgattagatagcggcagaatgtgacctggtacatagccaggtgaatacggttgatcacctggcacaggttggccaaactgcccatatgggtaaactgctgggcctactgtcctgggaccgccatatactggaacatactgttgcccaacatatgaaccatatgcattctacagaactaaaagtataataaattagcaaaagtaattgctaagaaggaacacgttatataatataccaagaaaaatgggaacaaaagattctggagttctcaacctgaggatacatgtattctggcccataagttgatggtctgcatttgaaaaaacaatcgatcatttacttgcaacagacaggttgttcatttgaaaacaaaagaaacacacaaagacgttatctatactacaatcccacaaagcacaattccagactagctatgactttaacaatgtgacagatattcacagcctaacaggagatcagatccttagctgtgcatgatcattgcaaagtatgcgttgaatgagctgttaacctacccataagaaggatatacaaatgcctgtggatagttgtaggggggttgctgatatgttgggctttgcacatacatgccccctggaaccgccacacctccattgtatgggatgaccggccttaaaggtgctattaccacattacaaagaagggaacaaattatcacaataattgaacatacacacggacctcataaggtgtttaagcatgcataaaccagtaagagagctttgcaactatatatttttgttgtagagtcctgacaatggcagaatataaaagaaacttaagaataaagcaaggacttcatcccttttccagggtaaccatgagctgtttagcaactgatctttctactaatgcatactgctctatctgagtttttgcgatgtaaagattttctagttagggataaaaatcagtggataccaggagctatacgctattttgtatacttgattttttttaatcctatttactattatgtgttgtatgaagttcacattttcagaaattttcaccaaaaatttgggtagaaattgaatttgttccaagattgaacaataactcattggttactggctggttggtctaggtgcaagagaaacattccagacaggaattccatcttatgccagatcactaactttccagcaaaatctgagaatccatctgtcattgcaagttgcaggccatgaaaaagatgtctggcttgtaaattaccaattttgtcgaaaagcaataatgattgtaccaactaccaaatcatgagtcatgagttgtcccctttctgttatcgattctgttacctaattttcatttaaaccaaatcctgcaatacctttcctctaaaatttataaaagaaaaaggactagtagcacttgatcatctccatttttttcccataaaaaatcaagcttctatcagaaattgattttgtactagactctacagctttggatgacattttttatatcaactagctttcatatcataaataacttaatagactctacacatttgcttttattaatcgtacaatgacaagtcccttttttcttttagaattataattaatgaaaaaaaaaaccattagttagcaaatgaaagaaaagatgtaacaagaaaaagctatgggcaacaactctggcatggtacaaaatatctaatcatgataactccagtttgttgggaacggataatggttaaaaaaaatatgcattacaacaaaattttaagctggaggaaacaatagtatatggatatgacagttatgcaattagggtagctgaaaactaagctagaagacctaccgaaaggtatgtctggcccaggacggcctaggatggcaaggttacagtttgcgcggcgcccgtcgatcaccgggtacgggtccatgcacgccattctcgccgagtctgggtcccggaaggtcacctgtacaagcctccacgcgaaattaagactaaacgttaaaaccagaagacccgatttccccttgcggaacgaaattgcttcaaattccctcttcaattccaaattcacactggaaaaaacgcgaaattgaactccaatttggaagctcggaaaggtagcaaacgaactaaaaacgatagcaacatccaaaccctagacctcattagcagcgaggctttggactccaattccccactaaatttcaaacgctttccccatttccgcaccacaatcataaaattccccaaattaccaccagggaattcaaagctcccaaaagattcacaaaccttcccggccgatcaccaccaatagccaccacacaacctcccaattcaaccccaaaatcaatccccgagccacaaaaaataaaaccccgcaacatctagcttcaaaaaaaggggaaaaaagaaagaaagaaagaagagagaaacacaggaaggaggatttggggaggactcacgaatccgtagcccttggacctccccgtggcgcggtcggtgatgacgacggcctcgaggatctccccggacccctcgaagtgcgccctcagcccctcggtcggcgtctcccacgcgagccccccgacgaacaccttggtgtacgtcgtgtccccgtacggcccgctcaggtagtgcagcgcgggcgtgccccctccccccgccgccgccgccgccggagaccgctgcggcgtcatcnccaccaccaccaccagcccacgcgcatccacccctccccaccccaaaccctaaccctagaagcagcagcagcaaacagcaaacagcgaagccgaggtggtggcgtgttagcgagcgttgcctagggctaatcagccaatcgcgcgcggtattatagccgcgctaatccgaaggcggttataattaagcggttaaactcgcgcgcgcgggagaggtgaggagggaagggaagcgaagcgaagtggtggggagttggtgccaactgcgtgcgaagaaagatcacgcgaagagaaggggagagagagggtggtttggggattttatatttttttgggttggatagggacttgtctcgtgctgattaattattgttatttggattttatatggactctctcagcctggatgatcttttttctgtttctgcttctgtgcttttctgtatctgtaattgcaaaatatctccttccttgctaaatttttttattaaaacgtatcagatataaatcatgtttaaaatactttaagtgatataacaactcacaacaaaataaattatgtattttttttaaaataagacggatggttaaacatgtgacaacggcattatctattaatataattgaaggtagtatatcctactcgcctgttttagttggtgttttagttggggggttttttatgtatattttagtccttttaaaaaatcttatttttataaattgatccctgaaattttcttggtgccaaggtatttgtaatataattgctttaccttcaacgaaatatccttcatggctaaattgatttatatatatcctgcttccctgtttcacaatgtaagatagttttggttttgtcttaagttaaactttataaaatttaaaatataataacatctatacgttaaattaattctattaaatcctccacctttatatagtataggtgaaaaaaaaaggatgtgatggagcttgggggtggagcaagctcagcgttacatgcaatgctttattgtgctttaatgccaagttgattctcaagtttagaattttatttatcgacgtcatctgttttcataatattttcataataccacgaagacatgaaaaaaatctgtcttattgtacttcaaaattaagctttcaaattcaagataaatttggactatgagctggtttggtttaaggtctaaattggctttaccaatatttgtcaatttcaatagtgtttattgtctatttggtttggagccaaattttagcatgcctaagaaaataggccattcaaacagttaatttaggctattttggcttcaatccaaacacaattttacctttaccaaaattagccatgccaaaaattgccaaaatttgacattgacaaaaattggtaaggccaatttaggccacaaaccaaaccagccctataatccaaagcacaatcgcattgccctactccatatggttgaattataaattattttagaattgtacacaagtgacacaagaattagtaactcaaatgacactattgccctgaatatataacattggaaatcatgaagacaaatcatcggcacgcgtaaaaaaaattcttataaacttgaaagaaaaatgatgtggcatactatgaatatattttttttcataaccacgaactaagtagatttaatggttgagatcttagtttgtaaaagttctataagattttttttaaaaaaaagtttgtatagcactgctcgtttgtgagaacgatagcatttatgtatcaaaggtaggcatagaataaaagatggaaacagtgtttaaaagtttaacacaagttactatagaaaaaattacgaaaactaaaatgattagtatctgaaattagagggagcaagtagtaattcagaatgcataaagcaggatccacctgacattgcagtgagagactaaacaaaaaaaaattgatatgtcttgtgtactaacaacatctgacttattctcgccatacaagcaaaaggttgtacatgtcttgaacaaacgagcacaaattaaaatattagggacaccttttattcaattttcgaatatgctaatataaaaatgtattttagttaatctcgattttagttataattatataacatagtgaaaaaatgataacacagctcttcagcagtgttaaatcatcaaactaggatttggcagtcaaaatctcgatttttttaattataaattgagtagtgcatatcacatggattgttcaagcctaatattttgattttccagaaaaaaggaactacttgggttagtgcacgtcattccggaaggatgaaagaacaataaacatatccactgattagagtaactgaattaagtggtcccctactttgtgtcctgatacttctagacgtctatgtccatgccatctcagccaatactcatctttgcagaatgatgcttactaatccacctcttgtgtgaaaaggtctcctgtccggaaaaaaagtgccggcatttcactattttatcattttaccattattgatgtgtgtaatacaggcttctactctttttaggtttagagtttgttttctaaaacaccgtacaccacatatgcgctgacaatacacgcacaatatgcgtaacacacgtaaatgttgtgagattaaccaaatcatcacatgtgtcttaccatcgatgagtacgtcatccactgttgaaagaacaactagcctcatgtcaattttacaagttgaatctgggtaataagcaggttccactataaaaaacccctcactttgctttaggcttagatttatttttgcatagaaaatgtaactaaaatttaaattttaaaatttaattttggatttggtttcaatattattattgtagtttattttttagcatgtcacttagagcatatataaaaaagttttgcgtaaaactttttctactgctaataagtgttacggtttataatgtcaaaggatgggctactaattctgtttgaacagttttgtggatttgcgatcgagattttgcaggaagaagcacccttcccccttttgccgtaaagagtggaggagttctgaataaattatgagaaaacaaaggggctaaagagacatggtctctgtatgtttatccaaaactgcagggaaagggttcctcgaaaaaaaaaaactgcagggaaagaactaaagaagcttcttgacccaaactcccaatgaacctattatattctgctgcgtatgcaaattccattccactttgccgaagtgccatatcccaatcgagatagtaatgcttgcacgtaccacacagaaaaagattcttgacccaattcgaactggatacaaatatgcagctacaccatgcaggtatgcaacaggacatctggagttgaggtaacttttttttattttaaatatagtgaaatttatttcggtctatgttttaaagaagatatagccaactactccctctgtcccataatataagggattttcaatttttgcttgcaacgtttgaccactcgtcttatttaaatttttttgcaaatataaaaaacaaaaagttgtgcttaaagtactgtagataataaagtaagtcacaaataaaataattaataatttcaaaaaattttgaataagacgagtgatcaaacgttataagtaaaaactcaaaatcccttatattatgggacggagggagtattatagagaacgtagtatgaatgaccacgacgaggtaaatttggtgaaagaaattagttgtcggtccttctgcttaattgccttcttttctcagacactatggtggtgtttggatctagggacttaactttagtccttgtatttagacactaatttagagtattaaatatagactacttacaaaactaattacataaatgaaaactaatttgcgagacagagtttataagcctaattaatccataattagagaatgtttactgtagcatcacataggctaatcatggattaattaggctcaatagattcgtcttgcgaattagtccaagattatggatgggttttattaatagtctatatttaatatttataatcaatatccaaacattcaatgtgatagggacttaaaagttttagtacaatctaaacaggtcatataattgggtccatagccatgcatggtaaagtacggactttgcgacagttgagctcccatgggtcgctcattttccctaataaaccaaaactacgtgttctttgcgacttaaaaccaaatgttgaagaagaaattacgttgaaaatagcttaaaatcttcttcaaaattgagtttaaaaatttaaattttagcgttggcttattatggcaaccaatagagctctttgatgtttatgttctctcttcaggcgatttagcagcagagaatgggaggttgcaagctgaaccaaattcttgcttctgccgttctgacttcagcggcacatatgtacgagtgaatagcactagtatcagcgagaagaattccaaaaaaaaaagaaaaaaagtggaggtagactatgtgtttatgtgtttagttccaaagttttttttccaaacttccaactttccatcacatcaaacctttcatacacacataacttttcagtcataattttttaatttcaactaaattttaaactttggccggactaaacacagcctagctagaggaacacgcttgcacagaaagtgccggtgctattgacatcacagtccagtttttttggtgaaataatttgaggggcattgcaatgcaacatgccgtcacgtctgatgctggcgtcagagtctgttgcttgaccttacgtaatcgctactagtacatgggtagcactttgtgaatgttgctgcaatggtgatagtatttgccggtttggcacggatagttgctgggattaacaccttgactcgaggtcaggattcacccaggattgttggaaccttcttcttcttttttttttttcatttttttgttgggtacatagtcgcaagatggttggaacttggaaatgctcaactggttatatttctcgtggtggaataagttcgtgggtttcagtacgaatgtttatatttaagaaaaagtacaaattaccccccccaaactatcgtggtcgtccgaattaccccccgaaccacaaaaccggacattcttcacccccaactatgaattccggacgaattacccccctcgaccaaatccatggtggttttggtctacgtggcgtacacgtggcagtccagtcagcattctatttataaaaaaaattgtaggacccacctgtcatacactactctctcttctctctctcacgggtcggcggcgcggcttcccccctccctgcccagggtccgaaaacagcattggtccatctcagttggtccacacctaacactgcaactcactgcgtttttcgtcctcgctttaacgcaaaaatcctgaaatcggagtttacagtctcggacagctcatccttataagctgctctccacctctccaaactaacgaggtgggactatatatagggggtgtttagatggggctaaaactttttagtccatgtcacatcgaatgtttggacgctaatttgaagtattaaacatagattaataaaaaaaataatttcataaatgagagctaatctgcgagacgaattttttaagcctaattaatccataattatgaaaagtttactgtagcatcacattgtcaaatcatggcgtagtaattagactcaaaagattcgtctcgcgaattagtccaaggttatggaatgggttttataattagtgtatgtttaatactctaaattaatgtccaaacatccgatgtgacatggatttaaaataagtccatatttcccaaacaggccgctacagtaccacgcaatactgtagcgctgctgctctgctcgctgctgggccgcatgcacgcatgcactctatggcctgctgctgctagcttttccttttttttttaagggtgttacacgagcggtggccgagtcgcggcggctagcggagctcaacaaccatgcgacgtctcgggtgcacggagctacgtgactaccgacgacgacgcgcccgagccggtcaaccccgccgtccgcagcctcgcctcctactcgggccacgccatcgccgctaagaggtcccgccgtatcgtcggctgcgatggcgagtaccaccgccggcacccgatccgcggcatctcaaccccgccgcccgcgcgccgtcgtcatctcccctcgagccccgcccgtgccgcgcgccgtcgtccgtcgccccccgccaaccgcctcgccgccgctgccgcctcgcctcctccgccgcaccccgccgccgccgcctcgcctcctccaccgccgcagtcttgcctcgcctcctccgccgcaccccgcggccgcgcgccgccccatcccccgcttgccgtctcctctgctgccgtgcgcatgtgagacaaagagtgaaagaagagagaggaagagtgagagagagaagtggaatatgagtatgacatgtgggctccatattttttaataaataaaatgctgactggaccgccaccgtacgccacgtagaccaaaaccaccgcagattaggtcgaggggggtaatttgtccggtttgcatagttgggggtgaagaatgcccgattttgtggtttagggggggtaattcggacaaccgcgatagttcgggggtaattagtactttttccttatatttatgactatttatacttttagtccacctggtttttattgatagacgatgcacccgttagcagtaagacatcgctaaatctttggaagtaggtgagtgtgcgtgttacatacatatgcgacatatttcttaagatctttgttttaagaaaaaccaacttctcacaacaaacgaattagttttgagattgttgtgttggagggaccgtagtcgccgttgcttccggtcagcaccgtggcctagcaggagagcgtccgagaagggcctaattgggacgcacgatgtggtcacgggccttttggggtaacgcgcacacggcccatccggtttccctgctgcatcgcgcggcacgcgacgcaacaccggtccacttattgatcttatagccaagcttgattcacttggcacgaagtcaagatggccgagttggtctaaggcgccagtttcaggtactggtccgaaagggcatgggttcgaatcccattcttgacaatattttttttgaccttgggttgggttcgaatcccattcttgacattgttttttttcctttgtttaaatttaaccatttaaccgcggccaaaaattttaattttttttgctttgttttaaccacaccacggccaaaaattttaaaatttttttgctttgttttaaccacggtcaaaattaacacggacaaaatttttttgctttgttttaaccacacccaattcttttcctttgtttaaatttaaccacaccagacaatattttttaaaaaattaaccatggataattttttttgctttgtttaaatttaaccacacccaattcttttcctttgtttaaatttaactacacccagccaaaaatttttgttgccttgtttaatttaaacacagccttttttcctttgtttaaatttaaccacacccaaaacaagctcaacctataatttgtttttttcctgggtttctgttatggttttctacttacgtacatgaacaacacccaaaacaagaacgaactatattttttagttttatactttacatgcataaaccacaccggaaaaacaagcactcctgctgtggtcggtggtcctatcaaattgttgttattacttattactgccaagaggtagggaaccaaactctcactcctcaggcaacctggtttcacaatcaacatacaatgcactctccagtcttaaaatctctccttttctttcctctaagaaaagagtgcacacacatttaactgcctaccgatgcaattcgtaaattaacaagttttattgcattgcacacagatgaaattattccaaccttcaacaattcactacgctagtttaaaatttttctttcaaatcccaatatctagctcatttcaggatcccagcagccttgtaggattgaacgctatccctcaggcattcctccaccgtcctgaacttccaccccagcttctgcagcttcttggagctcaaaatcctctcatcctcccctcccacaaacctgccattaattaatcatcaccaagctaaaaaaactgcaagttttacgtttatatgattcactcacatgtatatcaagcaatttaaacaatgttttttttattttatcgaactaattaaccaacgtcatgtaaataaaaatagagggagagctcttgacatgacaacagcctcacaggtgcattggggatatgtatacactccatctgtccataaatataagagatttcaggttgtttagtacttcatccgtttcatattataagttatttgactttttttcctatttaaattattttaagtttgaccaaatttatgaaaaaaaaatatgagaatgattagagccgggcgtccggcgtggggggagctgtatcgggcgctccccccgcgcgcccctccccccacgtgcaaacctatgggcccactcacttttctcttcccttttcccacaaaagatgtttcacctaatataattacaatgtttcattatttatagatctaatattgcagtgaattaaaatactcttttgcaaaaaaaaaaaccacatattttggaaactccctattaagggaatttggtttattttttgttccaccaaaaatgtttcacatagtgtactcacaatgtttcactatgtatagatctaatgttgcaatgaacgaaacattccattgcaagaaaaaaatccacatattttggaaaacccctattaagggaatttggtttattttttgtttcacctagtataataacaatgtttcactgtgtacagatctaatgttgcagtgaactgaaacattctttcgctatttgctgaaacattgtttttatataaggtgaaacaacacccgatttaaacgagtgaaatattttcgatcttcttagtgaaacaattccgatatacctggtggaacatcgtgcaacatttaaaaataattcaataataagctaattttttttcatcgaaatatatccatgtgtggtcttgttttgaagatttaattgcaacgaatttaatggaacaatcagatcatgatttggataagtaatttaggagaaaaatcagtttaaagcagttttgcacgtaaatcgggcgctgacgtaaaaaaatatggtagtattttcaacataaaacaaacatgttatcaaactatatttaatgaaactaattttatattttagatattgttaaatttttctataaacttagtcaaacttaatagccgctacccgtcatcaatagataaagtgcctggatagattgaaagatagcactcaagtgactggatagattgaaagatagcactccttacttttttttaatatatggcatcattgatattttaagatatgacatcattttgtcttatgcaaaaatattatgtaattatcattattttgttgtgacttgatttattattaaatgttctttaagcatgaactcatatttttttattttttatatttgatgtttttctgaaaaaataaaatgaatgaaaaaacagatgaagtattccataacccttagatcaatggagaaaaaagaattcgaaccacataatcctatggagggagtacagtatggatttggatcctctaccttcacggcttgaaggcacgagcgtgcagtcggcacctcatccaccgttcaaataatccaatggctcacgtcgcctgtgcacgtctgaatggatatctgtctgtcaaagcccacgaagcactactgctatatttcagtccgaataccaatgatgtttgcattataagtttcgtaatttttcttatcaatcctatgctctaatcataatttttcttttgcttttatgatgtgacttgacattgcgtcatactcccccattagttcccaaaataaaaactttttatgtggaaaaaaactaattacacagtgtgcgtgtaaattgcgagatgaatcttttaagcctaattgcaccatgatttaacaatgtggtgctacagtaaacatttactaataacgaattaattaggcttaataaatttgtctcgcagtttcctagcgaaatctgtaatttgttttgttattagactacgtttagtatttcaaatgtgtgtccgtatattcgatgtgacaaccaaacccaaaaattttctcaaactaaacaaggcctaagtcgcttgacttttttttttctagtcaaacttcttttttttaactttttaacacaaaataaatatattataaaaatatattcaacgttagatttaataaagctaatttgatattttatatattactattttttatataaattagtcaaacttaacgatttttgactagaaaaaagtcaaatgacttataatatgaaaaagatggagaactactttgtaatgaattagtattgttatttgaaactttcggttttcttgtatttttaatttagtgatatcatccattttttttatgtgtattagcactaatatagtttgtaagtttcttcagctcgcgtatacttcccagaccaaaacaatcatcgtgggatttttttttttttgcgatagaaccatcgcagtcttttacagacaaatttattcgtctttttaagcgcacatgcgacgtaagccgttggattacttcaatgggggataaggggctgactgcatgctcgtgccttcactctgcgaaggcagacgatccaaatccgtagagtatgtgcttactttgggtagttgatatccgggaagaagcgcctgacgatgtcaaccatttcagacaccttgatgtcgtatgcgctgcagatgtagcggccggaagccgccggattttcgtacgtcaggatgagtgcggcggcgacatcacgcacgtcaaccacgttcctcctcttgtccgtggtggcggccttctcctcatcatcaccgccgccgcctgccgccgccgccggcgagcacgtgcataaaagcaattaaccggtgagaaacacatctaggaattcagtttctgtcagatgttcatatgctactagctcttggaattcagtcggtattactgtcagatgcagatgcatttgctgtttaatcatgatcgagcttaatcaatttctgaatatatgtaaaagacagtcttctgaatatttcttaattacctttgatcaggttgatgaggatggagctgctggtgttcacggtcgattggagcagaggtccaagaattaatggcggacagacggtgacgacgtccatggcggcggcgttgtcagccgcgaaacgccacgcctcgcgctcggcgagcgtcttggagaggcagtaccagttctaaccaagatcgtctcataatttcagttcgatgcatggcaactcaaaatacgtgcgaatgattttatttctatttttctttttgaatattgatcgatggtttaatttgtttgtgttgcattttgacacatttcggttgtgtttacctctatggatcggcagtagtgctcgtccgaccacgcgtcctcgtcgaggacggcgtcgcgggggaaggccgggttgaggatgacgggggcgggggaggacaccaccacgacgcgggggacgcccgccttgtggctcgcctcgaccacgttccgcgttcccgccaccgccggagccagcacctccgcctggcagcgccagcgccggagaaattaaaaatcaaacggggacgggacgccgtacgtcgccggtcaggtctggtctcggctgctggactccggtaccaaatatcgtgcctcggcgttattatcggggttagatcttctacgacgtttcttccgggtttagtttctaatgtgatttcggggttgtggggcttggaggcggggacggggctggcgacgtggaagacgccggcgcagccggcgacggggggggccacgctggcgcggtccagcacgtcgggcttgaacagccgcagccgccgctcgccggcgccgtagtccatctccctcaggtgaccgttcttggcatcacctgcactaacggccggcggccatcaacgcgcgtgcattcgattcgattcgattggtcgtcgcgatatcttacttgggtcacggacggtgccatgcacgacgtagtcgccggaggagaggaggcgatggacgagccacgaggcgacgaagccgccggcgccggtgacgcacaccgtcttcttcttgttcttcgtcgtctccctccctgcggcggcggcggcggcagcgccgtcgtccatggtggttttctctcctcgtcccctcgatcgccggaagcctccatttatatacgcgagcggtggctgcccggctgcacgcgcgcgcgacacgtatcgcaggctgccgggacacgtgcgcccgccacgccgcccgtacagcctgtgcggctgctccctctatggatagcatttcgtaggtgatatgtactggcatattccctaattcctccgcaaaatatttgacccattttaaggaatgaaattgctaatcatttttcgacagaaaattcagtcccaatcttacatattttggatcactagatgtgcttcgtgatttgtgttttaggtgtttcttctctaactccgatcctagcgacaacccaaactctggcggagggccgacgaattagggtcccaggttgaggtgggagggaaagggagaagaggggggagttcgttgtctttataggatggtcgtgggaggcggcagccccgccgccaaggtcggaagcgagcagtgggctggtgtaggcggcgggggcaaagcaggaggactgttaggaggaggtggccggtggtgatgccccgtcgtcgaagatggggaagacggcgatgcgaggatagctcgccaccaccgattgaggaaaaggataggagaaagagggggaaagatagggggaaggggccagtcggggcccgggagggcctcgccggtggttgacgctttccggctagccagcaaagccgaagtagcggcgcaggaggtggtgtaaaggaggcgtcgggaagcagcgcactcaagggctttgtgcggtggcgaggagggaaaaggaaaagagttagggttttgtggacttcttacgaatctaaacgtaatccaacggtctaaatttacaaaatattaggaggggtttctatcaaatgaggagtagatggtccctttaaaaagaatctagattggacattttagttttaaaaagatggattacatcccttcgttttttaaaagatagattaaatcccatcatagacaaaaaaaattgtgactatattttttaagaatttcgttttttgaacaaaccaccattttaaattacttcgttttagttttttcttaataaaacttttctatctttcattgttaaattaaaatctctactattataaaacttgaagatgtttttgccggtaatttagtacgtcatccatgtatgagtcggtttttaagttcgtttgcttttggaaatacatatccttatttgagtcgatttttaagatcgtttacttttggtaatacagaaggaatcatataagaaatctgtttaaaaaaacttgcatgctaacttgagatgatcggactcttaattgcagttcatgattttctatatatatatatatatatatatatatatatatatatatccaagcgaactcccacagtgaattttatcttaactaaaccatataacaataataataagattaaaataaacttctcccgttggtcattgcaacgcacgagcatttttttctagtatatatataaagtttaaaagcataagattttgttttgttttttcaaacatggaagaaacgcaggtgctcacatgctgacatgtacacgctacccctatgagtacatccaaaagacttagctgatatatcttgagattaataaaatcaccacgggctaaggatggaaacaatataattatttcattactattttcggaaatgaacggaaacaattaggaaattttcatatttatgaatttaactaaactgtcaacttcaatgtcacaccgacagaaattggaaaaactaaaatttgaaatcagtaaccatctgtaataataatattattattatattagttttgcggaaacagattaatatgatagtgaaattgggacaaacactgagggaaaaaaacattttttttagttaagtacatgccacgaatgaaatcttaggattgatcctcagtccacctaattgggaatgtgctaattgttgccttatttaatgtttgcaaattgcaatggtcatcaagggaaggtcacgcaaagaagatggcagagagaacgttggtaatttaggtgaacatggaaagagtatgatgccttgagccaagtaactacggaactaatgtgcacagcacactagtacataacttcatataggcaagattcaaaactaatccatcaccaactgaattagcgcaagaacaaaccagtttatattaaggccctctttgtttagtattataagccaacttaaaagccgaaaagtttaagcctaaacaaacaagcagcttattcgtttagctttttaaaagacataagccactctaacactattaagccaaaagctaggttggagaagcttttttagcttatatgaggtagatgtatgactccaccactaaacttataagctgacttaaaagtctaaaccaataagcctaagcctaaacaaagagggcctaagccgtcctcaccaccgagccaacaactgtcaactatatatatctgcattgctcaatggacaagattcaggaatcaggatacaccgatacacttgtggtttttgtttttgttttgttttgtttttacggaaatgcactggtggttttaataacgattctttattgacccggttgatctcaacacagattacatgaatcatggagagtttaacagacactgaagttctcacagtttggatcctcaatcaaggatgccaaatgctttgtaggattccacgctgtcccggagggtttcctcaataggcctgaaactccagccaagcttctgaagtttctcaaaactgtatatggtgttctcttccacatccacaaagctacaaaatcattggatgagaggagaataagttgcatgaaagttaagcatagagaagctgaagataggaacaaatatgacgcatctagttcttgtaaaaaaaagaagcatttactggtctagtgaaataattgcccataaaaatttcacaccgctttgataaacttggtactcagttgtattttattgaaccaagtgatgtgggtgtatgaattcaggaaaaatattatggatcttcaattctacctagctatctcaagtttatgtaccctccccttttatgaaatgccagccatatctgttgtacaaatgcagagttaacagctacaacacaggtaaaacacatccagtaacttgttgaggggttgggcttactttttgggataagtataagttggatataaggtctttaaaatgtttatcatatcagagactcttattggagctgagctgcagatgtatcgtccggatgctggattttcatacgccaaaaggagagcattggcaacatcacgaacatccactacattccggagtctattttcgacagtgtcacgatctcctgcaaaagatgagtacttcattttaacagaaagcttaaagcctaaaatactttattgattgaaataacttgatcttagtattaagttctttcacgctattcgttagtaagctttcctttttggaacacaagaaggtggatatcatttctgataacacagctcaaacataatactgcttagaattatgattttaactatctaactccatgtaaaccaagaggaaactaatataacgatgtaacacggttacctttgaaatagttaatgagaactttactactcgcgtttactgtagattgcattaagggtccaatcaccaatgatgggcaaatagttacaatgtccagcccagtttttgctgcataagcaaaagcctcacgctctgccaccgttttcgaaaggtaataccaatcctgccagaataacaacacagataacttcttttgagtgggtaatacagcacagggagttatgtaccacaaacaacaagagtcacgaatattctttgtcaatataggaagatcatttattatgagaaagcacaaagtaactatatgtcatagcaatcaatttgcccagtagcaacatatactgaaaaaggtatctgaaattttgctcctctcaaggacattagtacatataaatttagcaacggaaaaggcattggcttacttgaaggattaagagcattacctgattctttctgcataattcctcatctgaccaactgtcttcagtgaaagccttatcctttggccagttaggattactgaacacggcagcaatggaagacaccatgacaactcgcttaacttttgcctcatggcaggccttcaacacattaagtgtgcctgttacagcaggagctatgacctctacctgcaaaacaacaatagttatataatgtcgacataggaatacaagatcatagagccaggagtcaacgatggtgcaaagcataaatcagaatgaattgtctgtaatcattaattttatggggaacacagatatcctgaaatatgtgacttcacttctgatctaacatcaactgctttatactaatatcaccaatttcaccatgttaaaaccataaccagcgatggccccttgattcaacacaaaaaaatcaccctattttccattgttcgacatcaacccaactgacaacaaatatatgttcttgtcaaatgttaacctcagggttggtggatcggcccgagggtacagggctggcgacatggaagacgccctcacagccggcaaccgctgaagctacactgtcatagtccaacagatcagccttgagcagctgcaacctctcctcggcaccttgtagcgccctgagatgatcattcttggcatcacctacagcatacagaagcaggcacaccacgtcaccaccatcatacatagcaaaacttttgtcccgccataataagtatacaatgtaattttaaaataacttcaaagattaggaccttcaaaattcttgtgattcgacctaaagataaacaaatagttgtacgaagaccaaactaacatttcaggccaacaaaaaaaactcaaaattaggaactagaaactctcctctttgcttccagcaacatacggatcattatttatttatttatttattcatttatttgagtattgcacccctgaaccctttttgcttctttttttctttttgagataataccctctgaaacctaactccatcatccacgcttccacctcgcatacttccgccccaaatttcaccaactccggggcgacgaatcaaaaaagcaaggcgaggtttggaggggctgtgaaggtgtatgtgtgagcggcctcacctggatcccgcacggtgccgcggaccgcgtagttcccccgggagaggagcagctcgacgtgcgacgaggccatgaaccccccggcgccggtgacgcacaccgtctgcctcgccgccgccgctgccatgccttcggacttccgacttcctcaaccccacactcctcttcgctgcggagctcggtttggccgcacggcgccgtctcgattatggcctcccattcgtttttgggaaaaaaaaaagtcgatatcgcctccttgattatgggaaataaatttgtattaaatataagaaaaaggggtgaatagttaatttagtcccttaagttttaccgaagtctcaatttagtctttcaggtttcattttgttcacataggtcctctaagagcaggtataataacaggctattagccagttataaacatattttaatgcgataaacgatgagagagatgagcaacgggctacagatttgtagccagttgcagtaaggactccaagacgcaaggtgtgtatgacaggtgggaccatatattaacaatatagtaagtaactattgtataaattagctattagattggctatagattgaagttagcagtgggctatactattgaacttgctctaagtatttgttttggcctaaaattatccttgggcccacttaatatgccatatgactatttctagtcaacaattatattagaaaatatccattttgcccttaatttgtgtacaactatacattagaaaaaagaaaaccaaaatgaataaacaacattgcatatatacttcccattatttcaacatgtgcatatgaacttgagcctcatggctatcgaatacacttgcaagtacataatttgtttttgttttacataaattgctatgtattatctataaaaagaattcatagcatgcaattttttctcttatatatgtgaatgagggggtataagtgtcatttattaagagagttattggttatgtgggttcaattataagtttgaattaaattaaaaacttgaaggactaatatggacagattgaaacattaaagactaaattgatccttgcatgaaacctggaggatcactttggctatttacccaaaaaaaagccaacctgtagaaaatgtgacccctgctcagggtttacgattccgacaggcccttccgtttcgggcaccggcggaattcggaatttcatgaaatacagtgaaaaaccggtaaatcctgaacaaatttcataaaccaaattttgaatacaaatccctgagtttgccgacaagttctcgaaaaccgatcggttttggcgaaattccgatcgaaatcatagaaattccgatcggtaatttgtttctttttttaattctttatttttttctttcctgatgtaagttttagtaaatacacacaatacatcatttttttcgaaaatttatatcccaataagttctatgaatatcatagtatttataagatttttttctttttttatcaattcaaatttgaatttggatgacactcctcgaaatcttagatggtttctactttcgagcctcgccgaaatttcgcgaaatccaaccggatttcgtcggaatcgtaaaccctgcccctgctactcaagtaatctagacagcgggatggtataaactaggttggccttttatttttttttacggagggagttctttatttctcacttacccacccacttttgtactaatttattctacgtctatcatttttaaattagtttataccatctcttttgtaccatcaattgtacttcgcgttctttttacatccttaatttttacaataaagagagtaacctgttatattatattataggacgaagagagtaattcaaaaccagatacaaagcttcttttcatctttcaatgctaaaaccaattcatttcgtctcccgagtggtctagatgataatttcatccttacgtgacatttacatgataattatgacgtgtcacatctcattacatgcaaaactttttttttaaggaaaataaaagaaccatcaacacccacatgtatctccttcacgaattaagtttgaaaatacactattcattcaattttttccacaaatattcgggatgcaatttatttgacagaaatatatcattcatctcacataaccgatgtgtgaaaacaatgggctggtttgttttgtgacctaaattggccttaccaacttttgtcaatgctaaattttttcaagttttggcatggctaattttggcaagacaaagttgtgtttggattgaagccaaaatagtctaagttaactattgaaatggcatattttctaagttaattttttttctagaagttatttatatcgctgttactgaagacatctcgactgaaattatttttccttgcgcctgcaacagtagaaagttcagtagtacatgttgatttagggataaccctaactgtttaaacaaaaaaggttaactcacacaagatgtagttttggccaacatcggcccatattaggatgcttcattctgatcctattttattttgcatcagcaggcactgcacagctgcagcgttgtaattaaatcatcgacatcagtggtggggccttatgcttgggtacgcagcggaggagggagaaataaattatctgtactgaccatcggtaagtaatatttacacctatccttatttttccaagtgccagtaaaatgtcttagactacttgatcaagcatagaattgagctataagagcaatgagtttcaatgatattttgtgtatgtgtagaagtgtgaatgatgtgtcgacaggaagaatgggttctcgtttaaaattaaacaaggcatatttacaagaaagaattataatacgttaattgccagctttgtgattatgcaccacccataaatcttgcttagaagtttaattaacggtattatggtaatttccacgaacccgtagattctttactgtcctaataggcctaggtgcatttcttatcaatccaaaggcaataccatgcatactgctattggaatatttggcagagctttagatattggattatcatatggcacctatctatatctgtaatactgtagtactccgtactcattaatcattgtacaaattgaggagcatatctttctatcatttttacatgagactatgtccttactggtccttctcatatgagattagctcataagaatttcatactttttgtttttgtgggtgaataccaacgtgcatttggtggaagaacataaatcaactggtcctgctaatctatgatttgctcttaaaaagattatattttttatgtttccaggtgaataccacggtaccaccatgcatttggtggaagaacacaaagctactacatttgtttttgttattttattagatttgggatcaaattttttgtgggcatgtacattataatgtactactacgtatcacaatataaatgcttaggatcaagttgttacttaggggtcttggccacgtagatgattgtgtttgtgtatgggtggatgccattgacacaggttcttaaacatgtatttagagttgcgcaaagcgcaaccatgtggctagtatttttactaaaagaattacatcccgaatatttgtgaaaaaataaatagcatattttcaaatttaattctctccttcactttcttcctctcgatctcaccccctccctgccgtgctcgttgcctctagggacggcccttcctcgcatggtgactgttgggatctgggttactgttcgatgctctttcgagccatccaaactgctacccctaagtaaatgaaattttagtttgccaccaaaaactgctatcatcaaaattttagtgagatttac

SEQ ID NO: 28460 - DNA, 4774 bp, Oryza sativa
gggtggatgccattgacacaggttcttaaacatgtatttagagttgcgcaaagcgcaaccatgtggctagtatttttactaaaagaattacatcccgaatatttgtgaaaaaataaatagcatattttcaaatttaattctctccttcactttcttcctctcgatctcaccccctccctgcggtgctcgttgcctcctagggacggcccttcctcgcatggtgactgttgggatctgggttactgttcgatgctctttcgagccatccaaactgctacccctaagtaaatgaaattttagtttgccaccaaaaactgctatcatcaaaattttagtgagatttacaaaattattaaccaaacaaacaatttggtctactcaggaatatatcctttggagtacatgattccgaaaaatacagaaacatgaaaatgccatgagtaaaatatcatgcttcaacgaatccgacagaaaaatgaatctagaagattttgttttaaaaaaattgtttggtaataccactgaaaaggcatagaaattttgagcctcattcgttcgaaacaagccattctattgtaattttaaggactttgtaagattcatttgtaaggggttttggaatggagcccttagaatctgtttgatttaggttcttgaatctgtttgattttgatttagcaccaatggagttttgcatcgacagcgtactaggggtggccgcgactggtagacttccactcgtcaaatctggccgtttcaggagaatatggcgggacgcagagaagcatgatgtacgtgctgaggtcgtttggttttcttttcatttttttgttgtattctcctccttgttgaggtgtgagtttaagaactcttgtatcattttgttgtgtatatccttcgtggatatagaggctgaattactgaaaatccattattaaaaaaacaaactgatacacttgtatattactattatgatacacgggcaaaggaatcaaaatcacacaaataatgcataaatctagcacgatataagtacaaattaatgctacatctagatactcttgacgactccgacatatggcaattcaacatttcccatgtatattttgccatccttcctctccatcacttcagttggtctcaagctctttggtcctctcatctgttgcaccagctttccaccagcactaactctcattgcaaccaagtgattgtccggaccaaatggaagctcatacttctcacgatggagcgctacccagtaaccacctttctcatcaggcctcacattatcaggatagcctggcaagtcgacaaatggttcggacttaccaacctttggacctcgaatccaatacctcaacttacatgggccggtcaacgcaacgatcaaatgtgttcggtcagcgctaatggcgacaccgttcgggtaggttatgttggattgaagaacggtgacttggttagttcgtgggtcatacttcatgagccgtccggtcgaatccttggtcgccgtgacttgctcgtgctgagatcgttggtagttcatgctgctgtcagtgaaatacacatctccggtaacctgatcaatgtccaccccattggtgaagcgaagtggcacgccatcagccttcgtggctagcactgttgcctcaccacctcctggcccaactcgcatcaatcccatgtaggcgtcggcgatgtacaggttgccggttttgaagtgaaaccgtaggcccaacgaacggccgcatttgctctcggtctgaaccgtggggagagtcgatgccgcgcacttgttgttcgtgtagctggggctgtacgtgtaggtgctccagccagccgcctcgccgttccacctcatgacgcggccgtcggagacgccgctgtatgggccgtgtcccttgccgtcgaacgcgacgctctctggcccgaccagtgatccgccgaggtccagatgctggctccgtcgggcgtcgatggtcttgaacattctcgctgcggcagcggtgcgggggacggcgagaacaccaggacgaggatgagcgcgagcgccgtcgccgccgccgttggcctcgccgtggtcctcatggctagctgcaggggagggagagctcgttggtgcacgcgtctcgtctgcttgatctctgttgctgcacgtacggttggtgctcgtgcagtcgtgctcgttcgctgctggtggaggagcagcgtggtgattatatactgctgggttttggcgtgttgccaatggccagcttccgaatcggagaagacgagcggagcactcgatcgactcggactcgggtgtacttagccgatcgtgggcccggcctgtcatggaatataacgataaatgggcctggtgggcctaactgggcggcttctctctccattacaagcccagcccgtttagaactgaacttacacgactgagtcttctaacagaaaatcatcgatgggtttcaatgaagttcagtgttacaagtgcaatacaacaggtttttttttttttctaaacaaggattcagagtttcagacgttgagcaaatccaacgagcttggcgcgatcagataattacagtgaatgctgaaatgcaggatgcagcagctaacgagcccacaacgccacaaaagcctccggcatcggtcaatgcacgcaacgatcagatatgttgggtcagtgctaatggcaaattggcactgcaacaacgtctagacttcagcgggctcgcgtcaatgtcacccaaaggggaagaagatcctgcggcttggacctttcaggcttcaccagtatgaactgatctgatttgttacagtagtgcactagcttttcttttagaaacacagtacaaagttagaaacgtaggtgcttagaacacacgcaacacacgcacacccacccttaaaaacgcacgtacaccctatccctatgagcaccttcgaaggaatcggtcggcatatttttatattgatgaagtcaccatagacgtctcgctgtcgacgggtatgtcgcctaccactgaaagaataaataggagtaaatgtgagcacatgtgtgatttctcaaacttcgttattgagctcgcgccaaatgtgacagttgtcaaacgttgtggtaactgattggagagaacaatactgcaaagggcaaactgacatcttcaggccctatttgaaacaaatgatttgttgagaaattctacaagattcaaatcttatatgaatcctttcaaaaaaagagttgtagtttctcaaatcctatgaaatttctaaggaatggctcaatacacgtagattttaaagaagagttagcgtgagtttttacctattgaaaatttttcttttaagtctatctctcttatcctttcttgcatgtgaaaatttgtcatacctatttaatttaaatgacatacgagaaatgaggaatatttattggcatcaaaatgactttgctactatatataaggatactgagtaaacgttgttgactgtaaatgttactaaaaaaaatgacaaaaagttcaatgttcgtattatacattttggtaataacatatcaagcgctgttgttccaccgttgtattatgtctttttcttttcaatggtaaagacggacaacagacaccagccatataaaccatgtacaagcagtcaatcgtatcttattctagaatatctgcaacggtgctcatagatctgtgagcaccgttgcagatattcatttccaaacactaaacaatataaaaaaaatctcaacaacaagatcaagtaaaacactccagtactaaattattattggccacgggagcatatcctatgcacacaggccctcgcgtgtacacaccgtgtacaccaactaaaaattatcacaaaaaattctaggaaaattcatacatgtattttcaatagtattacatctacgtataaagtcgcatcttcaaattcattctacatagagaataacaaaaaagataaaattctgacaaaattgcaaccttaaaactgtcagattttttgtttttttttgttacggctaaaatataatgaatttgatgttaagattttaaccctaggtgtaatacaattgaaaatatatatatgattttttctagattttttggtgacattttttaattggtgtgcacgtgtgtacacgtgagggcctgtgtacataggatatgttgcctattggccacaccggaatatgagaacaatacaagatttgattatatattatggtgtttcggggagagaactgcacaaatacacaagtttttatgcttccatcctgcaaaatacgacctggaattttaatcttcgctcaatttcagcctggccaagatccttactcaatttttccagtcttatctttttcttatgcatatacttatctgaattgcttattatcaacttaaaaaataatttgtgaacgaaaattttatatgtgtgtcctttatggttcaaaagcaaatgttgtaaaaaaattatgatgaaaaaaaccaaaaggtcaaataaaataattaagttttaaaatttaaaatttagcttataagtatagtaagtcaaataaaattttaaaattttataataagctataaaatacatatattcatatagcaatgtaatatctgttctgctagtcagaaacaagaaatcgacacctcatggaatgaacaaacggatcagatagtggtggatataggaagagatagctgggaagtttaaacaaactagataaagttagagcccccttcctatctatatatagcaa

SEQ ID NO: 28461 - DNA, 16893 bp, Oryza sativa
atcagagatatgtctagatacaaatgaacaaaaagaattataagcatctgagttctcatccatatacgaatcatgttccttgccatccttggccccagcaagaatgctagagtgctagacattcccaacttccaaaatgagcaaccaactactacatacgaactaagctggtgggaacccttctccccagcacgcaaaacaaagcatatattattgtatgattaattaagtatttactaattttttttaaaaaaggattaatatgactttttaaagcaactttcgtatataaattttttgcaaaaaacacaccgtttagtagtttgaaagcgtacacttggaaaacaatggagagatgttggaaagggaggtaaccaactgagccagtgtatccatttgctaatcatgcgtagaaaaccattttcaccgaccaatttgtgttgaattctgaggcgggcttcggattctacaggcccatgtcacaacacccaaaccgagctgatccggcccaaccagcccattatcatctggcctacttggctacttgtccaaactagcctaggaaaagtttcactgggccttctaactcggcaaactctgacaaactctgggagccccgaatccgagtcgactgtcaagcgagccatgctgcctgcctactcggattctccgactcaaaacttgtccgactcggagcttggcattgttggcaatggcacaacgcgcgcgccgcggcctagctatataatccccacgcttctcctccaccaaagccaaccaaaaccaacaccaacagccaacgatcacgagctcgcgagctcgatcgtgcaaccatgaggaccacggcgaggccaacggcggcggcgacggcgctcgcgctcatcgtcgtcctggtgttctcgccgtcccccgccaccgccgccacagcgagaatgttcaagaccattgacgcccgacggagccagcatctggacctcaccggatcactcgtcgggccggagagcgtcgcgttcgacggcaagggacacggcccatacagcggcgtctccgacggccgcgtcatgaggtggaacggcgaggcggctggctggagcacctacacgtacagccccagctacacgaacaacaagtgcgcggcatcgactctccccacggttcagaccgagagcaaatgcggccgtccgttaggcctccggtttcacttcaaaaccggcaacctgtacatcgccgacgcctacatgggattgatgcgagttgggccaggaggaggggaggcaaccgtcttagccacgaaagctgatggcgtgccacttcgcttcaccaatggggtggacattgatcaggttaccggagatgtttatttcaccgatagcagcatgaactaccaacgatctcagcacgagcaagtcacggcgaccaaggactcgacgggacggcttatgaagtatgatccacgaaccaaccaagtcaccgtgcttcaatccaacataacctacccgaacggtgtcgccattggtgttgaccgaacacatctgattgttgcactgacggggccatgtaagttgatgaggtattggattcaaggctcaaaggctggtaagtccgaaccatttgccgagttgccaggctatcctgataatgtgaggcctgatgggaaaggtggttattgggtagccctccatcgtgagaagtatgagctcccctttggtccggacaatcacttggttgctatgagggttagtgctggtgggaagctggtgcaacagatgagaggaccaaagagcctgagaccaactgaagtgatgggagaggaaggatggtaaaatatacatgggaaatgttgagatgccgtatgtcggagtcgtgaagagtacctagatttatttaggatgtgcacttagggagtgtttgaggagaagtggattgaggagattgggaagatacgtaaaaagaggtgagccactagctcataattaattgagtattaactattttaaattttaaaaatggattaatatgattttttaaagcaactttcatatagaaatttttttgcaaaaaacgcaccgtttagtagtttgaaaagcgtgcgcgcggaaaaagagagccaatctcccctatcacccctaaacgaacgatgccttaggttttagcatgtgtaagatctatgcgtaatttgtgtacttttgattcctttgctgtgtactgtaatttgtaagcagattagtttggttacatgtgcattttagtgattttcattcctctggttatgcatccagattctcccgtaaggcctcatataaagcttatcacacaggtacatcaagtcactctcatgttcagggcataaatggcataattctcagcgcaaatccatcaccaaaagataattttatcttctactcccagctgctgccaaataggcagctcttacatacagatgttgccaaagaggccagatccaattaaggtcgatcaaaacaaacacctatgtagtagatctattaaactaagcctagaacccgatcaatgtgttggtaattccttcaattgtgttggtatatacacaggacaccatttgctcaatccaggacacctgcagctctataagattcaacactgtccctgagtgtttcctcaaatggcttgattttccatcctagcttctctagcttccccgagttgaattgcggctcatcgctcacttccacaaacctgtaattgaaatgtaggggtttcatagaattcatatggaaactttactaattcaaaatgcagcaaaagcataacgattgccgtgttctacagatgcaaagtgcaatacttcatacatacgaaggaaagatttcgctattctacatttcaacccaagagcagaggctcacttgtcggcaaatttgtaaccgggataccagctctttagtaagtcaatgatatgaggcatccttcttgcgtgtgaactgcagatgtatcgtccggagacccctggggtttcatacagtaaaagaagagcatcggcaacatccctgacatccacaaagttcctcagtttgatttttacctcacaatcacctgccgagagataataaaatggatctcaatctgaagcagccacagaaacaaagataatttatactccctccgtttcaaaatgtttgacaccgttgactttttaatacgtgtttgaccgttcgttttattcaaaaaatttaagtaattatttattcttttcatatcatttgattcattgttaaatatacttttcatgtacacatatagttttacatatttcataaaagtttttgaataagacgaacgatcaaatatgtttaaaaaagtcaacggtgtcgaatatttagggatggagggagtattatatagttggcaatggaggagatcgacaggcaccgatcactgttagtgtcaaccttcatctcaagatggccatgctccatctcagcacttttgccgcgacttgctggtctctcgcaaaaaagagagaaaaaaattgtaggagccatccaattcgatcagtagcttgattgagtgaaagcgataaatctctaaaccataccctcgataggaaaaacaacaaaaaaaagaaaaagaaaatcggtcggagaataaaagtccgaccccctcactcgtccaggtttgcaaaatcactgaatcccagagtctcaaatgaaatgtaaacagtttggaattgttgatgcttgcaacaatggcgataatgtagcaccgcagaagacaggaaaaaacagaggtgggcagcccgtctaggtcctcaccccttctaattatttaatatcagaccatttcataatattcatgttttttatttaattggagtggtttatgcaattttaccttttttctgaactagaaaaaaaagcccaaccattttgaaacggagggagtataatgaatcactggagcatagcaaagtgaggcaaaatgctcaacctttcagacatccaagtatgactgtactgctcgcattcacagttggttgcagcaaaggtccaatcaccaacgatgggcagagtgtcacaagatccaatccacttctcttcgcataatcaaaggcctcaatctccgcaagtgttttcccaagggtataccaattctgccaaaccgatgtatcaagcgaaattggaacatatgagaaccatatgcctacatgaccaagatatgtaaagaagaaaaaaggcaaagtattgcactattgctcacttgaattaatcatctcagactaaagtctcaaggcaccgaatatttaagcaacagcaaaaactagtgaactaacagaaacagtattccaactagcgttgactatcaagatgtttattcatgcaaatttgctttgtaatttctaatagtaagtttttttggatacttatctagtaaatccaacatcatgttgcaagcaaaatctgttactccctccgtttcacattgtaagtcattctagcatttctcatattcatattgatgttaacgaatctagacttatatatatgtctagattcgttaacatcaatatgaatgtggaaaatactagaatgacttacattgtgaaacgggggaagtacttgtcaagagttcaaggctcctttgatttgtaggaaaaatataggaattttggaaagattttaatcctataggaaaatttcctatgaaggcatttgaaacaaaggattgaatcatatcctatcatttgaaattcctatgaaacggataatcctatagaaattttgaaggaaacttagcaagagctccaacctcttagaatatttcctttgagtctatctctctaatccgattcgtgtgtttttcctgcggtctaatcaaacggtcattcctgtgtattgcaattctctattttacaattaaattcctatcaaaatcctatatttttccttttcctttgttttttcattcctacgattcgaaggggcccctcagtcatttatctcattgcatatagtacatgagcaataagccttgtgttggtttggttggtatcaccttagtggctctgcagtaatcgacatcagaccagcaatcttcatctatggccttgccctcagaccagttaggattcaccatcgcagcagagacagatgacaccaccacaaccctcccaaccttagcttctgaacaagccttcagcacattcgtcgtgcccgttacagcaggagcaagtatatcaacctacagcaacatcaattcattagctacaagaacatgacggtttacaactctctgcagacttcagctactactgcttgttgagaaatcaactgtttcaacaaatcatttctagtagaaactgttgattttgtcgattttcagtaactgcagtctacagtttgaacaagtcaatggagaagagaaggaattgttttgctgaaaaagagagagagaggtgtgcctctgggttgggggcggagaggagcacggggcaggccacatggaagacgtcgtcgcagccggcgatggccgccgccacgctgccgtagtcgagcaggtcggccttgaacagccgcagcctctccgcggcgccgtccagagacatcaggtgggcgttcttggcgtcgccttcgcacaaaatcgccagcacacgcgcaccaatcaatcaatcaagaacaagagcagaacgccgtaaatatcaaaatctctgagcagcatcagaaggaaatttctgaatggttcatccaagaactcagcaaggaggagatcgatttcgtcaaagatcccaggaagtgagggtatacctggatcacggacggtgccatggacggtgtagcagccgcgggagaggaggagcttaacgagccacgacgccacgaagcccccggcgccggtcacgcacaccgtcttcgttctcccgtcgccgcccaacattgctatggtacaactgctgctacagcacgacgtctagacttcggttagctcgtgtcagtgtcacccaagaggagaaatcctgtttcctgtctgtggcttgtagagttgtagtactaccgtctaccggtagtgtgctagttctactatattatgtcgcatggatatcaaaatttaagtcttatacaagttaattttgagattaattttaaaggttttgtttcattgtagttttcttttttaatattaacgcttaaataattaagaatatgtatgtaaaagtttaaattctaaattatcttttctgctaatacgttaaacgatatagtttcagcaattggccagccgatgtcacctttagtctacttcgagcagcactgattaattaactcaccagacaaactggttattgagcctgtgcagaacgtgagagttgacaaatgttgtagcagctgattgggactggatagtgatctttttttttttcaaaaactgaactggatagagacgagtataattatttgggacagaggataaggatagcactgcaggttcacatctcgagaacccctaattagaccatttttaattcgaagtaaaaacatatcatattggattttttttatatgatccttggaaataacaatttgttagatcatatgaaatttctaagaaatgccctctatccacataagttttgaaggattttttaacataagattcagtctcatgaaaagtttcgaatggatctatctctcttatccaattctaatgttttttttatggttcaatcaaacgattatttttttcttttctttttctgtattgcacaactatattttttttcttattccttcgttttcttaatcacgtgtttcgaagaaacctttaatatgtaaaggaccaatagtaaaaccatgaagtttatttggtttctagccacaaccaaacttgagacttaggctgagttcgtttctcatgattcctaacccctctccctcgttttccacgcacacacttttcaaacttttaaacggtacgttttttttcaaaaagtttctatataaaagttgtttaaaaaatcatattgatccactttatttaaaaaaatagctaataattaattaattatgcgctaatggaatatttcattttccgtgtttcttgtggaaacgaacacagccttaaaatttaacatgtggagtgtctgcacatcctattcacacagtcgccctttgcacatcccctcccaccataccgcgcacaaagggaaaaaacaaacataaaaaaccaaacatgcccaccttctcccataagtaattatttcctatttcttcggatcccattatagtgtacggcattattgttggcacataatgagaagtgtgggtcgtcataattattgtgttctagaaaaaaaaagagaataattatgggtagtcaccaaatgcataatactcctccgtctcataatataaaggattttgaatttttgcttttaatgtttgaccactcgtcttattcaaaaaattttgaaattattatttatttcatttgtgacttactttattatccacagtactttaagcacaacttttcgttttttatatttgcaaaaaaaaaattaaataaaacgagtggtcaaacattgcaagcaaaaactcaaaatcccttatattgtgggacggagggagtatcatggctaaagggagtgcctaggcccaaaaaataataatttcatttgaagctagtgcgctttgttggtcaatctgacgttgccgtaatgataaattttttaaccataagaaattgtctaacattataggttatcttcatgtgtttcaatttactccattcttgggtacgatgttttataggaataacatgatactatgcgcattggtgctacatgtttagaattggtagccaaggagcttttattccaatttggatggtacagtacctacagaatttcgtgctagaatctacgtaattttgaaaacgttatttcagttgacccttttattggcgggcgggagttggggggtttgtcccatcacatcttttttaagttcttctaagacttgttggatgtgtgtccatgagcagaggccggagatatagcccttttctattatgtaagaaaaaaaaccataatatcaaattgtagccaacattaaaaaatgggtccaggctagctatctcgttagctaaaagttgcagtcaactaaccaagtttagcaaggtgtggaggctagccatcccaagtccttcctcagtactccctccgtaaaaaaaacaaatttaaaactgaatatggtacttcttagtacaataaatctagacaaatatctatctagattcgttgtactaagatgtataaaatctagtgctagattgatttttttatcggacggaaagagtacaaatttgcaatctagtgtcaacgactgtaccatctctatgaatttgcagttttttacaacagctcaaatgaaatccaacagcttagggtattatttattaagtaggtgatagcctagtcggtgacctatttttccaacaacgctgttatagacaagagtattgtaaccgacaaccatgttgcataatattgtcagaccacacttttacaataatagatttgttatacatgagttcatggtacatgagttttgttatgtatgctaagaaaagttaacgagaaactatatacttccatagaaattggacttctgcaagactgcaacggattgtgctgaataactgaattctgagagatgggcttcggagtccgcaggtccatgttccaataaaccgagcccggtccggcccaacagtccattatcatctggcctgtcaaccctctgcaaccgggcctctcccgactcggaatctctcaaaactcggagtccgaatcgagcgaacataccttgcgatcgatcgagctcggatcgcaggtcaccccgcggccgagctccgattcggacctggctgacaaaacccagccgcatattactatataagcaccacgctgctcctccaatctctcaaccaaaccaaagcctgcagctgcagcgaacgagagcaccagcacgagagccaagcgtacgtgcagtgcagccaactgatcagactgagacagcgcgcgtacacggccgagctcctacaggctacagccatgagaagcacggcgaggcaagcggcgaccgcggcggcgttcgcgctcattgtcttcctcgtgctgctctcgccgtcccctactgccgccgccacagccacaacgagaatgttcaagaccattgacgcccggcggagccagcatctggacctcggcggatcactggtcggcccggagagcgtcgcgttcgacggcaaaggccgcggcccgtacagcggcgtctccgacggccgcatcatgaggtggaacggcgaggccgctggctggagcacctacacgtacagccccagctacacgaaaaacaagtgcgcggcatcgactctccccacggtccagaccgagagcaaatgcggccgcccgttaggcctacggtttcactacaaaaccggcaacctgtacatcgccgacgcctacatgggattgatgcgagttggtccaaaaggcggggaggcaaccgtgctagccatgaaggctgatggcgtgccacttcgcttcaccaatggggtggacattgatcaggttaccggagatgtttatttcaccgacagcagcatgaactaccaacgatctcagcacgagcaagtcacggcgaccaaggattcgaccggacggctcatgaagtatgacccacgaactaaccaagtcaccgttcttcaatccaacataacctacccgaacggtgtcgccatgagcgctgaccgaacacatctgatcgttgcattgaccgggccatgtaagttgatgaggcattggatccgaggcccgaagactggcaaatctgaaccatttgttgacctgccaggctatcctgataatgtgaggcctgatggaaaaggtggttattggatagcgcttcatcgcgagaagtatgagcttccctttggtccggatagtcacttggttgctatgagggttagtgctggtgggaagctggttcaacagatgagaggaccaaagagcttgaggccaaccgaagtgatggagaggaaggatggcaaaatatacatgggaaatgttgaattgccgtatgtcggagtcgtcaaaagcagctagattatttaggttgtgcacttagatttaggatatatgttagatttctgcattatctgtgtgcttttgattcttttgcaatgtacctatatagtttgtaagcagattagtttatttacatgtgtatcacttcttgaacttgcaaaaggcagaccgaagttgtaacttcaaggctcccattatttgtcctacaacttataaattgctactaaaaaggttaaaatttaaaacttaaatttattttgtgacttttcaccataccttattgtacaacattgataagtttttaaatctcatagaacacatatataagtatttcactaatggtttttctctagtaagccatatggcttataatctgcattaggggaaccgatggcgacccaggtctggaatgaatactcgtccagactctcggactaggtccccaaataaaactcatcacgcaagtacaccaagctaatactagtacatcaccaaagataccttgtcttgtgctcccagctaatgccaaatggccaactctgacagaggttgcaaaaggggccagatccacctaagatcgatcagagatcacctcacattgtcacacacacacacacacacacactggtcggcacaaaagccctgatggggcaccacttcaaccacagcttaattagctttcaatcacgcagcagatcaattaaactaatccaagaacaacaccccccaagctgtgacagcaacacaggatggattagggccctggaaaacgctttccgaggcggccatggccatgatgattttgtcgctaatctaatctctctctctcgatcgcatcgggctggctcgctcgcgcacatgggcgttcaccctcgcggcacggcacggcgccgctgccgcctactataatacacgcgattacacgacacgttggagggtttaggcgttagccatggggattaattaagggtttaatctcccctgcccgggggtgactcgatctgtttgtcgccgagttcgaagggctagggatgattggcatgttatgaggctgattaatttaaagattttggttgtgtgtgtacagctgtgtgagaagaaaggttaattaagagtggagttgtgaagtggtttagctgctagctgtgtgtgcatggtggtgacatggtgtggtgtgggtgaaagctgaaaagggcatgcttggcatggtccagattccaggatgcaggatggttcaatttgatcaagggttttttttttcctttttggaactcatgcattttaagatattaagcacatcataccagtttagcttttgcagtaattctctgtttcaaggaaggcatcaaagttctatgaaattaagcactttctaatatttttattttttttgggtgtggaattggtggttctcgtttcagcatatacagaaaaaaaaacttttctgttctgatttctaaatagggtctaaggcgcagtttgatttagattattgagtgcattattactacaaattatctagtcgatggtatagacaaattaaatattttttaaaaaaaacttaacaatattctatctgttttagaaaaaaaatattgaacttttgataagttcgactctggacatcgagaatgtctatattggactctaaaaatagttttgtctaagacaggggagtattatcatgataaaacaagtggtttaagaaattattttttaagaaagcatatttttttgaagatatctaaaccagtcataatctagatgctatatgttcagattttttaagtgttcgtactccataaatgttactattatcttgtggatgtttgcaacgtacggccttcctgatagggcaacaaactagggtcattatctatgagcagggatagatagactatacctgaagataatatggaaaagtcatatgatcagacgccgatattccggaccagttcttcaataaacacgcattgaacggtcaagcatagatcagtggcctgaatatctttaatttattttccatgaagtcattaagccattaacccagccagctgattacagtcgctgttaattttgtccaattccagcagcaggtagttattgattttgtaaccatcaactgaagactgcagggaacaaggcagctgaacattatgattgttgcagcggattgcattctgatagtaccattgaatcatagtactatcagatagactatcatctgattggtgcaagtaaaatcttgtcgctgtgtgtaaactacaaaatgattgatttattatattatggagtaataattctgtgaactcaattcgagtataacaaaattgcaatagctagatagagattggttgtcgcggcctgaatagtttgaaacctggatcaaccagttgactaagagccacttgcactcaataatagattaacgagaaggataatcatattttaggacctcgtattattataggccaagagatgcagaatgcaaggtcaggtacagaggattagcatcatttgcggtcagtttgacaggtttgtacgtattttagctccgtccatcccagacagatcactaaccatatccatcaaatcagatatatctgtcctactcaccctctaaaccaaggaactctctacactatggttaaatcacttaaatcgaactgttcagcgtaaaattcctgtaaaatatataatgtacaacaaagtgttaatctagctccagagatgtaggttttgtctgaacttcgttaataaaatcatgtgttcctatatcgtcatctgacgtgtctggggagcgatcgagaagtttaaccatcgttctgctatatcgtaacttttataacaatgagaatttggagtgagtgtatgtgttctgtactagcgtctacttcgaacggtactagattaatttattatgtgatggagggtacctccatatgatgttttgaaagaaaaaaatagagatctacctataaccattaatgcacaacaaggttgtttttttttctttttgaaaggaaaataaatgggctgtttagattatagccaaaataaaccttacaaaattttgttaatgtcaaaatcatggtaagttagcaatattactaaaattttgataggattacttatttatttaccaaagtttgacaacaaaccaaatatagatactctttagcaactttacccaaaaaataatatggtggaaaaatggtatcatggtctggatcccctagcaaaatttttcaccatgtcacattgaatgtttggacacatgctgcatgtaatattaaatatatgcaaaaaaaaaaactaattacacatattgcgtgtaaattgcgacatgaatcttttaagcctaattgctccataatctaacaatgtggtgctacagtatacatttgctaatgacagataaattaggcttaataaattcatcttaaaatttacaggcagattctataatttttttcattattaatctacgtttaatattttgaatgtgtgttcatatatctgatgttacacaccaaaactttttaccccctaatttaaacacagcctcaatcagaacagccccaaagttaactcgtcgatccgtataaagatgtaaaacgaacaattctcggcggtttctgcgtcgggtggtgaaaaagggtcgccggaaacgtacgcgggggggcggatggagacgacgtcgtttcgtttacaggttggcgccgagccgacgggacggtgtctgcctccggcgacacgtatccggtgtcccgcgactgcagcagcgaactgctgcactggacaccacaccgccctccacctgtccacgcccccgtcgcgaccctcccctcccctccatatgcttctctctctcatggttacaacttagcaagcaaaagggcaaccccaacccgaaacagccgcaccaaagcagcagcaacagcaaagccagccaagacgagacgacccaaccccatctcccatctctcactctttcttctctctctctctctctacactctatctctatagccatcgccttcgagatctgaccggcgacgccagagcagcgagagcgcgagaagctgatcgatacgtgcatggccgccagcaacaacaagtggtggcaagcggccctggacttcccgcctccgccgccgccggtgaccgttccgccggcggctccgccgggggccgcgtccccgaagagcaaccagcagccgccggcgggggccatcgtgccgctgcgccgcccaagggggaggccgctggggtcgaagaacaagccgaacccgccggtgatcatcacgcgggacagccccgacgcgctccactcccacatcatgaaggtggcgccgggggccgacgtgccggcgtgcgtcgcggagtacgcccgccggcgcgggcgcggggtgtgcctaatgggcgcgtcgggcgccgtcgcggacgtcaccgtgcgcggcgcggcggcgccgctcccgggaaggttcgagctcctctccgtaacgggcaccgtgctcccgccccccgcgccgcccggcgcgtccggcctctccgtgctgctctccgccggccagggccaggtcgtcggcggatgcgtcgtggggcccctcgtcgccgccggccccgtcaccctattcgccgccaccttcgccaacgccgtctacgagcgcctcccgctcgccgacgccgccgacgtcgccgacgtcaagcccgacctttcctccgccgccgccgccgccacgtccacctcggcgccgcaagaagtgcaacagcagcagctgccattgccgccatcctcgcaccaccctcaagccatgcccgcgacctaccccgaccaccgctcgccgccatacgcctgggcaggcggcgtatgatcatgatctgagctgaatcatccatggcgttcttcaacctaacaatctctagggaagctaggtttttcgcgagttcgtgcaattgattagcggaaaatgctcttcttgggctagtcttgtaattttgtttcaccttttcattgtgattttattgtggagaaaatatgggaaatggtgtgtgacctcaaggaagcaaattaagctcgagttaagatatcagtagaattcaaagggtggtgaggtgcatcgatcagttagcccaagcattttgtgtgataatttgaggctaatgttccaactttttctagtttcaaaatcttggttaatgcttgtgggttgtgttttgtttttatcttaagctaaattagggaaaaactcaattatcttctcttattccatttacttgcctcgtggcagtcatatccgattccaatttgcttttgtttatacttgttggacgttttagacagtttgtttacacatgctctcgtgtttgtatatgccattcaattagtcaaaaagaaatcctaaagaaagtgacaatgtagatttttatgtaaggataaattccatctagcatatgtagagagaaaacagatcagatgtatacactcgagattgtttttgtccgacaaagatggtatcttaaatttccctttgttctcgaataaatattactgtttactatagccgtctcactttgatcacaaatttcctttaatgatcacaaaatacctttagtaattacattaaagtgaatgaaagttgtttgattacatttacgacgctaaacaattcgataatgtagaatattttttttaagtatttctcttctctttttttcaaaaaagatgagtgatgaaagttcaaacatgaatgtgccagtgtcatttattcgagaacgttgaagtattaatgccttcactcttttttctaaaaagaattgatatatatttgctcgcatttgtaacgtacataaaagcatctccaacaacagtcaagctatcacgaatgccatccagaagatagcacgtctgagcgaaaaacccgcaaacatgccatctcgagcaccaaaagtagtgtctcctccatctgacatgatcgcacgccatattttgtgtttctctctcctcacaccatcccactattacccatctcaggattgaactctcgccctccattcgaatggtatgaaaattaaattcaaaggttatgtttgaaatacttttttttctatcttcaataagaactgaaataattcctccaaaaaccttgccccagctccttcagacgggactaggtgatgatctgcttgatttatcctttgtataatatggtgtacattaagttcaatttgctttgatcattggtcagttctacttgaatttcaattgaccatatcttgtgttttcatttccttctttggcctggttttatatggctatttttactagaaaacagaaaagttcgattcagcagcatcttgcttgcagcaaagcaccatagcctggatgttttctaaagaagcagcagcctgccattgtaacttccaaaggctaggcttttgcatgtgcatggaacccactgaacccagcatccttctcttctttcccttttcttttcacttttagcactggtcagactatcagagagaaaggatcacacacatgacagtgtgaaacttgatagactgctagcaaacttccaacttctatagaaggtgtttattgggtaaaggtttaaagggaaatgaactccgtgtatgtctatataatacaaaccaaagactatcttaagataaaaatattcgtctgggatttatccatgttattatgagtaaatttttactatgagtaactttcctacaacagtttctaggtatgcattacacac

SEQ ID NO: 28462 - DNA, 671 bp, Oryza sativa
tgttattgtataaacaatgcagatttgtgcataaaccacgcatacttgtacacagaaaatgtagtcaacaattggctataactacaatagctagctgtttgatttcatgggaattcaacaaaaattagcttaggcggatcatccatgagaccacaccgaatatattgatgccaagcacaagtttgtcagcatactgagcaattcaaaatgatcggcaagaaaagatttgttcatccatgtcgaaatagaagtatgaaacagaaaatgttgtcgatatgtcttacccgtgagtacggcagactcctgcatggctgtggcggcaccgacaggcctatccttcaacaagctctggcgcagcgccatgttctcagctgcgcagcactgaagcgcgtagctgaggcgacgacactcggcctctagatacttgctcttagtctctaggtccttaacatacatcttcttcctctccctcgatttcatggcagaatccctatttctcatctgcctgataattcataacacatactattagattattgtctaactagaacatctttgattacggaaaacatcttatagttgaaaagaccatacactcttataattgaagcctacaatttcttacatttcacaaaggattaacactaaaaagaccatgcatcttattacga

SEQ ID NO: 28463 - DNA, 4752 bp, Oryza sativa
  unsure (1)..(4752): unsure at all n locations
cgacatgtgggacccctacaccggcatcccccgccggccatctttcatgcgtcgaagaccacgccacatccaccggcaactcctcctcacacctaggtcgcctcctccactgccggccacgcctctcgcgccaagccagcctccatctccgctgcccgcgcctctcgcgccgagccggcctccgctaccatcgactgcgactctttgcgccaagccggtctccgacccctccaccgaacgatgccgcgcctgccagaagcagccgtctcccacgccctcggctagccgtccgagactgtcatgcctccggtgaccgcagtcgcagtcaccaccaccacagccactgttgtcgaacgcccagccactcgcacccgactccttccccgccgccgacgtcaccaccgcctccacagtcacggccgccgtcgccgctgccaccggcaccagtcatcgcctccgcagaccgctgctgcaccgtcgctctccgccaccaaggagccagcaacgccccgatgccgcctccatgccctccgccgtcgtcgccagccgacgccgccgctgctgctgtcgccagccgaccaccaaacccggccacccctcgaccgtcgtcgcagccaccgcacctccttctccagcgtctccgcgccgtcacgcccgtcgccgccggatccggccgcctcctcggcagtcgtcgtccggctccaccgccgccagttccggccgccgtggcaccggcaccgtcgtcgctatcgccctgaggacgccgacctcctccgccggcgccggacccccaccgggggccgccggaaacctccccgccagatccgcgccggatctggcggcctcttccaccgccgccagcgcctccaaagctccgccgccatccccgccaaaggccgcgcccgagcacactgccccaccgccggcttaactccccgcgaactccggctggccgacgcagatctgggcggtttctgcctcccgatgccggcagacctccccctgcccttgtgcggcgagacgaagcgaagccccgccgccgctgtccttgccgctgcgcggctttactggcggccggtcgggcggcggaggcagaggaggagggagggagggcgggcgacggcggcctgggcacctcccgtgccgcccgagaggagacgacgctagaggaaaagttgttagcagattctcgttttacttgcttagtaaaatgacatgccacgaacagatggtctcctgtttctggggcaagagtgctcaaagaactattaagccttcatggataactgatcctgccatattgcactgttacactgggtttaatgagcatcattttaattgtgcctatacctataagccaaattttaaatctcatgagttaattttatgatttttaatcatagtttattttactacattaacttttgaatttttaatcatggcatatatataaaagttttactcagaaattcagtattattaagtttttgataagctatatggataaacatgagcaaaagtgcaaaactacgtctgctatggtatttatctcagtatcaccgtgcaattaaaccataagaattctgcatatctgcaggggggaaaacttatcgcgttgatcataacgcccttgtaatttgcaagagatggatcagacgttcattatgactttgagtaactacatgcacaaaaacttaaatcaatcgtacagaaaaaaaatgacagcacatgaccaatttatggagaaattatgatacaaccgctaggagaccaaccaatcaaccgtgacatcctaacccaattagatgcggcgtggcccataaaagctgtgtacgcatgtttattaccaccttactagtttagcaaggtgaaacaacttataaggccttgtccctctaactatgccacttccaggttaacccttttacacgaagtgaggacgaatgtgtaagtggagtggtatgtgtaagtagaccagcctgtcggttgggctgggctatgcggttctggagatagggctattacaaatggtatcagagccgaccctcgcggttgcgcgggttagtgtgttatggtgcatggcgcatgtggcttctatgtgagacacatggcatgacatatagccccagcattggacgtgtgctaagagggggcgtgttgctggatatttgcctatatgcatgtgtggctacgtgggtgagtttatatgcatgtgtggctatgtgggtgagtttatatgcatgtgtggctatgtgggtgagatgtatgcatgtgttcctaaaagggggcatgtttctggacattatgcatgtgtggctatgtggtgagttggtccagtgctaaaagggggcatgtttctggacatttgcatgtgtggttatgtgggtgagttggtccagtgctaagagggggcatgtttctggacatttgcctatcttcttggtggttatgtgggtgagttggtccaatgctaagagggagcgtgttcctgtacatttgcctatatgcttgtgtggctatgtggtgagttggaccgacaggacataagtcctttgagggaggtgtacgtgacattctggtccaattaagatgcggcatgtgtggcccatgagagctgtgtgcgtatgtttattaacacattgctaatttagtaaaggtgaaaccaacttataagccttgtctcttcaaccatgccactctcgggttaacccttttacacgaagcgaggacgaaaatgtaagtgtgaaatggtatgtgtaattgggcccacccgtcggttgggctaggctacgcggttctatagggctgttacatcaactgatactaataaagcataagttgcaacgtgtgtggtgcatccaatgtgttcttccagaatcacaatcaagttatccttcaagaataaaaaataatttccttgatgaggaataaccgtgactaactttaatgagttgcacaatcattattcggttgaacagtgtgtggtgcatccaatgtgttaacatccgtaaatgcaccagcatgataaattggtaatacgatgttcgatttcctgtcttttaggaaaaacgagtccggtttaaaatggaacaaatatacannnnnnnnnnnnnnnnnnnnnnnnnnnnnnnnnnnnnagggccatgatgcaaaatgatcaacatatcacaacagctcatattaccctcggagagcttactaagggaaactggacgagcttgctgcagaatcagttgcatgaactcgattgccctgaatggaaatcctggtaagatcatccgccataagtacttctttggctatctctgcagtagattggaatcaataggagtcagtcaattgacgttttatttttgcaacaaagaaattgtagattcatcatcatcaaaattcaaatattatgtgcctgaatttcacagacagcaatccgaggatgggagatgtttaccttcgatatcttctattgatttatcagcaaagaaacaaaacggcaacacttcatacttctcccattcactaccatttttctggtcaaactgttcctccagcactggatggcatccagccaaatacaaacaattaagggacacaggaagaccatcttctggtaaagaaactacttcagggcagttttttatgatcaagactctgagggaagagaaactaatcatctgaggcaaagccattaacttcatacaatttctgaccaccagttttgagaggaaagaaaggtctcgcaggttcctcagtgatattagcgcgttgcagtgttccacaaccagtgcagttaatgttgttaggttaccattttcaggtagttccttgagctcagggcaattctttatgatcaagttctggagggctggaagacacctaaagtctggcactgacgttaacttggggcaacttgcaatttctattgtgcttaaccttaagaatgtttctaggcccatgaaagctgtcaacccatcacagcttaaaatacacagcttctcaagtactccagtcactgactttggcatggccaacacacgttcaggagttgaataagtgatgttgcaatcgtttatccacaatgaaaggaaactaatgttctgaaacacactaagaaaaatgtccactgtcaggttgcagccaatcattttgagacattgaatagatgccgaagaaaagacattcccatcctcttcccgctgtttactagctgcaaaagcatgctgcagatcagaacatcccctgataaccaactcttcaagggatggcagatttgttgttacatctttaagtccatcttccagagtgtttgctccttcaaagatgatatttacacatttcacaggttccagacgacgaagatgcaacatatccaagagtgtgcttaagctcacctcctgagtaaaacatgtctccaggcgattatgatttcgcagcctgcaaacttcggtagatacatatatactcattcttacaggtgggagaacaactggtggcaattgtttcagcttggggcatcctctgatgcacacctcaagaagagcaggaaaaaaacagtccacagaagaccattctgccaattctggcaactctatcatttccagaatctccagtgagggaaagccagcagtcccataaaactcggggcctatacaaaccactgcattcagtctagcaatacgaagtgtcctgagagattgtatttggcctaaagatggaagcaacttccaacacttgcaatcagaaatgctaatgtgt

SEQ ID NO: 28464 - DNA, 5006 bp, Oryza sativa
gtcttaaagcatcgaacacatcattcgctttgtcagacttgctagaagcattaaaagaaccccattgcagtttcagtttaaaaatttgactctttctgaatagttgagcatcagttccctcatccctgcttttcacattctcaagagatgtaatagcaagcgacccctgaagttcattcatctgcttcagcacctctagtccctgcactttactcttatcaacacagaattccccagccgctcgaagacatggcatatggctgctggcagctaaatcaacagtgcacatacgatgaacatcaatacacaaaatgctgctcaaggtgcccaagcacttaggaaaagtaacaagtcgcctgtccatgaaacatgaatgccagcgtatggacaacacaagtaaatggtgaagtttacagagtgaatttggaagcgagttttgcgtatgttgtgttagaatttcaatggttactctcattgagaagaggatggcactcgagatggggcaattttctggttttcttcattcacaaaaacacaaaagccatacctacccgagggaggttggatacatatatatagccatagctggctgctagcctattgctgcaccctcctagtctaaaattcaaaatttgaatgggatgttgtcctagaaggcatccaaactgaataaagcataaaggaggcataaaggagatgctaactgctgctgtcctactaaccgcagctgtcctagcaactgaaaaatatgctaaagggtagatgctgtcctgaaaaaggtgaaactacccaaaagcaaaaagaagaatcacgaccaaggatcacaaagacttatccaacattctccccctaagtcttgtgcgtcgtcttgtggggaagttgggccatcccgatcctggagcagagctcgaggaacttgatcctcccaagaggcttggtgagcaagtccgcaagctggtccttggtgttgatgtagctcgccttgatgctcccttcttccaagtagcttcggatgaagtggtacctcacccggatgtgcttgctccgttcgtgaaaaacggggttctttgtcagggccagagcggacttgctatccaccctgagctccaccgttccagtgtctctgccgaggagatcactaagcagtcgagcaagccagagcgcctgggtcgaagcggcggaggccgccatgtactcggcctcgcagctggacagggccaccacctgctgcttgaccgactgccagctaacgagcacttgccgaggaagaagagaatcccgctcgtgctcttgctggtgtcgatgtcgccggcgtggtcgctgtcgctgtacccgacgaagtgtgccttgccaggacaccttgggtagtagagaccgtggtcgagagtccccgcaacgtagcggatgatcctcttcacagcctgctggtgctccgtcgtcggtcgctgcatgaaccgactgacgtagccgacggagaaggccaagtccggccgtgtgtgggtgaggtagcgaaggctccccacaagacgccggtactgtgtagcatccacctcctccgccgtgctgtcgcggctcagcttcagtctctcctccatcggagtgagagctgggttgcaatcggtgagcccagccagctcaacgacgcgcttggcgtaggcggtctgtcgaagcgtgatcccggagtcgtcctggtgcacttcgatccccaggtagaaggagagaggccccagatcactcatctagaaggtggccttcatctcctccttgaacgccgcgacctccgcatccttggtgccggtgatcaccaagtcgtcgacgtagacacccaccagcaaggcatttcctccattgccccgccggtagatggccgcctcgtgtgggctttgctcgaagcccatccccttgagcgtggaatccaacttggcattccacgccctcggtgcctgccgcaagccgtagagggccttgtgcaggcgtagcaccttgccctccttgccggggatcacaaatcccggcggctggtgcacgtagacctcctccttcaagtcgccgttcagaaacgccgacttgacgtccatgtgatggacgccccagcctttctgagcagccagcgcatgaaggagtcgcacggactccatccgtgccacgggagcgaaggcatcgtcgtagtcgatcccctcctgctgcacgaaaccgcgtgccaccaagcgagccttgtgcttgacgatggctccggcttcatccctcttcagcttgaacacccacttaagggtgatcgcgcggtgaccacgagggaggtcagcaagctcccaggtgcggttctcctgaaccgcgtccatctccgactgcatcgcggcacgccatgccgcgtgtttctcggcctctgcaaaagaccgaggctcaccgtcgtcgcacgcaaggtgcaactgcgcctctaggtcgcgaggcaccagtcccggcaccggctggtcgccgagaagatcctccatcgtacggtaccgtagctgctcaccgtcgtggtatgcgatgcgctccccgtcgtgggagagcggagtagcgaactccaccgggctgcgctcaacacgagctggcgtcgaagtagacgtgcttggaggagtgactgttggtgctggagcatgtggagtcactggctggggtggtgtcgacgaagagctcgtcgtagtcgaagtcgtggcccgagggtgtgttggtgtcggagtcggtggagattcgggggctggggtagacacgctcgatgaagaagagctgcctactcccccagctccctcgaagtggacgtactcgacggtgaagtcgtcgtacatcggagtcgaaccatcgtccaccgccttgtcccatacccaccctcgcccttcgtcgaacacaacgtcgcgcgcagtgcgcacacgctgtgtctccaggtcgaggatgcggtaggccttcgagccctccgcgtagccgatgaacacccctggggtgctcctgtcgtcgagcttgccgatgtggccaagctccttggcgaacgcgaggcagccgaagacccataggtgggagaccgccggcttgcgcccatgccaagcctcgtacggtgtcctgccatcgagggccttggtaggcgagcggttgaggatgtaggcggccgtcaccaccgcctccccccaaaagatggccggcatccccctctgcttgaggagggcccgagccatccccacaaccgtctggttgcgccgctcgacgacgccgttctactgcgggctgtacggcgtggtgtagtggcgctgaatgccctcatcagcgcagtacgacgcgaactgaatttgccgccgttgtcggtgcgcagcacgcgcagcttgcggtcgcactccgcctctgcagtagcttgcgcatgcctgatggcgtccgcagcctctcccttgctgccgaggaccatcacccacatgtaacgggagaggtcgtcgacgagcagcaggaagtaacgtcgtcctcctggtgtggccgctgtcactgggccacacaagtccccgtgcacgagctcgagccgctccttggctcggaagctcgtctgctggggaaaggggagccgccgctgcttcgtcaccacgcaaacgtcgcagagctgctccacgtggtccaggcacggcatgcctcgcaccatctccttagcactgagctgcttcagggcctcgaagtggaggtgcccgaagcgctcgtgccactgccacgcctcgtcgtcccgacgagcggcgaggcaaactggttgtgcgacctgcgcgctgaggatgtagagttgattagtgcctctggttaccttggcaagaaggcgacgacggcgatcccaaatcctcatgagtccgtcctcgaccaacacgcgtgagccgttctcatccagctgtcccacgctgatgatagaattcctcaacgcggggatgtagtagactccggtgagcagcctgtgctcaccggacttggcagtgaaggtgacggagccaacacccttgatctccacgccggaggcgtccccgaacttgacggagccttggacgctggagtcgaactcggtgaagaactcccgtcagccggtcatgtgatgggtggcgccggtgtcaaagtaccacccatcagccttgtcgttgctggagccgttgcagagggagacgagtaccttcggctcatcaaggtggaggaaagccgctgcggccggtgccgctggaggtagctcgatgcttgcatgagccaggagcagagccggctcttcctcctccacccgtgcgacgtgggcctggccacgtcgtggctgtcgacagtctttggcccaatggccaagcttgccacagttgcggcaggcgttgtctcgtgccggcttgtggttgccggtggcaacgccctgggcgcctctgcgggcgccaccctcggcacgttttcgcgcccaccgtagctggacacctccccgcgccttgcgcggcttacggccgcctgtcggggaagatgactcccccttcctcccgtcaccctgagaggcctcccactgctcccgagtgagattgagcttcccgccgatggtgatgggccccgagagaggctgtggctcatcaccatcgacgaccttgaggcgacctaacgcctcctcgatcgacatcgtggagaggtccagcagagattcgatcgagcgagcgatctgcctgtacttctcagggacacagcggaagagcttctcgacagctctctcctcgtcgtaggtgtcgtcgccgtactgcaccattttctgcaagagagtgttgagacggagagcaaagtcatcaacatcctcacctggcttgaagggcaggttctcccactccttgcggagtgcctgcagtgtggacttgcgggcgcggtcgctgccgatgcgtgccgcagcgatggcgtcccaggcctccttggcagtccgcttctgggaaagcgagaactgcatctcgggcgggactgcagcgatgagggcatccagtgcccgccgatcctcgtcgtag

SEQ ID NO: 28465 - DNA, 9990 bp, Oryza sativa
gcccaccgctttgcccgctcccatgcccttcctcttgccaactcctcaagctccctgtcggcggtgatgtcgccggcgatggagccgttgatgctgctgcgcaaggtctcaacctctacctccgccgcacgtgccgcatcttccgccgcctccgcctccgcctccgccctggctgctgccaactccactgccgccagtttggccaccctcgctgctgctgctgcagcggtctgagccgttgctcgcctgcgctcttctgctgcggcgagctcggcgtcctgctgacgccaagtgctcgaggcgaccaaacgccgagaccgagcgtcggacatggcgcacctccggggggctgctgcgtggagagggggaagggaaaggggaaggaggagcaaccagtgctgctgctgctggctgagagctcaaccgagcttgggaaggggtggaacaagagatgtttagcctacaggaaagtgtggctctgataccagatgttagaatttcaatggttactctcattgagaagaggatggcactcgagatggggcaattttctggttttcttcattcacaaaaacacaaaagccatacctacccgagggaggttggatacatatatatagccagagctggctgctagcctattgctacaccctcctagtctaaaattcgaaatttgaatgggatgctgtcctagagggcatccaaactgaataaagcataaaggaggcataaagaagatgctaactgttgctgtcctactaaccgcagctgtcctagcacctgaaaaatatgctaaagggtagatgctgtcctgaaaaaggtgaaactatccaaaagcaaaaagaagaatcacaaccaaggatcacaaagacttatccaacatgttggagataaagaaatctgagatgtatcaaatgatcaatatatgtaggcagaaattctaagcaacagccacttaaatccaatactcttatgcacttgaattccttaaaaacatccgcctgcagacaaagttttgagcaaagagacctgccttcgttcagaaactattagcgtgcgcagcctttgcaagttatggaatccatggagttcatttactctttcgacaggtatagacagatgccgagttgttcctgaaatttctgcaagattaccatctctttctattctggagtactcacctctggaaatgtgagaagcaaggtcattcatgaggtcatgcataacataacgtattgtatggccatactgaagttcctgaaaaaatgatctagataatagttcattgaaataacttctaccagtttctctcatactttcatatgtgcctatatgaccatgaacaaatttatgggctatccacatattcaccaacaagtcaggctcaagagaatagcctttggggaacaggctgcaaaaagtaaaacattgctggaggtgacctggcaagcattcatagctcagacgcaaaatttgcataatgtcttccttgtttgatgaactacttttcataactcgtgtccactcttcaacgttgaggttagcattcaaatgtgcaccaacaacctttatgactaatgctgagccattcaacttttggacaatacattcaccgatagactctagttctggataatttcctggatcttcagcgccaaatgcgcagatcctgaagaggttccaactatcttcacccttcagaccctccaaatggaatggtgctgggcaacccaaaatccttgaaacaatatttgttcgagcagtaacaagaattttgcttcctttagctccatagcataaaggagcaaacaattctctccatctatcagcatttgtaagctcaccaatcttttcatcataccacacatcatctagcacaagtagaaacttctttgctgttaacttgttcttaagatcttcctggagcatgttaaaactgaaatttgttatatcactgtttctatcaattgatttcaaaatctctttggtgattttgaccttattgaagatatttgaaacatatatccatgtcctcagatcaaaaccactgactattcttctgtcattgtaaataagctgagctaatgcagttttcccaatgccaccactgccaactatggtaattatagatggtgttggtgatattgttagtcctctgcttggctctggtccatcagcttctctcagaagtcggtgcactagatcatcctgctcattttgtcggccaatgataatttggccaggagaaattgagctggtgacacgccattgaagtggctgaggaggcatatatgaattagagttttcagccccaatcactttgatgagcatgtcagcacattcttttactctaatcaggctattgaggaccctccttaacttggatctgaacttgtcttggccaaccaaacgctttactatggcaagagaactggaggccaagctacttagcttgctcttctgctgagcatttgccttcagaatcaggtaatcaaattcatccatgacgtcgtcggcatcataggcagaatctttcattttggcaaagtagagcttcttggttgcaatctagcatttgcgacctttcagcagcacccagcaccaattggatttttatcaaagtggattcgatcttttttagatcatcctccaagtcagattgccacttgtactgggttgatgtataagattggaccttctcaaagataagcttgatgataggacaaactacccacccaatgccggtggctattggtagtgtagccatgttggtcaatgtacaaacctatttccctttttttcaaaatatactgttttcttcaaatgaccattacagcttgaaactcaataatccattcacctaataaacattgaaaataattagaactaaccaaaataagaaattattgctcaaagatgcagtcaatatgggctactctactcttaaactctatcaggccatgtataagaagaccgaaatatgggcctcaaacacaaatttgcaactttaacggcaaaaattggatacacgagtaagagtaaatattgtcttcattcttcaatgatgcagtcagaaaacagaataggacaactgccagctagtgattattgaaatattgtttacctgactagtagtaagatcagaactgcagctcactcctagaagaagaggcccttgatctttcttcttgctgatcaaatgcaaggctgctttcagagagaaactaggaggagagccagattcaaacagagggaaatgggagtaaaccacaaatggatgtgcaagaaagttgacttccacctcttcaaacaaagaaaaaaggagaggttttttcaactttgagtaaagaattactccgtatcttgtatgcatcccacgttctcacacaaacaacagctggagggctttattagccgggttgaccaaagagacgaccaaccaaatcttataacagctggagagcggaggtaggtacactccacctagcagaataggtggaatcaccgtgaaattccagcggtttggcttccgatgcatcaaagcaggcagtggcagtcggtctgtggagaaagttttactaacaaattgttccgtatgagatgccaagaaaataatatacagactgttttgccacttagagtcttgaggaaggggaggagtttagatgaaagtgttggtgtgggattaaagtctatcttctattaccaatcctagctctgtgtgtaatgctgattgcgttttaccaagcaactacaatataaaatatctggttggttataaaaaaattagcttggatgtagtatcataaggagctaagatctactcatctctctgctttaaaaaaaaaggatttctctcctgtattgaaatgatggtgttgatcccttatattttccatccctgttgaattcctacatccatcaacagacaagaaaaaaaatggtattgaaatgatggtgtatcaatcccttatattttccatccctgttaaattcctacatccatccactgacaagaaaaaaaaatgttaataataacatcaaacccgctcaactcctattagtttcattccctctcaataatccactaatccactaatcattcccttaggacaacacatgattgacttcaccgatgtgcgacatttaaaaactctacggagactttaccctaagattaagaaaaagcgttaccagggcgggccagccggctctgcaaaacgaggcggtggcggcggcacggcggagccgagcggcgccaaacaagccattggtctgggggacatacttccaccgtgtgcagccacaagcgcgctctcacctcgcgccaccacccaatcggtgaattgggaggcgccgccatcgccgccgccgccttcttccctttcggcggtgcagcgctcccggatctcggttcgcgaggggaggccatgggcgaacccgccggtggaattccccagcctgcgccggccgcgacggaggcgttcgccggccgccggtggccgcgggcgatgaaatctgttgacgagacaggtggaccaaattttccagtgggctgaatttggtgacgggaattttgtggtccaaattccctcgtgggctgcatttgctgacgagaattcagtggaccaaattcattggtgggccaaattgtcgactgcaattaggtgggccatatttattcttggcccagttcgtagattggaattaaagttgggccaataatattcatgggcctaattcgttcatacgcagtagctgggccaatttcttttgtaggctgaatttgttatgggaatttaagtgggccgaattcattttagcctttattgggctgactttgttgatgggatgtttgtgggctgaattcacttctgggcccaaattgctgacatgaactaaccaagccgaattcattggaatcagtcagtggaccgaattcattgacgagaaaatagtgggctgaattcattcatgaccgccagcaagttttagacgtccaaaacatactcccccttccaagttttagcaactgataatttcgactttctcatttaaactttaaccatcaattaattacctatatattgttggatcgaaatggacttttttttatgtgtatatttaggaaataacccattttaataccataacatcatttctagcgttcataattatttaagaagaaagatgagtggttaaagtttaagagcaggtacaatagcaggctataagccagctataaacatattttaaagagataaaggaagagagagaagagcagcgggtgtcacgccctgaagttcccctttccagctttaaaatttgtaaaataaatcgtccgaagaaattgttcaatttaatctagagctaattcctcaaattaataaatgcaaataataatcgaaatcggacgcacggacttcaagacataatgtgtgtatgacatgtaggaccaggtattactagtacagtaagtaactaggggatagaattggctattacattagctatagaagatatagagctagtagtgggctatactattgtatgaattagctattacattggctatagtgaagcattcaccggttagtatcagttgttatgaaacggatgtgctagcaacttcgtagagatgtcggcatggctgtcatggcctcatgggaacaaaggctgttcttcctattttcgaaaaaaaaaatggttgttcttccgagaaggatggatacaacagtagagcaggagccaggaacagggcatggtcgcatggagcgtgtagcaacgtggaatatggcaatgctgagatctactgacaccgaggaatccaaacaaaccttactggtggataaccagcctgtattctccatacttaagaataaggaaattaaggtggtagactagactgtaaaaataatctctgtatgccaatcaccaaaatattcagaagttgaaccagaagatcaatgcaatcaaatgtttccacaagtttgtgctcggttgatgtgttcaactgtttctttatttgttgcctgatttaaccatatcctaattcatattgtaaaacatattaacagaaggaggatgtcttgccaggtgacactgatcctactaacacactatcccacggtatcacaccatcagactcctccatggccgcgaaagaaaaagtaatcgcgttgcttgcaatttgtaccgcgtgagatggatcagacgccaagtacggtttcgagcaattacatgcctggcctttgtccagaagtctagagctactagtactacgagctaagggcctgtttaatagtccaaaaaaaaaattgcccccgcatatatcagatatatgaacacactcacacacatttaaagtattaaacgtagtctaataacaaagcaaattacagattccgctaggtgcgagacgaatttattaagcctaattaatccgttattagcaaatatttactgtagcaccacattgtcaaatcatgacacgattagacttaaaaaattcgtctcgtaatttcctggcgaactgtgtaattggtttttttctatatttaatactccatacatgtgtccaaaccgcgtgaaaaattgcagctacgtgacagcgagaaaaatttcgtttgggaactaaacattccctaaagctcggatcaagatcgcagctaatcctggtgtaagtgtaactgcgctgctcagttcacaatcactgttactggctcatgctcatgctcatgctgcccccaaccccgagtccgtagcccgtaggcctgaaaaggcctagcacgaatgtagatcaatcgaaactgttgatgtgctatactccttcctctatcccataaaaattaaatttagaattgaatgtaatatatccaaatataacaaatatgaataaaaacctatccaaattcgttgttgtgtgctcctgcaggaatcatagacctaatagaccaggaatgtaatccttttctccgtgattaataaagtttccctctttaagctcaaaaaaaattcgttgtttggacaaagaaagtattttagataaatttattttacatccaatagaatgtattatatgtcacagagtttgttccagttcgacaatatactattgatgttgtttatttctgcaatatgccgatgagtttattaattcttctccaatatgccattcggctagatcatttttatgaaaaatacgcagaatacccttaaagacatcgaagttagcattaatttataggtttaatttatagttgtctttatttcttgttgattacaggatcaaatcaactggtacgctagcatacccgaagacgatttttggacctgcactggaattaagcagatctctcaggcctcgtgtttttcatcaatatttaaataagatataaaattgtctatatagcatccttacacaatatgaaagtttgcatatagattttcaagttattggggcatttttatttttttaaaagaaataattttatgtgataactgatagagaaattgcttacgtaaaatataatagcataaaattatgttgggtaggatatgaaatatgatttatattaaaaacaaagacaaaatattttatatagcataaatggataaattataatattttataaaaaatgaaatacaaaaatctttaaacttatacacaaactttcacattgtgtatagaggctaaaaaaattcataattttttttaaaaacttttaataggataaatcaatagttaatcttacatgtaaggccaacctaatgatatactcccttcatattagtaaagaaagtcgttgagtacaatgtttaagttaaatcttgagaatataagtgatgaataactctcaagttgttgagtttgaaaatgtaaaattatatgaatagatttgtcttgaaaaatactttcataaaagaatatatatatatatatatatatatatatatatatatatatatatatatatatatatatatatatatatatatatatataacttttcaataaatatttttatggaaacaagaactcaaagttgtgttttggagaccgtgctgctgtctaaaatgacttcatttacgagtacggagggagtattaatgccaattataaatcattaaactatgataaactcaatattatagagtatattctctataccgtgtcatctcgatggtaaaaaacagttgctctctccggtcatccggtcacacactcgagtcactctcactcaccacagttcttttttcttccaaccaaaaatcactctcaagttctgagtagtgatttttgccgtctaggtttgaagctaaaacttccgttaccaaaatgccggcattttgaatagtattttggctatgtttggtttcctacagcaacaagtaaatattactatcaaaatatcgataatgtcaaaagacagggtaaaaaccaaccttcgttttggtgaggtgacaagataagcagaactctcaagtctcacaatcgctctgactgcaagctggggatcttggagcttgcagaaacacggatcagcgagaggtgctactgcttttgcaaaatcacaagttgccgagggtgcaatagcaaaagaaggcaacctttgctaattgcttcgctactcgtccttaaaagggaagccgccgcgtctgcagctgctgcaaatcccaataaagcgagagcagaaaggaaggaccccttccaccactctccccctgtgttgtgcctgtgctcctctcatctttgactacccacgattccagtctcccaccacaggccaaaacactgcaacatttcagacttcacagttcacagtgagttcagaccaagaacacaagaataccaaaaagaacagcaccaagaactctcctccaatccatcacagacatttttcttccctccaagagaggcattgatcatcagagagtagagccagggcgtgtgtgtgtgtgatgagctcagtgctgctgttcttgcttctgctgctgctttctggagtgagcttgagtggctgcataaggcttggcaatggcgggtatgaggagtggaggatgggctcggcgacctacatcaaggagtccctggggcacccgctgaatgatggtatgtgcaatctgtgtgtgtgttttttaacagattaagcttctgaatctttgtcagttggtaggatcaagaacatatgccctttttctgcatttttctttggatggattcatcatggagatggtgaatgtagtttgcaaggatgaatggtgggcagatggtgtagtattgtgcagatccggcatagtgggaagtgaagttcaagttagaagtaggaaacaggagtgaagattcactgctgaaacttgttcttccctttctctttcttcagatagattgtgactcttcgaactgaacttccaatgtgtgtcctgttgttggcaggtccattttgttttaatttgtaaaaaaggttagtaaaaaggtttctttcagggttataaaagaatgttggtgccaatgctaataaagctatcattccaatcaaatattttgtctaatatcattagataaaaccttttatgtgcattagtgcactaatgctttcctagtcggacgaaaaaaacaaacgataatactacattattggactaagtgggccttaaattattggactaatgctgtcctagtagtaccagttatcttttttccttttaggtaggttatagaaaagctgaggcacattgaatgcatttgacaataatactactatagttatgacaggcaatctggtactatcatatgatatttccttgctgtttactgtccatgacgtagtacacatttaagtccttgagagtacatttgcagtaattgctccatggattattaagtgtcaaagtaacgcaacatatattgtcagatcaagattcatggcagcccaaccacactgcatttcctcacttgggatatcctgaattcaaggacatctcaacatg

SEQ ID NO: 28466 - DNA, 4355 bp, Oryza sativa
ccacggcaataatctgctcaaaactctatcttgaaacagggccttaatcttgacatcttgttggctactgtaaagctgatcatctccatctcacttgacaacggggcaaaaattatcaattttttgtctgaatgcaatgtgttgtctgaagtctgaactttgaacctgcaaatgcaaggcggtggagcctgtgggtacggcgacctggacatcttcaggtacgggaggtacaccgccggcgtgagcggcgcgctgttcgggcgcggcagcgcgtgcggcggctgctacgaggtgcggtgcgtgaaccacgtgctgtggtgcctccgcggcagcccgacggtggtggtgacggccaccgacttctgcgcgcccaacctcggactctccgacgactacgggggctggtgcaacttccccaaggagcacttcgagatgtcggaggccgcgttcctccgcgtcgccaaggccaaggccgacattgtgccggtgcagttccggaggtaaaacaataagcttctcccacacttttcttttacatcaccatagtctccaatacatgtttttgttacttatagttatatgttagtgaagtgaaacgagtagagcgacatggagatatacatttttaggacaaattcactacttgcttcgtctcaaaatatagcaagctaatactagattagatctagtgtgtgttagcttcggctctgctagtatgggttgtttatcgatcctattggtgtgagagttttgactcttgttttttttccctgtactgttctgaatgttctccttcttggtacaatgtttggtcggaaaagccggcgcggcaaaaaaaagtactagattggactcaattagttgtgttcagatttgtagtactaggttgtgtctaatctaatactactagattactgtattttaggacggagagagtactatcttagtacgattgagtagtccaagcagttttaagtttgattgcccgtattctggaacttcatctatcagagggagtattagagcaggtacaatagcagactattagccagctataaatatattttaatgagataaaagatgagagagaagagcagcgggctatagatctgtagccagctgcaacacggactccaagacgcagtgtgtgtatgacatgtgggaccatatattaatagtatagtaagcaactgctattagattgactatagatgaattggagctagtagtgggctatactattaaacttgctcttagagcaggtacaatagcaggctataagccagctataaacatattttaaagagataaaggaagagagagaagagcagtgggctatagatctgtagctagctgcaacacgggacttcaagagtcgtaatacaggcatgacagatgggaccaagtattaatagtatagtaagcaactattgtatgaattagctattacattggctataaataatttggagttagtagtgagctactattaaacttgctcttagtactgcacacatcatgttcatgatttgctcgctggtcattgatcacttgtagcgtatcattctgcaactagctgatgtgtgaattctgaccatgcaaaaagggcatggcgctatcattcttgagtagtgcatttggagtgtgtttctctaggctgaaccagtgctgcttttgcgaaagttcagaatgatgtttgatcattggagatggaacacagaatatgcggacagtgcgtgtttcctgctgctttgcatggagcaaagagcagctttaaatctttaatcactgctgctagcttccccctttttaaatctgacttgtgctttgttaattatgagcacctccacagtttcagacaattgccatgagtgtgtcccattgccccaactgctgatgcaggagtacactccaagtattccatttttctagaactgtagtagtactacaactctaacaagataaggttaaatcttactgccaatctgctgaattccgcatgagtcaaagcatcactttttttaacgactcgtattaaacagtatgaagttttataacgaactaccgcaatttgggttttcatgacattagccattgatggatgaactctagatagtactacaactccaataaaagacccaaaaatttagctgcaactactgatcagctctgcgtgaatcaagcatcaaacacatccatgggcgtcggagctagagtaagattaaggggggtgctacttgtttaattaactctgtcttatattaagtttaagctaatgcggatgtctaaatttgtattgagaatggtgcacacggggaaaataggttaggtatagctataatttttttttgaccaggttcctgggcatgccaccttaatactctagctccgccccagaacacatcggcacattgctcatatcgggttccatctaatgaatgaacgaaatgagtggtggtggtgcagggtgagctgtgacagggcaggggggatgaggttcaccatcaccggcggcgccagcttcctgcaggtgctgatcacgaacgtggcggcggacggggaggtggcggcggtgaaggtgaaagggtcgaggaccgggtggatcccgatggggaggaactggggccagaactggcagtgcgacgccgacctccgcggccagccgctgtcgttcgaggtcaccggcgggaggggccgcacggtcgtcgcctacagcgtcgcgccgccggactggatgttcgcgcagaccttcgaaggcaagcagttcgtcgagtaggtgtcgacgatgtgggtgtcattcttggaatgattgtaattattatggttataattatattatacaggtgaaaaacaactgttttggtttggttttggtttggatgttgttgtttgatctgctcagcatggcaaacgaaattattatagagttaatcagttaatgaaggattgacaaaaaaaatgtttggctaatcagagcagttatgtgctatcagtggtccagtgttggagtagcatcatctgaagaaaaaacaattgagtacggagtaccatttttttggttggtgacataatagaggtgcataaactacataaaaaagtgcatgtagagtacacaataaataacagggaaaacactgctttgtggtaggacatgtcatgggcatagtattcttgaatcaattcgcgaggcctggagtgaatgaatcattgggtgaacatgcaaatggcactggggttcacactcaccacaggcacagtgacgaaaaactacgaagagagtagcagtaaagcacacgctagtgcagtgaagaagttttctagtcatactggtgatgatcatcacacaacaatcatgctatcgaaactgtcgcgcctagcttgctgacaggctactgtacacatttcagcacctaaaagctaaagcctatatatagaacttccatgagcgaggatgcacactacttacagacgaggtcgcagtttttttttcatatataaacaagccgctacgattgatgagttgagttttgcttaagcaagcagagacaaatcgggaaccaactacaccacgggaagagctgctttggcaagagaagcatcacgcatcggcatctaaacaaaggaatctattgctagctgcagagaaaagaactaatcagaggcatgaagcagatagcaagagagaacaggcaagatttcatattacggtgagtgagactctgagaattgactccaacataacaagagagtaaatgctcaagcctcgttacagctgaaaaaaagggaaagaacaggtacctggcaattttcgttcttcatgactgcttacaacttctagcagggcccctacgtatcctcttcaaaacagggcgaggggtaccaggctgagtttgtgaggagtcgccttcagcatcatctgatagcagattgttagttcacgaaaaggagatcagcagaaaatatgcactttcattgattgtgttttcgtctacacaccatgcttatcttcgctgttgtttttgtccatcgaccgggtcccattggatgatttccttttcttgttgacaaccgttgagattagtttgacgtcctgaaggcataacaagaataatttatttccttccgttagtttaccctccaacaaattgtacaagatttggatttctagttaccttcacatcttcatcttgagtaaatttttgagactggctgtcatcggacctagtttctcttgcatttaccttagccacctcttcctgctgggtaatcctatcacgcttatcatgttcagatcgtttctcacctatcacaatgacaccacgtgccattggtgctctgcaacctcacatttccca

SEQ ID NO: 28467 - DNA, 12090 bp, Oryza sativa
cccaaatataactgcaacctgaatattcaactggtgaactggtgagccaacaagatgaacttggctagtattctttctatacagaaatctctcatcaagttcaccccagaagggtgcaattgatcttgcaaactaagaaatgaactttaacatatagctgatataacattggtatgccacaaaaaatacccttacaatagaaaatgcaaacccaaatgttaaaagagaatggttggttgatacaaaccattcatctggcagagactttgtatcgaagcctgcattcaatattctccatttacgacagctgtagcactgaacccactcatgatcagccttatagctccccctcccttttctctggataaagaaagttaaatggagtgaatagtgcttaaaaagagaagagaatggaatattctgaaagtcaaaccagtaggatgtactagtagcctggtggtgggagggaatgagtcatgaccaagatcgacagtgtgccaatgcaattgtgtgcattcaacaggaaagcacatctcctgatctacaaaattattaacacatgtacacatgcaatttatatgtagcttaagtggggtgcttgtgaggcgtgtcttctctgtgctctgtaccgaaaaggaaggcaaaatgaggacttaactaatgtatacaacaatctaaaactggatttgagagcatgctataacgagaacgattatagtacatataacataatctatgcactttttacataaacttaacccattatccatttatcaacctacaatagtgaaagaaatattgagacagcatttttaattaaaggttcatgtactatagctatcccctgattataataaattctgtctcagtaattttcaaaataaatctgctcatgtccttttttacacagcccatctaaatatccattaatcctaaatattctgagtgcagccatgttaggacaactttttctcctttttttcttgactgagggttgttaacttgttactccatatatgcatgatcaaaagctgtgtcagctgtcagcatatgctgtcagctactctataccttgttattgtcatttgggagatctagtgaccattgaattcaaagaaaaattaaagaggacttcatggccagagatgcaagtgttatctaaaatattttcaaatatgaactaaatcatgcattcataccaattcgagagtgtcaaaatttgtatcccagtattcatccgctttcctaccaagccactcctccagtttagcatacatttcacaatcttggaacccttgtttactgttaagaacccatgaattaccatcttcatcatcctgcagaaaagaggaacataaaagtttgttcaagggacaccacaaggaaaagtaacaggaactgaattacatggcagataagtatatttggaaatatacaataaggtctgtgatatctgcaactccaattactccacgtcccatgtcagcattatgcttttgacctccaactcgttttaagactgagaagagaacacaaaatagaagttcagaataagggtgcacatgtcacgagggaaggttatcgttcatactaatttatttattgtgcaacatgaaagccaaaaagtgcaaatagtttccacaactaaacattaaacaaaatatgtgattaagacctgtttgcaactacagctaaataaaattcaataagaagaggcacaatctcattataattcctgcagatagttgttgcatagcattcaacagacctcaaatttcccatgatcaacaaagatggggctaaattttgccctccaactctacactagagagagagggagagggagactttatgcagcctgtttgtgtaaatgtattacggtttgtgttctactgttctatatcaaatgttgatcttgaacagttgcatttgcatgtgtgcttcaacacggagaaattattctagtgcaaaaatggttttggagaattttgtaggggaacatgctgaacggaagaggacaaaaatgctgactttacctctattagacggccatgccaatacaagaaaattccacagttcattctgtcccattctacattgctccttccaagggtcaattgaatagtcctacccattatttcaccagatataacagatgtcttgttaagggtctttgctaaagggcgagttttgacctaccaagaaaataaacagtaaaagaaaagaatatgaatgtgccaaaacatagagagaaatgacatatgggtatttaccgaagacccttggacagagatcttcatccgaggattcaggaacataacttccaaataggactgaagagaatagtccaatggtacctaaaaaataccatgaaacaattagtgaagccagaccatgttttcagcatttccatggaacaaagtttactggaaaaataagccattaacactgatgtcttgattaaaaatcatgcacacacacacacacagtacattcagaataagagtacagattgtgaagcctatgcggctacatctcatcaaggttaatcaaccttcaagggcaatatacagaccataaataatttacatttcccaatgccacagcaacccatcagaaggatataataaatttcaggtttatatgtaattgaaactgataattggctcccatctacaagataaaaattaaaaataaaagagtaaacttcacaaaactacaggtactttgatcaatatatcagaaaactacagatttaacatcagttttatcacaaaactacaacttttgtaaccacaatagtgctatggatataaactctaaaaatctgtagttctttgataacctcattactaaatctgtagttttgtgatacgatgctttaaatctgtagttctggtacaaatttcgcgctaaatctgaagttttgtaatacaaattttcaaaaatttgtagttttgcgatagtttggtcaaagtatctgtagttttgtgaaatttgtcaaggaaagattgtaatccatacattgttacttgtttgtcctgggcgcaatctgactcttcttgaacggattagtatgtctccacgaccatggtggacaggatcttcagatggcttccctgaactccagtccaaggtgtaatctgcaccccatctatctaaattccatatataaatctgtgttccagtaccgtcttcaccaaatatccctagcttttctccaatgaaatactcattggagggagaaaattccttaatagcattcaagttatattcagcagtagcttcagattggacacttgaatcaacttccatgtattgcccttctttacgatatgtcaccacaggtatctcaagattctgcagcaaatagcactgtgttagctacgttttacaactgagctacctagctttagagttcccagtagactaagaatgaagtacatagagccgtgcttacatctttattttcattaaaagactgagataggaaggccactgatctggaagatgaagtttgggttagcacaattgcatctctgccaagtttcatagcaccagtctacaaaataagcaccaagaaaacagtaaactcaacaagaataagaacaatttttcacataaacaaacatctgcaagtataaatttaggtcgaacaagaatgcaatacggtaactgttttgaacactagcacatgaagtgtatggatttgcctcttaaaatcaataaaagggctaaaggagcatgaacagagggtgtgtttactgaatagatattcctaacttctaattgacataactaacatttattcaagttcattggttgagcagttaaatactgtacagtccaagacttttaagtcatgctagcttacagacagaaaaaagaaatgaaaggacgtcagctttgagatgctgttcactgcatagcaaaatgttacactctgcctccaaaatccgtgttagcgcagttcttatgtggagcaggcctatgtttgcatagcactccgcttacactttcatcccggctcgtacaatggttggagaaccaaggctataagccgctgaccctcacccacctaaacttccaagatggtactaaaccacctcctacaaccacaattgggccatgggcctcaactacaccacactacaggtggcaaacgggctacagtgttacacaaaacctacctaactagcacccatggtgaataatatgctgcagaaagcatgttcagaagtgtattggataatacagaaacaagttctaatttactcacaggtaatgcatcatataagccgataaccaaagttttgtatatggaatgcagacaacagagttcccggtacattttaaacaagtcagacatgccacatcaatacagcataaaatcggcttgagatgtgaaataaattattttttaaattattaaatatcagaaatgttaagaaactgataaccggagaggaggatgacgccaacaggttaccttaaatccaattccaaacctcccaatttgatcctggcgttgcttatccggtcttttgtgaccgaatgagatcattctcatcatttcagcacaagtcattccatgcccatcatcaattacagacaagacagggatttttttgtctgctttcttcgaaaacaatgatttgactgaaatattcaaccttcaagaaaggtaggagaacaaataagaagtcagctcaatcaaaataacacaaatgcacccccccccaaaaaaaaagggggggtaatcttcaaaatacgctaacaacacagtcaaattagcaaaagcctcaaatagtctttaaattatgtatacaacactaccctcagagaggaaatgcttcctacacaactacacatattactgagattacattctgtaaatactacaacaaaagcagtaaatatgtaaagtttgtatactaatagaatgggcatgtgcatattcatctggaagagatgtaaaacaagacaataaagaaaacttagtttggcatagtggaagattgtagtctagagctttagttcactgttttgccacaatagaaatattttgtaactataatcagtaaagaaacccttaactaattagatcgcatgttgcagcacagcacaataccggaaatgccaaatcagccctaaaaattatctcaagaaaaaacagcacccaatctctggctacacaaccttgaagaaatgggcataccttgatgcatctgcatctctagagttgtcaatgagctctgctattgctccaaagacccagccagcatgtgtctgactgagtgttcgcagataactaggatccgtgctgacaaaattttttgcaagagtggtggttctctttttcactattggatctaaaattctagggccatcttcaacagactcacatggtgatgattctggaactgatttgtgcagctctgtgacacgcgaggcattcatctccttaggatttgggccactatcacaaatctcctctctcaaatatgactttggattcatcgagccagattggaaatcacttctgtatgacctttttaaagcatctgtcatagcaatattcatgtgtcattctggtggcataatagacaagtgaataaagttaaataccacaaagaaacgaatcagcaaatagctcatagctgactacacgcatattatggtgtatatctttgatgttaactatagagagagcttcctccaacaccatggacaagtgagaatacaaatgaagtaataaaaaaaaagaagggactccaattgcaactcttggggattaatagaccaatattgatgaaacaaagattactggaatgtattgccaattgttaaatttcaagtttttttttatataaaattagcatagggtcagccaaaataaaaggagaagtaaaccatccaagcatagcattcctgttcaacaatcagcataggaaaactctcaccagatactccagccatcggtttgcagtctccaggatctttttgctcatacatgaccaccgcatgtgagaagttagggcgttcatgagattcatgagattgaggagggaaaatatgtaaggcaaaggagctgaatctaactacagcaaccttcaaaaaagcaccgaaaaagaacaaggaccccacattacaggcaagaaaagaacagagaacattgctaatgatgttaataataaaatacaaaatggcaagtagagaacagaacaatgctaatagtgctaataataaaatacaacatgcctactgacttgcaggggaacaaaaccctgacaaaagttgattaattggaagataaaaggtactacagtgcatggcctcccccctatcagcctatatgtccctgttatttgtcccatgtccgacacctaccccacctagtgcgggttctcagtaagaagtacgatagtatccaaatggtcaatcctttgccccattttacttgaacaaataagtaacaaaaaaagataaaatatcttgtatatatttttttagagcacctatcttgtatatttttattagcaattatgacatgcaatagaaacaataattaccctctgattgtcccagaggaaacgcatgaactttccccattcaatattctgacgatcatcttcaggttcaggaagcagtgaaaatttcaggaaatcacactgctggtacaccttagttggcacaaacctaacaattgaccaaaccgagggcctgtaaatgtgaaaagcacagacataagatacctccatgaaattaagaaacaaatcaccccaccccccacaacaacacacccaaaaaaaagtcatggtttttttaccgacatgttgattaaatgtttgtagatttgagtaaattaacagtatagctgcagcaattcactttagtagtatatatttttacaaaagctctaccactattttgatgatagcatatgagattgggtagttgtagcatggcatttaacagggggtatgtatggttgaaatcattgctggtgactatttattttgactgagagcaatggagggctcagggtctctgacaagtactgtgaaacagcgggagcagtcagatgatgctagtatgaaaacatgaacacaccagcattgaactttataacagaagaggaaaacccactaatacacactgtagattgtagatttaaccaatcgatgacagtatgcgatagagaacatcaacaatatttatctgacaatagttttggccaatggatgatgatgtaaaacttgtaaagtattcacagatcaggaaaagaaaaagagatcaacttacactttaactggaatatcacagactttggtgcggcatatgttcttagaatctttttgtaataatacatagttcaagccaccacctaccacaaaaaaatatatccttcaggcaaaaattcacacagtatgtattctaccaaaaaggataattctaacaacaatataaaagaagcaagcatcattcataattgatgtgaataaatgttaacatattggcattactaccatttttaagttataaaaaaaggctggacaggtttgccacttcatcacatgttaaagtgaggtactaggaccctatccacatctatcaacactgttgatcagttaaaagtacaaaactagagctgttaatataaacttaggagtataggtgatagagtttccacagattttgcaatatgtgaagtttcaggggtacaagtggacttggtgcagtttcctcttaattttgcagtggaacctggtctacagaaaggatatggccaattggccatcctttatggcaacgcatctcatataatcataccttgattttcatgtggcggctcattcaaatcaagtgtttcatccgccatctccttctcttcaccccctatgaacagcaacaaccatcaaatgataactatattttctaaaagcaaaagatcatcatgcatgtaaactgaaactgaaaccaagcatgagtattaactaagcaggtcaattgtcattctggagtaacatatgaccattaaacaagccagtagatccagaaatgtggtatagtagactcacagtatcgtacatcattaattgttcaaactagaggaagcaaacttatcaaatcccaagttacatgactattcatctataagttattaaataatgccaaaagaaaaaaaaatcagctgggcaaacaggccaatccgaccaaaactcatcacaaaggtcaaacacgacaagaatttgctggtgaataatatatcccagaatgctaaatacatgccagataacatgcttaaaactatccagatgaatcgaactaagcaatgctacaaattataaaaacatcagattcagccctacataactacataagtcaggtacaagcaagcagcaacgaggctcaactctccagtatattaaaatgttaaatgcagctccaaggcttcaatgaaggccatgactcatcaaatgccctccttacagcctcgcataactcaacatattaatgtgattccactatagaagaaagaaagcaacaaaaagtacttgagatcacggtccaaagtggtgatttatgtcacttaacacctccaatcataaatatttggcatttaggacaagatttgattaaacttttaaaacattcaccattagaataagcttatgatgctatgatagaacttttcaaggcaaatctacacaaaactaagcatttgagaagttactcatggtcaaagtttcaaaagtttaaccaaatcttgtccgaaacattaagcatttattgcaggagtgaatactttggttacacaccgagctcggtaaaagacaccaccttcaacccccacaaaaatcccaaaagactccgtcttctataaagaccatgagcacccaaaaaaaaaatctcagaaaacaagttcttaatgcgcatcaaaggcatcaataggattgcaaagtaaattaccaaaaaaaacagagagagaaataaaactgaaagcggagagagaatggaccacctccacacatttctaaccaagagaaaattttgggcacccgaatctcccgatcacgcaccaaccactacgcgagcaaccgcaaagcacgtcacgaacaccaccactacccacttcacctcaaaacccaaacgtcaaaggccacgcacagtaacttttacccccaaaaaaaagaacaggagaaaaaaatcagagcggtgaggggtttgaactagacacatttttctaaagggagaaaatgaaaaaaaaaatcgagcctccgatcgcgtaccaaaccactgcacgcaagcgagtcgtgaaaccaccaccaaaaaccccacttggcctcaaaaccccaaacccccccaagccccggttctcgcaaaaaacaaccacccacgagcactccggcgccggccgcggagcgcatgcacacacgcacacacgaaccaccggaatccacggcggtggtagcgaaccaacccccccaccaccaaaaaaaaaaacgaagcgcgagtgatagcggaaggaagctagggcttggcggtggcggcgggcattaccgggagggatcggaggcgaggcggaaacggaggcggcggccacggcggcgagcgcgcagcgggtgaggaggcgccgccgtgggattttgggcccggcgaaccggggcgtgttttgtgctggcgatacgaaggagcattgaaggcggacgccgcttccgctcgcctactagccttagggcttattcggatcggagggtaaactcaggaaaaacataggatctgcattcctatggattcgggtactgtagcagcattcggatcaaaggaatcccctgtaggaaaatcagaggaaattcgaaggaaaatttccttggccatccattccacaggaaaacaaacaatccactccaacctctttttatttttcctgtgcatgggaacgaggcaatcaacaaactaatcttcacaagcttcactcctctgacacatgatgattttagttagtgggtaggttctttaaaaattcctatgtttttcctacgctctatccgaacgcatgtttatatagtattcctatgtttttcaattctctgttttacacgtgcattcctatcatattcctatgattttcctattcctgtgttttttcaatcctccattccgaataagccctaagcctatatagcctcgccacgtgggattgttctttttgtttctttttcttttttttttaccgttgcagtaattgtgaccgtccgccaacctcacacatcaaaacaagtcttttctttttcaccgttacagtaatttttgaccgtccgccaacgtcacacatcaaaacaagtcttttctttttcaccgttgcagtaattttgaccgtccgccaacgtcacacgtcaaaacaagtcacaaggttatctcttctaccataacggcagtagtattagagcaagtttaatagtacagccaacaacggacttcaaattatttatagctaatctaatagcttattcatataatagttaactataaaaatatactccctccgtcttataatataagggactttgagtttttgtttgcactgtttgaccacttgtcttattcaaaaaaaatttagaattattattttttttgacttactttgttatccaaagtactttaagcgtagcttttcgttttttatatttgcacaattttttttaataagacaagtggtcaaacaatgcaaataaaaactcaaaatctcttatattatagaacggagagagtactacactattaatatttggtcacacctctcatacacatataatgtcttggagtccatgttgacatataatgtcttggagtccatgttgcagctggctacaaatctgtagcccgcttttttctctctcttctggatatgtggttatagctcaatatgtggttatagcttgtttatattctgctattgtacctgctcttaaagattgacacgagggaacccacattggaagatatacggtccccacatattaatggctataatggtagtgtcgttatgatagagaataattaatcatccagtcatgaaacaatttatattagagtaaatttcataaaactacagatactttgcacgatctatcacaaaactatatatttaaaaaattgtttcacaaaactacagatttagtgtcttcatttagcacaaaactacaggtactttgcacagtatatcacaaaactatatatttaagaatttgtttcacaaatctatagatttaatatcttcatttatcacgaaactacaggtttagtgtctccattatcacaaagctatatgttttacactaaatctatagttttgtaaaacaagttcttaaatatatagttttgtaataaattatacaaagtatatgtagttttgtaatagattgtacactaaatctatagttttatgaaacaagttcttaaatatataatttgtgataaattatgcaaaatacctgtagttttgtgaaatttactctttatattaaaataataaatacatttttaatttatttaaaatttaattgggttattgggtttgccatctacacttttattatctcaccgcgtgaaatcaccgtgcataccttgtgtattgtctaactaaccgccatgagtgcctcacaaccaccaaaattaagtgtgttgtgtgcatgggcatgatcaggtgaaatttaggtgcttgtttccgtagtttggttttaattgaaattacgttgttttgcaggagaagatgggtaaacttcggtatcattatcttcctctaataatcacattagttgacaattatgactaaccaagcacacttaatgctctaatgttttgtggcaaggtttagaaataatacaacattataaataatacacttttaatggaaaattgtcaaaaaaaaagatgttgattgttcaaatcacaaatttagcaccctatataataaccgtagtttgataaggtacctgtgttcgacaggtacgcctgtcgaataacaacagttcgataaattagttggcttgattaaaaaaggaaaagagcaaccatggatcccaa

SEQ ID NO: 28468 - DNA, 8852 bp, Oryza sativa
ccctattgaaacacctcttcatatatattttgtaatcattaaaaaaatcaagaacaaatcatcaacatataaaatttaaataagtttatatattcaattcttaatatcttaatgaaaaatttcaaattgacaaataataactctataaaaaataaaataatccatataagcacatgatggcctagactcacgagccaaacaaagcagctcacgagtcagctcgggctcggctcattttagcaacgagctgaaaaagaggcttaggtttggctcatttgacttacgagctgagctaagccaaccaagcccgagctgatgagttcatgcgcccgagctttttttccacctctacccacagcccactcacattcactcatcactgtccagattcatagtattataatgcgtcacatccggtattagattcgttttttttaaacggtggagtatagaccaaacggcatatcttagccttagtaaaatactataaatttaaagttatgtatccatgacttcactactatatcaccagatattatttgtggcttcttctactatatttgttgggcatttatttatgagaagttcaacatattattatagtcccaaaaataatggttaaaaattgtagtgcgagaattaaggccgtgttcttttcaactgtaacatcgaattgttaaaatggattatttactccacacttcgatatgtacattttaaaaaaatctacctcatttcttaaattacttgttataaactatctataaagtttatttcttacaatatttcatttatacctataatatattaataattcatagtataataatctaaatcacgacctaataagatcatactagtagtatgtagagctatcattctaactaccatagcagtcattgaatcgctataattagcgttatggaaactttcgtcgtagagtccgagcctcagttcattggaaaagagtccatgagtcatcatggcctcgtatggtatggaggacaaaatataggctatatagccacaagcacatggaaaggggttaggaatagtatctaatactgtcacaactcaccttagattaggtacaataaactattaaccaactataaatatattttaaagagataaaagataagagaggagagcagtgggctactacagcacgaacttcaaaacataatgtatatataacaagtgagatcatatattaatattaatagtatagtaaacaactattatatgaattgactattatattggttataaatgaattgaaactagtagggggttatactactccctccatcccatattagttgttgttccaggtaatttagcatcgattaaggtttgagaaaaaaagactatagtatctctaattaaatattgtatggttggatataggagggtggttaggggtagaaaagagataaatttgaattagagtgattgatgggacaaatactatttcattgtgataactattttaggataaagtttaaatgctgaagagacaagtaatttgggacagaggggtattaaacttgctcttatactccagtaaggctgccacagttttttgttggtcacaattaagataaagttagctaagcgtttaataagtctaacatgtgagctaagatgctaagaaaatactatggcaatagtaactgagacaataaatccaatatataactaatgaggaataagtaaggtatagcgtaatgtacgtgataagttgggattttcaacgaacctgctctcgctatgcacgatccgtgctaacccagacagagatggaatagccgagtagtagccagacaattcaacatcctctcacgcgttcctggaacgctagttgtttatatatatcgagcatagaaatatgtataatcactttctagtgatactaatactactagtatcataccctatattttattgtgaatcacacgaataaatgtatgttaactatataaaaattatataaagaatatgaagatgatgatttgatatacttgtataggttgaactctataatgaaatgttaatgatgtgtgttatgtttgcacgatatttaagggcatgttcggctgcccgttaacgcggctgggctgtagcagcttaaacaatgctactattgatgattcagttgttgcagacgtgagatgcaacgctgcggctgcacagcaatggctgccaaacacagtcttgggtgataatcaatctttgtgataatcaattaagatgttttaaaatagtaatactattgggtgatgatgtacatctttgtgataatcaatctggaaatataggaagaaccgaaggattggtgcagattccgagaaggcacattagatacagaaaatatcaaaagaatccacaatgcatacgtgatgacctttggctattgtctgcatatttgtagctaagagctcgtttgcgtcaagccaatgtgaaacttaaagtagggccaaagcgaaaaaggatattactataaaaattagagaaggttatatatattgaccctgttttgaaaaagagaatagaaatatcatagtaagtctcaaataaatttcacactaaaaaaagaggagttctttgattccccccctccccccaacaccttgatggcacgagagggcgaggagatcatcgcccagaaacatagtacgtggtcctcccgccaagggagctacaaactaggcttcgcgtgcaaactcacaataatttcattagaaactatgttttttaaattgacgtgagaaactatgctaggaaaatgtctaattttcctatctcaaccgtaaatctaggcataatacctccctcaaatatcaaatcatatcagtttaccttggttttgaaggtggcttcatctgacatggtgtctacatgactacgtggcatcacaattggaaaaaaaagaatttaaccagtaagaaccgaactctaattctttctcccctacctcctctctctagcatcgctcaatgactgtcccaaagctcgctgacctccccactactccctccctcggcaccagccttcactgttgtcggtgatatgggcccgggggtatcaggtttagagggaggaggctgccccccgatgccacgtggccctcccccgaggggagtcaggcccgaggtggggtggcggccactccttccccaaagactagtcggaggaggctgccccccgatgccacgtggccctcccccgaagggagtcaggcccgaggtagggccgcggccactccttcccagagactggatggagaagactaccctccaatgccacgtgtcgggcccgaggtagggcagcggccactccctggccgagactaaagggagaaggccgccccaggcgccacgtggctccccccccgaggggggatcgggcccgaggtcgggtggcggccgccccctcccgtgactaggggtcgggctttcccgaccccctctctaggtcaccacatatggtgggttaggtgtccgcctccaggtgcccacttacccacatttatggcgtcctgagcggtcgcgccacgccgcatttaatgcggtgtgcagtgcactcaaccggtctgtgaccggtcgaatgactgatgggacccaagatgtcaggcgcaccatcgcgtgtgtcaggcgatgtgcagcccgacatatcccatcaaataatgatggtgagaggttctcatcctcttatcccagccggagtcggtcctcccgctctggtcaaagcaaggctcccgtttcccggtgtaataagagcccagaagtcttcacccattaaatggtgactgacaggggcaccccccgtgtcaggcgacaagatttgacaggccccatcatcaagacgacgtgtgcttggcttcccaagtcaagagacaagacatgcatttaatgcaaagattataatacttctccaccggagctaggttaggttgttgggcccatgtggtaacccctttaggtataaaaggaggttcaggcctagtggtggaggggggacttccgagcgaactggcgcttgggtctcgcaagcccaagcaccggtgttctacattcaatcaatcatgcacaggagtaaggtattacgcttcatagtggcccgaacctgtataaacctcttttgtctcatcgtcttggaggggcctaaccccctcaagatcacacagctccgctcactaagccctcgaatctcacccgctgcccccagccgaactcacaaaggggggcctcatggttccctggtggaggagttcattctccgacaactgtcatcatccctcaacctaaagcatactaccttcctcaccggcgtagctcgacctctcccttcctctccttttccgacctagacatcgagcttggttaagggagagctatgtgacaaaggaggtgtcatcggctcgagctcacccaaggccaagatctccactgaaagccatgactgcaactcccattcgccacaatgccatgcttgactacgggtggtggagtcctctatgtcccttcattccccattaattcctgtgatccctcctcctatacagcacaaccactgccgagttcaagcccctcgcgcgagtggctacggcaagctcccccttcctcaatgctcagggaggcgatgcattgaggttgtcttgatggagaggtattagtcagggatgagatcgatgcgtgccgtttctcaccatggagatggtatctcttccctctctcgccactgccatcaccgaatagcagctcaagcttttgaactcaccacttgccacttcctcgcttttgtatataccgagttgacgaggtctcaatgaggaatagatgaagaggttaggttaatggttggtgaaactccgacaaggatgcagtggtggtgaagtgttgacggaaaaatcaaacacactggcctgggagatctgcttagctccagttcaggtccaaagattgatgagatgtgggcgtgccagttagtttgatcctgcaactgacaagatatgcaaatagcagataaaatagccgatcggctaaacaaccgatgtagtgattccagccgaaaaccgataatagccgatgccgataccagccaatagcgatagggtttaagcaatcggctatatgtccaatgtagataatgctataaaggcaattggctgatgatgatgtaataaaataataatataatccaatataaaccaatcggcaaataatgatatgataaataagcatcgatccgaatattaaagcacacatcggctggaggtccgatgtcatgaaatccacaagattagattaaacagtgaaacctttgttgtcatcggctaaatccaacttatatgtatatgcaatccttacgagccgatgcaacgtccagataactcaccagctgaaaccccgatgaaacccttattggcaatcaataagcaggctagagattatggttctaagcacgacttagtagatcaaacttaactgatgcaacactaagtatgaaaagaaacacaatatctagacaataaagccgttgactgattttcagggtgatagatgcctaggctaatctaatctagcaatgcgatttagccgatactggcagaaaccctaaagcgagagacagccgatagagctaaattgatatgctaagactagattaacagagacatgataaataggtaggcaaatatatcatccaaaccagagcaatccaagaggtcgaatgtactgatgtagccttgaacgacgccgacgtaaacgatacaattgcctgggccgacggaacattggacttaccccttcgccggagatcgaacaccgatgcagccccgcgtcaggtgccaagtcccgccggacgataaaataaagtaaaaaggtaaaaggtggcgatgcaccgaattgtattgatcgtgaggatagattacatagaccccgggtgtacatatttatacccatgggttgatacaagtccttgtcagacaagaaagaaactttcctaaagataaaagaaaaacatagagtccttatcggacactaaacacactttcctaaagataaaaggaaactaacaaactattcctaattaataggtaacttgccatgccgcattctctttgagctcggtctcttctcgatagcttcctttagtagatcaatttccttaaccgaatatagcaagaatctaacaactgacgacttgataactctcatcggctaatcttagtacttcgaagccgacactgactttaagccgatgatgactttgggcttaccaaatttcactgttaatatgaagataactcaattgtgggttgaaggtgaggacgagagagtggaggatagcctagagatggaggaggatggtcggacagtgttgtgagttacaccaaggcagatgatgccacgagcaccttcccctcggcaccgtgagcctcccgcctcccgcctccctctctaggcgcctattcccagccatcatcgcctaccttctccaccttctagtcccggtctccttgctctccttcgctaacaatggaggtgctaggcttgagtggaagagagaagagaggtggctagtgacatatatataggttccacctttgttttattattttctccttgactgtactgcacgtatacaccacctcgaatgaaaccaccgttaaatatctcggagaggcaaaattaacctttttttgatattttagggagaattcatatattgttttgttgagagagagagagagatatcggacttgggacaaaatatatttcttccaatgttggtgtgattgggaataagttggggcctattaaataagtaagcgcttaatgtcctgatgggctattctcaaccggcccaatcccatcatggctgatctttttaggaaaaagtccactatgactcccttaaaagtaagccgaatctaattcgtacccctcaaccacagaaccggatagaacgactccctaaactattgaaaccagtgcaatttgactccctcagcggttttggagggtggttttgctaatgtgacgctgatatggcgatgttgagctggtcagcgtcttacgtggcacttacatggcattagaattaaaaatatatatgtgggacctatttatcatttacaatatatatatatatatattgtgggacccacagacatttggggccacgtatcatcctctctctctctaacccttctacctcctccctctctcttccttatctctctcttttcttatccccttcggctgcggcggtgacgggcgggatgatgggtgctggagctgtggcggcggcgagcgggcgagggctggagcggtggcaacggcgggcaggttgcaaattcaaccgtgcggcatcttggatgacgatgatgatgctggcaagtagcaacaatctcacagtgaacaacgcaagctgattaatgcagttctccactccaatgatccaatccaaacaaactgtcaatttcacacatagaacacatgcacgtgcacctcgatcgatcgagcagctagctggccgccgccggccgccacgcagagatggcgcaaagcggcctcttgtgccagcagaagaaaaaggcatggccgtacgaccccaccggctccatgccgtccgctttcatccgcgccgcccactgccgcgcccgctcgtgccgctccaccagctccaccccctcgcacgccaccacaccacgaatctcctccccgagcatcacgcactcctctcttggtgcttgtgctcccctcgtttgcaggatgacccaggtgcggcgccggctccggcggattacccgctcccccgccctcgagtgcggccaaccccgagttcccgacatggtccatggctcgcgcaggcggtaatctatgatgagagtggacgccggcggccgacggcgtgcgatatggaggttgcacgcgggaagaggcgaaatgagatgcagggattagggattttggggagccaaggaagaggaggggaatcggccgacgccccgctctggccctcgccagctcgccgccgccgccactccagtacacgtcgctgccatagccaaggggataagaaaagagagataaggaaggagagggaggaggaagaagggttggagagaaagagaggatgatatggctgtgggtcccacaagtatttttcctatgtgaacgacaaatgggtcccacatatatatttttaattctaatgtcacgtaagcgccatgtaggacgaagaccaggtcaacatcaccacatcagcgccacgtcagcaaaaccattctccaaaaccgctgagggagtcaaattgcactggtttcaataggtgggggagtcgttttatccggttttctggttgaggggtatgaatcagattcggtctatttttaagggagtcaaagtggactttttccatctttttaagttgctttttccaagcgaaggctagggccgtgtttagttccccctattcccaacttttcatcacatcatatcacatctaaaatttttctacacacataaacttccgactttttttcaaactcccaactttcttcaaactttcaacttttttttcaggaattaaacacaccctaggaggggaacccctatggtctagaattttttttggtttatttcttcaagctccagtaccactatcttcttcacaattgtttcaagtgtgaagaattaattaaagcctgtttcctgtaagtgcaggtacaatagctggctataagccagctgcaaacaaattttaaggagataaatgaggagagagaatagcagcgggctataaattgatgcagtgtacggactccaagacacagtgtgtgt

SEQ ID NO: 28469 - DNA, 614 bp, Oryza sativa
ttgatgagtgagttttactaatgtgaacccattgcacatgaacatataagcaaacatgcagatatatcctgattgcagtgtctataacaacatatcaaccacattttttgcgaggcttatataatttgaggcttatataatttgaggcttatataatttgatgagtcatccatgtcgaaatggtaatcaccttcatcaaaattttctgttgcctgtggtttccctttcctaacttgcacggaacgtagagctgttgaacacaattttgatggtgtggacgagtttactcgcaatttacctgacgagtgatctgttccattccctccaaattgaaagatatttgagtttgagtttattgttgtatctctagaaagtcttgcacttcttcgaggaactgaatcactactctgattaaacagccttccagaaacctgagaaaataatcttttaactgagaaaaataatcttttaagtctggtatcatcacaagtcaaatctaaagtggggtatgaacatggtgtgaggactatcaccagaaagaacataaaagagactatacagcccgacctccaagcaacagaacaatagaaacatagggtcaatattagacgaga

SEQ ID NO: 28470 - DNA, 532 bp, Oryza sativa
gggaatcggtaagtatctagtcttaaaattgatagacaagatgaacttgattatgagtaatggagctaaaatgtgcaatgctccttttggcagcctgattcagagacacagctattgactattcagtttgagtggcacggtgttctgaaatcggtatccagcactctgattggtgtcagccctgagtttgaggttgcactctacacgctctgcttctttatgggaggggaagataaccgcgttgagattggcccgtacggagtaaacatcaagtgctaccgaatgggaaacagcaaaattgggtcagcatttccaattgcagataactgaattcgttccatgcctgctcctgcgtgtatgtgattccttcagctttcagtttcacgaagttattagtgtgctgttcgatttggtcgtttacacaaaagaaccacattgttcaatttgttgtcacaatgtctctactgaaaattgtattatttggattaaccatgctgtacaagttgtagtcacaaagtcctgtaatttgttt

SEQ ID NO: 28471 - DNA, 1869 bp, Oryza sativa
aaatccgagcgaatccgatgaaaagagagagggaaaagagggggaaagagggagggaatcacggggagtgatttccccctctttatggcgcgcggggacggcgggatgcggcggattcggcggcggcggcggcgctagggcacgggcgggcggcgggcgcggcgcgaggtaggcgatgacaggtgggccccacccgtcagcgagggtggcgggcgggcccgcctgtcggcggcgcgcgcgcggggaggaggccgatgggccgcgggggagaggagagagagggagggagttgggccgagccggcccaagagggaaagggggggggaaagaagacttttagggattttctttttataaaacctttttaactttgtttatttcttctcaattattatttgctctgaaaattccactaaaatttatttacgcattttaggcttttaggaaatatacaaaaatcctccaagccttatttgacttttaaatttgcacattttaattgttgaaggctttcacatgaattttaattattctcagcacgatttcgaggatgtattttagagtcgatttgggacgcgacaaacctaccccccttaaacggaatctcgaccccgagattcggaagaactggcgaagagaccgggatgggctgccttcagctcgtcttcacgctcccaagtagcttcttcttcggcgtgattgctccactggaccttgcaaaaacggattacccggttcctggtcctgcgctccatggtgtccaggattttcactggcctctccacgtaggtcaaatcttcgcgaacttcaatttgctctgagtcggcctgctcggatggcactcgaaggcatttcttgagttgcgacacatggaacacatcatgcacgttgcccaaggaggcgggcagctccaactggtaagcgacttctccgcgtcgagcaacgatacggaaaggacccacataccgaggtgcgagcttccctttcgtctgaaacctgtgtacacctcgcaatggcgtgacccgaaggtacacaaagtcatccactgcgaattccaagtcacggcgacggttatctgcataacttttctgccgggactgtgccacctttagattatcccgaatgattctgactttagcttcagcttctctcaggatatcagtcccgaacacttggctttctccaacttggtcccacaatagcggtgtccgccatttgcgcccgtacaacgcttcataaggtgccatttgtatgctggcttgatagctgttattgtaggagaactcggcataggggagactcttatcccaggtcttcccgaaatctagtacacatgcacgaagcatgtcttctaggatctgatttagacgctcggtctgcccatctgtctgcgggtgataggcggtgctgaaatttaatcgagtacccagctcttcttggagcttcttccaaaagtgagaggtgaattggcttcccctatcagatacgattttcttgggaacgccatggagactcacgatcctagcgaagtagagctccgctagtttgttccctccataggtggtcttcacaggaataaatcgagctaccttggttgggggtgcaaagaaaacaactggttgttccggccctcggtacagagtaacagtgcgtctcgcgcaatccactactccttggaattgagccaaccaattcatcccaagaatcacatccaaattcttggtgtctagcagaatcagatccgagggaaaaggaatcccctgaatttctatagggacggcagggctataatactttgctgtcataacccctccaggggtggtgatgagcagagggtttctaagcctttctacccccaactgatttctc

SEQ ID NO: 28472 - DNA, 2012 bp, Oryza sativa
aaaaaggaaggaagtttggcccgagccggcccaagagggaaagggggggggaaaagaagacttttagggattttctttttataaaacctttttaactttgtttatttcttctcaattattatttgctctgaaaattccactaaaatttatttacgcattttaggcttttaggaaatatacaaaaatcctccaagccttatttgacttttaaatttgcacattttaattgttgaaggctttcacatgaattttaattattctcagcacgatttcgaggatgtattttagagtcgatttgggacgcgacaattatcttttcggtactcgtacagaggtgtataccaatcacaagagtttaaagtatatctttactcagccagatctggacatgagacaaaggagatggttggaattaattaaggattatgacatgggaattcattatcacccgggaaaggctaatgttgtagcagacgctcttagcaggaaaggctattgcaatgctacagaaggacgacagttgccattggaattatgcaaggaatttgaaagattaaatttgggaattgtcagtagaggtttcgttgcagccttagaagcgaagcccactctaattgatcaagttagagaagcccaaattaatgattctgatattcaagaaatcaagaagaatatgagaagaggaaaagctattggtttcttggaggatgagcacggaactgtatggttgggcgagagaatctgtgtccccgacaacaaagatttaaaagatgcaattctgaaagaagcccatgatactttatactctattcaccctggtagtacaaaaatgtaccaggatctcaaggaaagattttggtgggcaagtatgaagcgtgaaatcgcagaatacgtagcagtatgtgatgtttgtcaacgagtcaaggcagaacatcagaaacctgccagtttgctgcagcctttgaagattcctgaatggaaatgggaagaaatcggtatggattttatcactggtttgcccagaacgtcatctggccatgactctatttgggtaatagtcgacagacttaccaaggtggcacatttcattccggtaaagacaacttattccggaagtcgcttagcggaattgtatatggcaaggattgtgtgtttgcatggcgtccctaagaagatagtgtctgatcgaggaagtcagtttacttcaaatttttggaagaaacttcaggaagagatgggttctaagctgaactttagtactgcttatcatccgcagacagacggacaaaccgaaagggtgaatcaaattttggaagacatgttgagagcttgtgctttagatttcggtggaagttgggataagaatctaccttatgcagaattttcgtataataacagttatcaagctagtcttcagatggctccgtacgaagcactgtatggtcggaagtgccgcactccgcttttgtgggatcaaacgggagaacgtcaggttttcgggacagatatcctaagggaagcagaagaaaaggtgaaaatcattcaagaaagattgcgtgtggcttagtctcgtcataagagttatgccgacaatcgccgcagagatttgagttttgaagagggagattatgtgtatattcgtgtcacacctcttcgaggagttcatcgttttcataccaaaggaaaattggcaccgcgttttgtgggaccttataagattgtcagtagaagaggagaggttgcttatcagttagagttacctcaatctttggcaggagtccatgatgttttccatgtgtcgcaattgaagaagtgtttaagggtacctaccgaagaagctaatcttgaacagatagaagtccaagaggatctgacctatgttgagaaaccaatccgtatcttggaaacaaatgagagaaggaccaggaatcgagttatccgtttttgcaaagtccaatggagtaatcactcggaagaagagtcaacttgggaacgagaagatgaattgaagt

SEQ ID NO: 28473 - DNA, 1312 bp, Oryza sativa
ttttctgggatttatttgagctaaggaagtatttttaataaatggaattgcatttaagaaataatttaaattgaaaaaggttttaaaaagttctcttttggctttgggccgaaagtcggcccaaaaccttctctctctctccccggcccaagtcggcccagttcgcagccgcccacgcgcgcgcgcgcgttcagtcgctgacaggtgggtccgtcgtcttcctcgggccgaaaccctagcgcgccgccgccgagctgccgccgccgttcctttccaaatccggccgttcctttccgtttccggtgaaattgattgaggggaaacaatctccgggatctcctctaccttttgtcctgtggaatcatcggctaaatcggtttggaaatcgagggattcgagttcgaatcggatcgggctctctctctccaagccgagctttccttcgccgttgccgtcgccgtgggccttcgccgccgcctccgagtccctttaaaaggctccccggtgtctcctctacccgccgccaccctcgccttcgcctcttgtcgccggaaaagctctagcaccgtgtgccctagcgccgccgtcgtcaccgtcgctccagccgtgcgccgccgtcgctccagccgtcgccgtcgctcgggaaggccgacgtcgtgttcgccgtcgcgtcgccgtcctcgtcctccccttcgccaccgccgaagaccgccggagcgtcatcgccgtcgtcgacccgaagagcttcgccgcttcctcctcgtcgccgtcgccgtccgttgatcttccgccgtcgttttggtcgccggtgagttcgccgtggcccgcttcgtcctggtgctttccgttttcgtcctcgcgccgccgttcgccggcgagcgtgcgccgcccgagccgtccgccccgccgagccgccgccgccgtcggtgacgtcattgccgacgtcatcggggtcgtccgccgtgagccgccgtggacccgatcgatctcggccgtccgtttggattggatcgaatctcggccgtccgttcgcgtgaaccgccgcccgtgcgcccggtccaccgcaaaccctagcccgctgacgcaataaaccttcttttccttttcaaaaataattcattattgcgtcataattcaatttaaaccgatttaagtgttttaatccgatttaatctttaaaaattcataactaattcatcttagctccgatttagttggttcaagtctctaaatttttctaaaattgagatctacacattaaaaatatccacatgtactgttcatgcttgtttatgtgctgttttgttgaatt

SEQ ID NO: 28474 - DNA, 1093 bp, Oryza sativa
gttcgggaaaaatgaatccgagacgaactcgaatccctcgatttccaaaccgatttagccgatgattccaaaggagaaaaggtagaggagatcccggagagtgtttcccctctatcaattcggccggaaacggaaaggggcggccggatttggaaggaaacggcggcggcggctcggcggcggcgcgctagggtttcggcccgaggaagacgacgggcctgacaggtgggacccacctgtcagcgaccgaacacgcgcgcgcggcgcgggcggctacgaactgggccggactgggccgagggaaagagagagaggaagcggttttgggccgactttcggcccaaagccaaaagaggacttttttaaaacctttttcaatttaaattatttcttaaatgcaatttcatttattaaaaatacttccttagctcaaataaatcccagaaaaatctaggaattatagaattaagcaaagtatttaatgaaattttatctggccccattttatattggaatttattaattaaaattagatcttcttttcaagacttttaaaattattttctagaaattccatttaaacaacaatttatataatttgaatttttagggtgtgacaaacctaccccccttaaacagaatctcgtcctcgagattcggaagaactggcgaacagatacggatgagctgacttcaattcatcttctcgttcccaagttgactcttcttccgagtgattactccactggactttgcaaaaacggataactcgattcctggtccttctctcatttgtttccaagatacggattggtttctcaacataggtcagatcctcttggacttctatctgttcaagattagcttcttcggtaggtacccttaaacacttcttcaattgcgacacatggaaaacattatggactcctgccaaagattgaggtaactctaactgataagcaacctctcctcttctactgacaatcttataaggtcccacaaaacgcggtgccaattttcctttggtatgaaaacgatgaactcctcgaagaggtgtgacacgaagatacaccatatctcccttaggatacaa

SEQ ID NO: 28475 - DNA, 1393 bp, Oryza sativa
gccgtcgacccggggtgagccgtgaaccgcccatttcgtttccaccatccctcccctctctcggccgccgctccgccgtgcctatggccgccgccggcgaccatcggggcgcgggcgcgccgcctcccgtcggccgtgccggcgaggccgccttcgggcgcgccccgcgagctgccatgtgggcccggccgtcagccgcccgcgcccgcgggtgcggctgacgcgtgggacccacggcgccggccggcgtcagccgtgtgcacccggtccaccgtggaccgagaggctgacgcgtgggccccactcccgtggacccggtccgcgcgccctctccctcggctgacgcaataaatccggtttttaattaaaatttaaatgaagaaattcgtaaatatccatttaaagagcatataaacttcaaatggccatatcttggccatttgaactcggaattggaccgttcaagtctctaatttttccttaagaagtcaagaacccatttttgtgctttgtttctgctgttatgtggagtttattagagtaaaagccttttcttttccgttggtcgtgtagacgctgcagcttcggaagatccgctcttcgtggaagttgaagccgacgtttgggaaagcgagcaaggcaagtcacatcatctttgagcatattgaatcccagtttataaaattatgttgatttaaattattgcattatcgcttcatttaaattcccgcgttatcactgttttatttagccatgcctatttacctttgttatgaccttattattattgttattgttattattaccttgttcaccctagattaaacaaaaccccaactagtggacactctactcatggtaccactagtataattttatgtagatgcttcgcaatttaattaggtaacattaggcggttttacaactctagactttgggaatattcatatcacctggacactttggaatggtttggttattgtggaaatggcttcacaccgccccctctattcaaaatccccaaaatggttttaggctgggctcggggtgcatggttttgatagtagcacctcggccatataaggaccggtcttcgggcctctgttgcaaagcactaccgtacttccacatgtctagtgggtaaggcttagtttgtggctcagtctagttataaacaaaagtacacggatggagatggacgaagtcgggggtcgatggacatctctaggacaaatgaaggctacacgagctgcggcccggtagtcgagatgtcatggcacagggccggtgtcctgctgtgtcacgcccggaatttctatccaaaattccaaacgcttacatgtgtgttaaaccctcgtccaggaatcaaccgagacacacaatgacaatattg

SEQ ID NO: 28476 - DNA, 1433 bp, Oryza sativa
ccccctcggctgattcctggacgagggtttacacacatgtaagcgtttggaattttggatagaaattccgggcatgacaagttggtatcagagctcccttgaccctaggttatgccaaatggttacccatagaagccctctaaaaatattggaaaagtagaactattcttctccctttctcttttaattaaaccaaactaatggcacatgcacttcataatctcttttaatggttctcattcaaaatttattctagtgttattagtactgtacatctattactgtactaatggctcattttccagcaaaagttttacaatgttgtttcatttaatcttgctgcaataaaataaatttagcaagttgattttataactttcttttatttcttttggaacctgttattcaaaagtataaaacttgtaatattgtttctgacttttcaaacttatcttgcaaacttggtttactttatttatttaccttttactttgaatttctaaaattaatccaaaaacttgtgctattaattggatagatgtcttaactccctcctttcacttgtctttagatgccgcgctacaagcctgagtacttgtttggtgttgagggatttgtccaggagttgcgtacaatgtcctttgtcattggatttgggactgcccctttttatgcccagattcctcatgatcgtcatgaagagaggtgccgagtcaaagtcactttgaacagtagtagtgaagatattccatcggtgatgttcgaagctggaggaagaaactatatccacgcatgtcaggaggtggcaaggatcgccataggagagctccgtgatcgctacagtgatcagttggccgacactgagtatcgttaccatccccgccaaccccaggggagtgaccgtggcagttaccttgagactgaaggaattgagaatgatgttaccaccagacatttggttgagatgctgtgggctatggatgaaagtcgtgcggagactgtgttagtagctcaagatcgtgaagattggaatcgtggtaagatttgcaagctagaagacaaggtggatcgtttggagaaggaactagccgcgttgaagggagaagcaccgccgcagaaggccaagattcgtcttaccgcaaggaagagagctttatttgtcccacgctatcaattggcgccaaaggtccgtgtggtggagaaagaagtagccccagcggatcctccggtcgtcaatgtaagtgatgatgaaggagaagaatcgaagcgcacccattccaagatcgagtggggagcaactcaagatgatgaagacgagccgaacgagccttcaatcaactccgatgctcggaagaactagagtgccttgttaagccgttgtcttagatcgttgtgttagtttgcttgttttaaatttgcttgtgtgggtcttg

SEQ ID NO: 28477 - DNA, 1738 bp, Oryza sativa
gcagaaggccaagatttgtcttaccgcaagaaagagagctttatttgtcccacgctatcaattggcgccaaaggtccgtgtggtggagaaagaagtagccccagcggatcctccggtcgtcaatgtaagtgatgatgaaggagaagaatcgaagcgcacccattccaagatcgagtggggagcaactcaagatgatgaagacgagccgaacgagccttcaatcaactccgatgctcggaagaactagagtgccttgttaagccgttgtcttagatcgttgtgttagtttgcttgttttaaatttgcttgtgtgggtcttgcatgtgatttacatcagtgatgggatgtaagtgcatgcgtttgtttgtttttttttttgagtgttaggaagttggtgagtttagtgttgtgagagtcttcagtttgtaataatgaaactcagttaagatcaataaaagttaaagtaattccctgtcctaagtagtttttccccggttcctcttcttgtgccctgtccatgccagatggtgaacactcgcagcaacgggaatggtcccaacctcaacaaccccaataacaacaacaatggagagaatccaacccttgctcaagttcttgcacaacagactcagttaatgaacatgatgatgcagcaacttcagaaccagcagaaccagggaaataaccatgcacctccccagaacaagctagcagaatttcttcgtgtgaggccgcctattttctctagtaccactaatcctgttgaagctagtgattggttgcatgccttagagaagaagttggatttgcttcagtgcactgatcaggagaaggtctcatttgcatcacatcagttgcatggccctgcctctgaatggtgggatcacttccgtctgaataggactactgctgaacctatcacttggcttgaattcaccgctgcttttcggaagacgcatataccatcgggagtggtgtctctcaagaagaaggagttcaggtcgctcacccagggatctcgctctgttacggagtatctacacgagttcaatcgtctagctcgttatgctccagaagatgtgcgcaatgatgaagagcgtcaggagaagttcttggaaggacttaatgatgagctttcttacccactcatgactggagattattctgatttccagaaattagtggataaggctattcgtcaggaggacaagtataatcgcatggagcagaagaaacgccggattgctcaattcaagatacaacaggggaataatcagaagccgcgtcttacttttgtaccccagtccatgccacatggaggttcttcatctgttgttcgtccgcagcgtcagttcttcaacaacaatgctggcaacaacatccgcaatcaagctccacgtcctgttgcagctccaacacaacaaccgcctgccaagagggagcaaggcagcaagcccgtggtgtgtttcaactatggagacccaggacattatgctgacaagtgtccaaagccccgacgcgtgaaggttgtccctgcctagagcaactctactataccagcatcaaaggcccgtgtcaatcatgttgcagctgcagaagctcaagacgctccagatgtgattttgggtacgttccctgttaactcagttcatgcaacagtgcttttcgattctggtgctacacattcatttctatctatgagttttgcgggaaatcatgggatggaagtagaagatct

SEQ ID NO: 28478 - DNA, 854 bp, Oryza sativa
cccatggcaaggcttggagcaaaccacctttgcatcaagccatgtatctttactaggagattcttgaagcaatttttctatgctggcaaaactaaaacctgatgatccacctgtgcccatgcccacaagcctgatctttggcctcctgtccctgttgttatacatgtggtatccacgagcgaagctccaactttcaataaatctatgccactgcttagagacaagtttgaactgcacggcataatcacccggaagccgtagtagggcctcctttatcaccttggcaaggggagatgacaatgctatctcttcattggttttacacacaggagcaagactgtcttcaaacaaactgatcagtccaagagcagaacgtgcagtttggtaaggcaaaggagttcccttgatctcaaggattgtttctagtgtttcagatgtaggatcataggcgatcgccttgcgattggatgtagcaatgattacattcttcttccctgacataccactactgccagcagaaccaataactctgataaaatctggtttcattaaatctcgggcaacatgctccgtcgacaaatcgatgcgatgctccaatgaccaatcactggagtaaagatcattcagctttcaaatctccagcgtagacgacatgcgacgaaggtcccggaccatgcacaggttaccagagagatccaccaagtgcactcctgaaacctgaaagggcggtgacctgaccaatctgaatgtctcttctgtcacagagaaggataagatggcagcatgtggccttcaagaaagagaacaaagagccaggtagccagtgaagaaacccatcacaaacactggaagaa

SEQ ID NO: 28479 - DNA, 1047 bp, Oryza sativa
aattgattgcaaatgggtatataaaattaaaagaaaagcagatggttctttagacagatataaagcaaggttggtagccaagggcttcagacaaaggtatggtatagactatgaggatactttcagtccagtagttaaaattgcaacaattagacttgttcttggtattgctgtctctagaggatggtcactaagacaattagatgttcagaatgcctttttgcatggtattctagaagaagaggtttatatgaaacaaccaccagggtatgaaggtaaatcaaccttagtttgcaaacttgataaggccatctatggattgaaacaaccacctagagcctggtactctaggttgagtcacaagttatttgaactaggttttacttcgtcaaaggcggatacttccctgttcatttataataaaaatggaataactatgtatatgttaatttatgtggacgacattattgtcacaagttcctcaagtgatgcagtcatagccttgcttaagaacctaaggtctgattttgccttaaaggacttgggtgagctacattatttcttgggaatagaggtgaagaaagtttctgatggtatactgttgaatcaagcaaagtatgccttagacttgctaactaaagttggtatgaaagattgcaaatcagcttccacgccgctagctgtgacagagaagttgatggcacacaaaggaaatcctcttggtactgaggacagtactcggtacaggagtattgtaggaggactacaatacttaacactcaccagaccggatttggcgtttgctgttaataaggtatgtcaatatcttcatgctcctacttcagaacatttgtcggctgtaaaacgtatactcagatatatcaatggaactgttgatgttggtctgcactttaagaggtctagttctactctagtcagtgccttttctgatgctgattgggctggtagtctagatgacagaaggtctacaggagggtttgtaatttactttggacctaatattgtgtcatggagtgctaggaaaca

SEQ ID NO: 28480 - DNA, 2020 bp, Oryza sativa
gctaaaagctgcttttgcaaatgaaaccctattatgccatcctttgttatcctatgcacttgcatatttgctgcgtggcttgctgagtatgtcatatactcaccttgcaattattcatcagaggaagagttctacagtgaagctgatggtgtggaggattaggtgtagccctggtcaagctgcctgtggagtggagtcgtccgcgccgtttatctttttccgctgcttagatctttattgattgagaggaactatctacctctgtaatgatattttatacgcttaataattagagtaataactgtactctattatcaatttgttattgtgtgcctcggctgattcctggacgagggtttacacacatgtaagcgtttggaattttggatagaaattccgggcgtgacagctaggaggcgacgacgaaggcccatggcggccggcgacgagatggaaagctcgagctcgaagagagaaaaaccgatccaattcgaactcgaatccaccgatttccaaaccgatttagccgatgtttccaaaggagaaaaggtagaggagatcccgaagatcatttcccctctatcaattcggccggagaaggaaatgggcggccggatttggaaaggaacggcagcggcgcgaaactagggtttcgggcggcggcggcgcgacgaagacaacgaccctgacaggtggggcccacctgtcagcgggagagagagagaggagagcggcggctcggactgggccggctgggccgaggagagagagaagggttttgggccaactttcggcccaaagccaaaagaggacttttaaaacctttttcaattaaaattattcatgaaatgcaattccatttattaaaaatacttccttagctcaaataaatcccagaaaaatctaggaattatagaattaagcaaagtatttaatgaaattttatctggccccattttatattggaatttattaattaaaattagatcttcttttcaaggcttttaaaatcatttctaaaaattccaattaaacaacaatttatatatttaggatttttagggtgtgacataaggttattgaaaggctttgccgtgacgcgtctcctgtgttgggacgaggctcatgtgttgggcagtcatggatgtcacatcctgattttcgcctcaggatttataaattatttaataaattaataatagaatttatattaaatgttcatcaatttacaagtgaagttaaatgcgggaaataaaatttcctaaataaaaagcatggatggatttaattcttattaaattctccatggttaattatactctctggaatattctcggatttttcggagctcaattattaattttaatcatacaaagagaagttcagcaattatttaaatattaaattaatcatataatgatctaattataattgttaagtgcttttcctgtttaaaatccttaaattataaattgttgtttaaaaggaattaatagaaatgattttaaaagtttaaaagagaagatcttttcttttaatttgctaaagttcaatataaaattgggttagataaaattttattaaacactttgcttgttcctctattttctagatttttctgggaattatttgagcaagggaagtatttttaataaatgaaacaacatttcacgaattattttaattgaaaaagttttaaaaatcctctcttaggccgttgggccgatttcggcccaactctctctttcctctctctccccgcgcgcggcccacgccggcccaagccgccgcccgcccctctctcccagccgctgacatgtggggcccacatgtcagggccgtcttcctcctccggccgccgccgcgcaagagcccgaaccctagcgccgtttcccgcgccgatttcgcccaaatccgagctcgattccttcgattggttgaggggttttgttcctctcgatctcctatttcttttcccccaagaatcaaaacgaatcggggagttttggatcccaatcga

SEQ ID NO: 28481 - DNA, 10654 bp, Oryza sativa
  unsure (1)..(10654): unsure at all n locations
aaaacgaatcgtggaggtttggatccgaatcgaactcgttttgttttatccctaaaaaaaccgagttcgatttcttcccgattcgattcctctcgtttgcggcttgatctcttcgatccgagttcatataaagcttctccttgatctcctcttccgtttgccccctttctcgagctctcccgtgcctcctagagccgccgccgcgtgcattaggtttgccgccgccgccggccatcttcggtcgcgtcgcgccgccgcctccgtcgtcgccgccgctcgccgttgccgccaagaggagcgccgtcgtgtgaggaagctcggccgccccttcttttccgccgccgaccaccggagccccctcgacgccgtggacccgaaccgccgcgccgccttctctcgtcgccggccgccgtcgtgcatcctttgactacgtggtgagtaccaacgggttcgcctcgttgtcctctacgcgtagatggcctccgtttccgccgtcgacttccctagcgccggcgagctcgcgaacccgagccggccgccgttgggtgacgtcagcgtgacgtcatcgcaagggctgacgtcatcagggccagggctgacgtcatctttctctctttttcctttttcccgttttttctaatagattaaaactttggaaaatcataactaaataaccgtagatccgttttaggtggttcaagttgctaaatttttctaaaataaagatctacatattaaaattgtccataaattgaattaaatttgtttaattctttttaattgggctttaattagatttaatcttgtaaaattcataataaattcatttgaagtcggagtaaggccgttcaagtctcataattcatctaaaattatgatctacatgtttgtttactttttatgtactgtttatttggtttttattagtctttttcttcgttttacgtgttagtttgtcgtttccgtcgttgcgaaggttcgtgagtgcgtcggaagtgatcaggaagattaattgaagactgattattgcaaggcaagtcacacagatcctaaacacaatcctttgagcatgttgatcctatatttaaattctctatttatttcaactgtgcatttattttcgaatgtcaccgggtggtgtgaacctattcctttgttatggccaatttgcattgaatgccttattccttgataccttgggtaataaattgattagcttgaaccttatgtattggtttggttcagctaaatgttatatatatttgcttagcaaagcttagaaacattagttcactaatgggatgaatcatatatactacattattatttatggtcatattgaatggtagctcacgatggttaatcgtgttatgataattaattggtaattaaaatatgattattggtgggttgtgagcacatggttttgaaggtcgtgctcatggcaattaaggaccggttcgcgagctactgttgtgaaacatttatcgtgccaaccacaagccagcgtgggcaacggctttatcttttgtatagcgtgattcattattgtgcaccagactgagaagtggcgagaagtccatgggggtcgctggggagtccatgccttgtttataagggggtgattatgatccaagtacggtgcactgtggtgagttgtgttatgcgaggggtattgtcacaactcctttccgaggtaccgcggtggtactgaggcacatggtgacatgatgtggggttgtgtcttgtgggtacagtggtacacctctggccagagtaaaactattcgaatagccgtgcccgcggttatgggcgagttgagcaatgtttttcgtgattagtctcacacctctcataataattatagatgttataactggtaataatttgcttagctcctggtttggagttagatctgtacagccgggtatggttgttcaggatggttgggcctgtacagcatgggtgtgctgttaagtgttgattaaaattttggattaattactccactgttttatttctcttaaatgttttgctaaatgctgcttttgcaaatgagcctatattatgccatcctttggtatccttgtgcacttgcatacttgctgtgtggcttattgagtatgtcatatgctcattcttgcaataatcaatcaacctcagttgaagaaaaaggatccagaaggagaagacgtttggcttataccccagttgagctgcctgtgggagtggagccggagcttcgctagattttattttccgctgcagttttcttcttggtgaggactaagtgcctcttaagtaagtatttatcgatttagttattatgatggatttgtatattaaattgtcagtttgtgtacctcggctgattcctggacgaggattttatgcacaaattagttcggaaattactagtgaatttccgggcgtgacatctaacttgatcaaacagagtaggtttagcttgtaaagcggccacaaaacctttgttgactattcccaagttcaagttttcaaattcttggcataactcccaaggtaaacgtcgaccttctgacatattacagtagcttttcctgctaagggcatcggctacaacatttgctttccccgggtgatagtggatttccatatcatagtctttaatcaattctaaccatcttcgctgacgcatgttcaagtcaggttgagtgaaaatgtacttcaaacttttatgatccgtatacatctctgtacggttaccgaaaagataatgacgccaaatcttcaatgcatgcaccacagctgccaactctaggtcatgcgtaggatagttattctcatgaggacgtaattgcctagatgcataggcaaccacctttccttcttgcatcaacacacaacccaaaccgagtcgggatgcatcacaatacacttggaaacctttcctcgaatcaggcaaaattaacacaggcgcagtcactagccttttcttcagttcttagaaactttgttcacaatcatccgtccacttgtacttcacttccttctgaagcagacgagtcattggtctggcgatctttgaaaagttctcaataaaactgcggtaatacccagcaagtccaaggaaactacgaaattctgaaaccgtcttgggttgcttccaacttaacactgactccacattgcttggatctactgccactcctccagacgagatgacatgacaaagaaacttcacttcggacaaccaaaattcacatttactgaacttggcataaagctgatgctcacgtagtttctctaaagctagacgaagatgctcttcatgttcttccttcgtcttggagtaaataagaatgtcatcaataaacaccacgacaaacttatccagatattccataaacaccttgttcatcagattcatgaaaaaggctggggcattagtgagtccaaatgacataacggtacattcgaacaaaccataccgagttgtgaaggcggtctttggtatatcttcctcacggattcgaagttgatgatatccagaacggagatctatcttggagaaaactgtagcacctttcaattgatcaaacaggtcatcaattctgggtagaggatccttattcttgatagtgacctcattcaacgctcgataatccacgcacattctctaagtatgatctttcttctccacaaagatgactggtgctccccatggcgaagtactgggtctaatgtatcctttctgaagcaaatcatccacctgtctcttcacgtcagctaactcattagctgccattctgtatggtctcttatggatagggtttgttccaggtaccaagtctatccgaaactctatgtctctcttaggtggcatacctggcaaatcctcgggaaacacgtctgggtagtcttgtactataggtatctcttgtagaacaacttggttcaaggtcacaccatgagatttaggagaggacgcaaagaaagaaacagtttccccattgctactggttaaagtcaccttacggttggcacaatctataactcctctgtgacgagataaccagtccatccctaggataacatctagatctttggattctagcaagataagcgaggatgggaaaggaacttcttctatttctatagtaacagaaggacaatactgtgtcgaaaatacttgattacctggggtattaactagtaaaggtctcccaagactaataacttccatcccatgattgctcgcaaaacttttagacaaaaaggaatgtgtagcaccggaatcaaaaagcacagttgcgggtatagagttaacaggaaacgtacccaaaacaacatctggtgcattctgagcttctactgctgcaacatgattaacacgtgccttcggtactggaacattggagttgttcggggctggagcgttcttcacgcgccgaggcttaggacacttatcagcataatgtcctgggtcaccacaattgaagcatatcactggcttgcttccctgttccttcctgacgggctgattctgagctgaagttgctgcaggacgagcaaccatgttgcggttgtcattgccacgattaccagtattgttgttgtagaactggcgttggggacggacaactgatgaagatcctacttgagggtacgatggagcttgaggtccagtaacgagtcgcggtctctggttactgccctgttgtgccttgaattgggcagccctgcgcttcttctgctccatccggttatacttgtcttcctgacgaatcgccttgtccaccaactgctggaaatcccggaaatccgtagacatcaaagcataagacaactcatcatttagtccctccaagaacttctcctgacgctcttcatcggtgcgaacatcttccggagcataacgagctaaacggttgaaatcatggaggtactcagtgaccgaacgagatctctggttgagtgctctaaattctctcttctttagagctacgacacccgctggtatgtgcgtcttcttgaaagcggccgtgaactcctgccacgtaataggctctccttcagccctgccttggcgaaaatgatcccaccattcagcagcaggtccatgcaactgatgcgaagcaaaagaaactttctcctgctcagtacactggatcaagtccaacttcttctccaccgcatgcagccaatctcctgcttctactggattggtggtgcttgaaaaggtagggggtctcacacgtaagaaatctgccaacttgttttggggaggtgggggtggattctgattctgattgtttgcctgctgattctgtgcctgctgcactaacagattgatcagttgtgtttgttgggccagaatctgagctagcgtgggatctcctccatcgttagtagctccacttccacttccacttccacttccggtgcgcgtgttcaccatctgacgataagcagaaacaacaggaaagaacgacagagagacacccttagaacgaagttatttaattaatttaaattctatattactcttaactgtgtatgattacatttaagttgcattaacactatctcaccaactatcttacactctgacaagcaaaagaactagactcatgctgttacatcccacccatgatgtaagcaacaactaaaacccacacactcacaagcaaacttaaacaagcaatctaacacaacgaactacggcaacgatctaactaagcgactactcccgccttgcgtcggaacgaagcgatggatcttcttcctctggagtagctggctctctttcttcagggtcttcctcctcttcctcatcacttatgatgtcgatgacaggttcagcacgatcgggcacagcttcacccatcacgcgaatcttcgaagctaactggagacgaggtggcggacaggttctctttcttagtgtgacgcgaagcttgggtgttggcggcggcgtttctcctttaagttcagctaattcgttctgtagacggtacaccttgctctccaacttgcaaatcttgcctcgattccagttttccctgtcatgagctgctttgtctcgctccacacttactgcatccatagcactaagcatatgcaccgcatgcatcagagtggcactctcttcaccatcaggacagatataggttccatagtcttgaccatgaggcttgtgaggatgatactggaaagctgatgaatccaactcttcttcaaaacgttgacgcaactctccaatggccaccaaagctacttcttgacaagcatggctgtacgatcttcctccagcttcaaacttaatggacagaaggtcttcacgatcactagccaacgtcacacgaacacgacacttctcttcgtcggggtcatgggaaatttggcgatactcgggagcaacttcatagcctacctcaaaagccatcaacctcagctccctgacgaatcctaacacctcgatcaaatttctcggtgaatgtggcggcatctaaggaaacatagaagagaggaattaatgcatatttttctaagttagctgcaccaacttgatttaactgattttttgccnaaaagggaagaaaataaaatttaaattccttatgatttattttaagcgcagtacagtgtcaccccaagaaagatgagtagtactagtgctatcatgattgtatcaaacccataatagatgtacagtgcggcctaatcaataaaatttggtaaagagaaaaaaagaaacattttggaagaacaactttttgcttttaaaagaaaagaaattgaatttcaataaattttgtgcttaaccttgcatgtgctgccaacttaattaatttataagagaatagagaagagcagttctattttttttcaaaatattttgaaggctacttaaggtttaccatttggcttatcctaaggtcaaggtggctctgataccaacttgtcacgcccggaatttctatccaaaattccaaacgcttacatgtgtgttaaaccctcgtccaggaatcaaccgaggcacacaatgacaatattgataatagagtacaattaaataactatttaatattcgcaaataataaaatattacagaggtagatagttcctcccaaaaatataaaacattctacgcagcggaaaaataaaactataacaaactacggaacagctatgacgactccactccacaggcatcttaaccgagaacaagcctaatcctccagatcatcaccttcactgagatactcctcttctgatgaatgaatattgcaagaatgagcatatgacatactcaacaagccacacagcaaatatgcaagtgcacaggataacaaaggatggcataatatagctcatttgcagaaaacagcatttaataaacatttaagagaatagtaaaacagttgaataattaatcaatattaaataaacaccatacaacacacccatgttgcataggcccaaccacatttgaacaacccaaccccagttgaacaaattgaacctccaaaccaggaattgtccattccaaaccaggaattaaattaattaccacattattaccattaatgagtagtgtgagactaatcacgaaaaacattgctcaactcacccataaccgtgggtacggctattcgaatagtttaaactctgatcagaggtgtaccactgtacccacaagacacaaccccacatcatgtcaccatgtgcctcaataccaccacggtacctcggaaaggagtcgtgacaataccccttgcacaacataacccattacagtgcacctttcctggatcataatcaccccctttaaaacaaggcatggactccccagcgacccccatggacttctcgccacttctcagtcgggcgcactataatgaaccatgctatacaaaagataaagccgttgcccatgctggcttgtggttggcacgataaatgtttcacaacagtagctcgcgaaccggtccttaattgtcatgagcacaaccatcaaaaccatatgctcacaacccaccttatccaggttttaattatcaattaattaacatcacacgatttaccatcgtgagctaccattgaatataaccctaattaataataataattttgtaatataatttatatttaacccctttagttaactaatgtttctaagcatggctaagcaaacatacatatagcatttagctgaaccaatccaatatataaggttcatgctaatcaaattataacccataggaaaataaagtcatcttcggccattaattaattgggaaaggttcaccacccgatgacattcgaaaacaatgcatagttgaaataaaataatagctttaaacgggatcaacatgctcaaagggttgtttgggatctgtctgacttgccttgggcttccacaaacgcttcggaacctttctcaacggaacgctttcctccgaacgtcggaaacttaagcattataacaaaatcaacaaaacagttcaaaaacaagcataaacagtacatgtggatatttttaacatgtagatcttgattttagaagaattagaaacttgaccacctaaaacggatctaccgttatttagatatggatttccgaagttttaatctattagaaaatcgggaaaaagaaaaagaaaaggaaacgatgacgtcagccctagaggagatgacgtcagccctggagatgacgtcggcatgacgtcagcaacggcggccggctcgggtccgcgagctcgccggcgctagagcggtcgaccggacgattggaggacacctacgcgtagaggacaacgaggcgaacccgttggtactcaccacgtcgtcaaccgatgcacgatggcggccggcgacgagaaggaaggcggcggcggctcgggtcgacggcgacgagagggctccggtgatcggcggcgaaaaaggaggggcggccgagcttcctctcaccacggcgcacctcttggcgatgacggcaagcgacggcgacggcggagacggcgcggcgacgacgccgaagacggcggcggcggcggcgaacttggaacacgtcgcggcggcgctaggaggcacgggagagctcgggagagggggcaaacggaagaggacaacgagaggaagctatatatggcattggattgaagagatcgagctccaaacgagaggaatcgattcgggaagaattcaaactcggttttagggataaaatcaaaacgaattcgattcggagagaaaactcaacgattcgctttgattcttgggggaaaagaaagaggagaacgagaggaacaaaacccctcaaaaacccggaggaatcgggctcggatttgggcggaatcggaggtggaagatggcggctcgggctcggtctcggcggcggccggaggttgaagaagggcctgacatgtgggccccacatgtcagtgtcccgagagagaggggcgcgggcggcggcggcttgggccggcatgggccgcgcgcggggagagagagaaagagagagtcgggccgaaaacggcccaacggcttagggagggggatttttgaacttttttgaataaaacaatttgtgaaatgttgtttcaaatattaaaaatacttcccttgctcaaataattcccagaaaaattctctaaaatagaggagcaagcatagtatttaataaaattttatctagctcatttttatgttgaaaattttcctagaaaattagggtttagctggtaggcttttaaaataatttctaaaaatgatttaaaatctgcatttttaatttagtcgatttttagggcgtgacattgatcaagttagagaagcccaaattaatgatcctgatattcaagagatcaagaagaatatgagaagaggaaaagctatcggtttcttggaggatgagcatggaactgtatggttgggtgagagaatctgtgtccccgacaacaaagatttaaaagatgcaattctaaaagaagctcatgatactttatactccatacaccctggtagtactaagatgtaccaggatctcaaggaaaggttttggtgggcaagtatgaagcgtgaaatcgcagaatacgtagcagtatgtgatgtttgtcagcgagtcaaggcagaacatcagaaacccgccggtttgctgcagcctttgaaaattcctgaatggaaatgggaagaaatcggtatggattttatcactggtctacccagaacgtcatcaggccatgactctatttgggtgatagtcgacagacttaccaaagtggctcatttcatcccggtaaagacaacctattctggaagtcggttagcggaattgtatatggcaaggattgtgtgtttgcatggcgtccctaagaaaatagtgtctgatcgaggcagtcagtttacttcaaatttttggaagaaacttcaggaagagatgggttctaagctgaactttagtactgcttaccatccgcaaactgatagacaaactgaaagggtgaatcagattttggaagacatgttgagagcttgtgctttagatttcggtggaagttgggataagaatctaccttatgcagaattttcgtataataacagttatcaagctagtcttcagatggctccttacgaagcactgtatggtcggaagtgtcgcactccgctt

SEQ ID NO: 28482 - DNA, 18293 bp, Oryza sativa
  unsure (1)..(18293): unsure at all n locations
ctcgaacacagcacctgcaggttacaaagttcatgcactaaccaagtcattaacgtgacaatcttgaaggtaaatagatagttttttttatattgcaactctgcaaacatgcgttctgtagcagttctcttcttttttaatctaagactgaatattaaatatttatttttttgtccaaataattataatattattataatggtatttgatgatgacgattaggatcagtgtgtttattttcttctttctctatataaataattatatattatctaataacgatgacacggatataataaaaacgtctcaaaactcatttctacacatgagatgttccaaaaacgtctcaatattcatctctaaacgatttaattttgtgctaacctgtaaagcgtcttaaactatatcctcaactaataaagcgtctcaaacatcgtccctattttaatttcacttataaaaaagagacgacttatagaatgacttaagtgaaacgtcttaaaacaatggttttgttgtagtgaacatcgagacgaacccgatggtactcaccacaacgtctatcgacgaacggtgatggccggcgacgagggggaaggcggtggcggagctccggtggtcggcggcgaaggaggacgggcggccgagcttcctcacctccgtgcgcacctaacggcgacaacggcaagcggcggagacggcggacgcggcggcgcgacacggccgaaagatggccggcggcggcggcggctaaatgcacgtggcggcggtgctacggtgcacgggagaggacgagagagggggcaaatggaagaggacgacgaggggaagctttataaagcattggattgaagagatcgaactccaaacgagaggaatcgactcgggaaaaatccaaactcggttttagggataaaatcaaaacgaactcgattcggatgaaatcctcaacgattcgctccgattcttgggggaaaaggaagaggagaacgagaggaacaaaacccctcaaaaacccggaggaatcggagtcggattgaggcggatttgagaggagaaaggcggcggcaaagcggcggctcgggcggctcggccggaggtaggggatggatccgacaggtgggccccacctgtcggcctccacgagagagggaagcgggcggcggcggcagctgggccggcttgggccggttcggccgcgggagaggagggagatgttgggccgaattcggcccaacgaccaaggagggggatttttttgaactttttaaaataaaacaatttgtgaaatgttgtttcaattattaaaaatacttcccttactcaaataattcccagaaaattctagaaaatagaggagcaagcatagtatttaataaaattttatctagctcatttttatgttaaaaattttcctagaaaattagggtttagcttgtaggcttttaaaataatttctaagaaatgatttaaaatatgcatttttaatttagtcaatttttagggcgtgacatgctgctaggggctcagttctgcctgcctgtcccgggggttccggccgtaggtgggattgggtcggtactcttgtctatggctaggatgggttggaaactatgtcacgtcttccgtctgtataccgtggtggtatgtggcacgtggttgcacgtgaggaagatgtgtcttgtgggtaaagatgtacacctctgatcagagtataatctattcgaatagccgcgccctcggttatgtgcaagccgagcaatgtacccaagttagtgttttaattcttaaaacctgcttatcaactaaaatgtggaatggttggcctaggttggcttgggacgagctgggacccagggtcgggttgccagttcggtctgaatcatcgtaggccttgggttaaggcaggttcgtgtgggttcacggccttgataaataatatggtatagttctagaatcgtgtttacaaaatagctttgagcaactaagtacctttaaatgctgtttactgcaaaccctaaccctttatagtatgactcctttgtactcccttgcatttattctgcacttgtgggtgtgtcttgttgagtacggtggttgtactcagtcttgctcaatttttcccaaccccagaagaggagccccttgaagatgaaggttttggtgtctagctcgtgcctgccgtcaagcgcctgtggtcgtcgccctagtcttccgttgtttctcgtttgtctctgtgtgtgctgggccttcgctgcccatgtaataagttagctatttacgcttccgcttgttaaactctgaattgtatcaacttttggtgtaccttgcctcctgggacaaggattaatgcacgcacgtaaggaacgcccgttgggttatttccggtcgtgacattagatctttattgattgagaggaactatctacctatgtaatgactttttattcgcttattaattagagtaataattgtactctattatcaatttgttattgtgtgcctcggctgattactggacgagggttcacacacatgtaagcgtttggaattttggatagaaatttcgggcgtgacatatatgcatatgaccgacgctaaggagttgtgggatgcactgaatactaaattcggtgctactgatgctagcaatgatctgtatatcatggagtagccccttgaagtgatgagaaaaagaaaactgcgtcttttccgatctacgtgtagtgctagatgctgggtgccatggatcgagtgatcaaatcagaatttatttacgttcagaactcagttgactgcttctatagataaggcggaatgtccttagttcagcattatagcacatagtctccaacgctacgccatatgtcgcttagacttgaccttttctcccgccccctaaaatcttcggctcctcgtttttattcaattatgaaattactcattttgatggagatttatagcatcattcaagtaaatacaaattgagatcgtagaaacatgagcttgcagtttcatgactacaagatggctgacaaccgttttgtagtcgaacaggctcatgagatacaaaccatagctaaggaactcgaactccttaagtgtgtcttacccgacaaatttgtggccgggtgcattattgcgaaactacctccatcatggagaagtttcggtactgcattcaaacacaagagacaggaatactccattgaggggttgatagcatctcttgatgttgaggagaaagctcgggaaaaagacgccgcgtctaaggatgatggtgggcagtccagtgccaatgttgtgcacaaggcctagaacaagagcaaggggaaatataaagctcaacagaccaccaacttcaagaggcagaagaagaacaacaacaatcctaaccaggatgagaggatttgctttgtgtgtgggcaacctggtcatctggctaggaagtatccacagcgcaaggggatgaaggcacctgcagggcagacttctaagtctgctaatgtgaccattggcaacactggagatggaagcgggtatggtaatttacctactgttttttcagttaatcagtctactaattggtgggttgatactggggccaatgtacttgtttgtgctgacatctcattgttttcttcttatcaggtcgcacggggttccaccttcctaatggcgaatgggtcacatgcttctgttcatggtgttggcacggtagatgtgaagtttacttcgggaaagatcgtgcagctgaggaacgtgcagcatgtcccttctatcaacaggaatcttgttagtggctcccgtctaactagagatggatttaagttggtttttgagtctaataaagtagtcgtgtctaaacatggatattttattagtaaaggttatgagtgcggaggcctgttccgcttttccctttctgatttctgcaataagtctgtgaacaatatttgtggaagtgtggatgatgaggctaatgtttggcactcacgtttatgtcatattaattttggcttgatgtctcggctttccagcatgtgtttaatttctaagttttccattgtcaaaggttctaagtgccatagttgtgtgcaatcgaagcaacctcgcaagcctcacaaggctgccgaggagagaaacttggcaccactagaactcctacattcagatctttgtgaaatgaatgaggtgttgacgaagggtggaaaacaatatttcatgacgttaattgatgatgctactagattttgctatgtgtacttgttgaaaacgaaagacgaggctctagactattttaaaatttataaggcagaagttgaaaatcaacttgacagaaagataaaaaggcttaggtctgatcgtggtggagagtttttctcgaacgagtttgacttattctgtgacgaacatgacatcatacatgagaggactcctccctattctcccgagtctaatgggattgctgaaaggaagaaccgcacactgactgacttggtgaatgccatgttggacaccgcgggacaacctaaggcatggtggggggaggcattgttgaccacgaatcatgtgttaaacagagttcctaacagaaataagaacaaaacaccatatgagatatggattgggagaaaaccatcactttcttatttgcgcacatggggtgttgttggtcgctctgaagttaaggtgaattgtatgtttcaattgatctcccgaaggtgatgtcaagatgaaccccacacctgctccttggctattgagcgcgccatcgaacgccattgtccatgtttcattgtcggtttgactgtctaacctattattaggcatagtccaatcggctatgacatcggcgagaacctcggacttgatggctgttcgtggtacaaagtggacgtcaaactggcttagctcgactacccatttcgcaatgcggccgataacgtctttgtttctcatgacttcgccaagagggaaggcggagacaactgtgaccctgtgggcttggaagtggtggtgtagctttcttgacgtcatgattactgcgtagagcagtttttggatctgtgcgtaccttgtcttcgcgtcgtggagagctttgctgacgtaatagactggtctctgtacattttctctttcgacaacaatgacagtactcacagagtagggtgtggcggtaatatagaggaataactcttcattaggttggggagcaacaagtacagggggatttgataggtagcacttgagtgcgatgaacgcttcttaggcttcttgtgtccatacaaatttgtcctgctttttagcagtgcgaagaaatgctgtccttgttctcccatcctaacgacgaacctacttagtgccgccatgcatccggttagcttcagtacctccttgagtcttgtgggcgacttcatgttctcgattgccttgatcttctcggggttcgcttctattcctctgccagagacaaggaacccaagcagtttacccgacggtaccccgaacgtgcacttctcaggattgagcatgaggcgatattgtctgaggttgtcgaaggtttcccgtagatcgtcaatcaatgagtcgcatgtcttggttttgacaacaatgtcatcgacgtaggcctcaacattgttacccagttgatcgctaagtgccccttggaccgtacgctggaaaatatttcctgcggttatcagtccaaacggcatttttacgtagcagaatacaccgaacgatgtgatgaatgttgtcttttcctcgtcctcttttgccatgcttatttggtggtagccggagtaagcgtcaagaaagcttaacagctcacaaccagctgttgagtccactagttggtctattcgagggagagggaagtgatccttggggcacgccttgttgaggtcggtgaagtcgacgcacatcctccacttcccgttggccttccgcaccatgactgggttggctagccactctggatggagtacttctctgatgaaaccagctttgagaagtttatcgagctcttctcgtatggcctgtttctgatctggtgcaaatctccgcagcttttgctttactggcttggcaacgggtcgcaccatgagtttgtactcaatcacctccctagggacccctggcatgtcggacagttgccaagcgaatacgtccgcattatcgcggaggaaggtgatgagcgcgagttcctatttctcgttcagtgatgccccgatcttgactgtcttgtcggggttggcactggagagtggaacgattttaattgcgtcgtctggttttggcatcttagtcgttttgatcattttcttgggtggctcggctgtggcgggtgggctgggcgtgtgctcgaccatgtcgaggctctgcttgtcgcattggaccgccagctttgtgtttccttgaatagagattgttcccttcggctcgggcatcttgagtacctgatacgcgtagtgagatgcggccatgaacttcgcgagtgcagttcttccgatgatggcgttgtatgctgtatcaaactcagcaacatcgaatgttatcttctctgctcgaaagttgctcgcttggccgaaagacacaggaagcgtgatctagcccagtggcttggacgaagactaaggagtgattccatggaagggttgatcggtaggcgtcaactcgtttcgtggaatgcccattgcgtccaaggtgctggcaaagagaaggttgatggagctaccgccatcgacgaagactcgcgctaccttgatattccgaatagtgggttcaaccacgatcggatatcgtcctgggataatagcagttttggggtggttctcatctgagaactcgatgttctgttcagaccacttcatcttgggtgcaaccccctgccatgtcgaacaaacctcacgttccacttttttgtattctcgctttgaagagtacgctgtggaacctccgaagatgtgcgagacatgaagatcggaatctggatacgccgagtccgagtcctgagtggttgcctcagtggccttctcaactacacgtactcgcttgcccttctccaaagccagctgctttgccaacgactttttgaagatgaggcactcctccagagaatgtttgtccgacttgtgtatggggcaccatattctcttcgtatcactgccttgtgggtctgggtgtttgggcgggcgcttgtattcagacacgaggacttccgcttgagctttcctcttcccactcttgccgcttttcttcttgcttgattcgggtgtgtccttggctggcttcttctctcctcccgcctttgactcgtcgttcttgcgtctcactgcgtcgtctgcatgggcgcatcgatcgacaacctcaaacaaacttcgagtcgttgtgattcgccttgttgccaactcctgggtagtatagcgatctctgacaccggttttgaaagcacgaatcacagaagcatcggtgatatcggggatcgtatttctgcactcattaaagcgccgaacaacacgtgtaaatcgtcttcgatcgcgtggcgcttgtaagttccctggaagttagcgacgaattgctaccacaaatctgcccatgaagagatcgagtagggtgggaggtgcatcagccacgaacgcgcagaacctttcaacgccgttggcaaatagtttgctaacgcgttgtcgtctgccccagcagcgtatagtaccgtggagtagacctggaggaattcttcagggtcagtactcccatcgtacttctctattgctccgggtcggaatctctcgggccatcggacatcacgtagagaacggttgaaagctctacacccagtgcagggggcggtgggttgtcggcgattgtgtgtcctccgtggatgtctatcggatgacgaagatgaagatgatgacgatgatgacggtggttcactcggctccggtgtgcgattccgagggcgacgtttaggttctcgagaattctgtcgtcatccaccattgttgtcctagcgccgatccccattatcatcaccgtcatgttgacgccctcgaccagcatcgtctggtgtccgctgttcgcgatcgtcgcggtcgcggcagttgtgacgattatcgtggtcttggtcttcgttcgagcgacctcctcgctgtcacgcccagaagtttcccctttttcttgctttaaaaattggttaaataaattgcccgaagaaattatcttaattaacctagagctaactccataattaataaatgcaattaataatcggaaatagcgtggtggaatttttcttgagttccccatgctccaatgcattaacaagatttttagtggaattttcagagccttggaaataattttaaccaattaaaaatcaccaaagtgcaatatttaatcctaggaaaatccttctcctctttttctttttcttttccttcctttttctctagatgggccatcggcccatctctctccccgcgctcggcacccctttcctgggccggcccgctcctcctttccactccccgaagtcctccctccctccctttctctttcgggcaccgacaggtggggcccacctgtcggtcgtcccctacctccggtcgttggagccggagctccaaccgcccgcgctgccgccttctccgctccacgtcgcgcctccactccgcgcccgcacctcgcgcccacgtcgccgccctctcccccgcatctcccgcgcgcgcgcgcgcccgcaagtggtgggggatttgaaatctcccaacaccctcttctctctcctccacctctccacgtcgccggccaaataggggccatccccggccgtttccgcccctccctcgcccataaaaaccctcactcgagctctctctctcattttccccattcaccgtcctctcccacgccctctaccgccgtcgcgccgcgctcgccgagctccgcccccgccgcccatctcctgccacgtgccgtcgccactagggccgccgctgtgccaagccgccgccgccgctagctccgccgccgtgtgggccatctcggccaccgcctcgcgtcgccggaaccccaccggaaccccatctccctcgcgagccggtgagctatccattcccctccgtctccggccagccactttggtcgtcgtggtcgccttatccatccctaactcctctcctcccctcctctaagtgtcgccgccgctcgtccgcccctcctcttgtcgggtcgtcgtcgccgcctttgtcttccgctccggccgccgtgtcgccggtgagtccttcctccccctcctttcctcaccttcccgcgagcgccggccacgccgctgctccggccatgcgccgccgcctttcggccgtcgcagccgcttcccgcaccgccggtcaccgccgtcggtggccgtgcctcgccgccgcctcgccttggtcggccggtcggccttgaggccaagctgagcctggccggcgcctccctcgcctcccctttgagccaccgcctggtggggcccacctgccaggcgccacctccctccctttggagccgctgacccgtggggcccacgtgccggtgccccccctttcgctgacgtcagccttgggctttattgcgcaataaaataattaaggctttttctttattagtaaaaacacagtttatcttttaaaattcttaagtaattcatccgagctccgtttaagtccattcaagtctcagtaaatcaagaaaaatgcaaagaatccactaaaaatggttttgtttcctgtttcagtagtcttatagcatgttttgcttgtgtgctttgtttgtcgcgtaggtttcggccgtttcgtcgatccgcggtttctcgaagacgttgctgaggtctcatcagttcgagagcaaggcaagtcatgcaatacgtttgatcatattgtacccaatttacaaatatcccgcatttctattaaatgttgcattcttttacaatgtaatgtgggatgggtcctattcctcagccacatattggttaccttatgccattgataacttgggtatcaaaatgactagatgttggcttaggaaatgcttagccatgcttagttcaactagtacacaaatggggatcacattattacatagactctgactattggcatagctttagattggcgccaccgcaagggtgtcagttaattaaaatattctgaatggcgggctgtgagtgcatggttttgctggtcgcacccatggcagttaaggaccggttcacgggaaaccctgggagacttaccgtgctgaccacaagcgggagtgggtaactgcttgatctgaagtatagctcgaccctttcctaggcaccggtggtgagggtgggcgtgatggagttgggtcggccgaggtgttcggttgtccagctgccggattcaccgcggcgcaagaggggaccgcccactgccttttgaggggtgggggtgaaaccttagcgtggtgtggatggttaggggagggttaggtggaggatcttgtcacgatttccccctttgcagtatcatggtgatacttcggggcatggcgacatgtgtggaatcgtgtcttgtgggtacagttgtacacctctggcgagagtaaaactattcgaatagccgtgcccgcggttatgggtgatcaaccagatttaccgtgattagtctcacccctagtttagcgtaatgaactggtgtagttcaggtggttggttgggcttgttgcaacgtggtgtagcgttggacagtgattggttaaaattgattaattactacagctattttactgctttcaactactgctttgaaatgcctgctttatgcaaaagaacccctagcttcctttggttatatcctgcatcatacctccttttccggtatgacttgctgagtacagtgggtagtactcagtcttgctctcttttcccccacaccagagttgaagttcttctcagatggagccgcctcagagaggttggtttcgtcgctgccgtcaaggtttgcctgtggagtggggtcgcccgctgctgaagtcaagcttcccggtttagctcgcttttatctttctcgctgcatttgtaatcttttatatttttgtaagacgtgggtctgtatgtcaacaaatgtcgtttgtgtaccctggctggtcctggacagggatttaatgcacaatcagcttagaaattctggttcgagaatttctgggtgtgacaagttggtatcagagccgaccttgaccgtaggacaagccaactggaaacctaagagccctctgaacccttttttttcatatgcatatgctcttttgcacttggatttgtttcaggaaaatttggggttttgcctctttggtttgtgggaaaaatcttggtcgttcattcggatcggatttttaaaattagctcagtgtagggttttagaaaaaaaaatctatttgggggttttaaaattagctcagtttaggtttgttgcttgtgggttagtcggcggtcgatatcatgtgtcagtggtatgactgcctcaattaggagttgcgtgcctctttttcagtgttttaatcaagattaagataattacacttaaattcataagcaagattagtttctaagccccctgtttttcttccttttctcatatttctccctatccccttcagatggagacaaggaatggttaacgggactccaacaatgccagtggcagcgaagagccgatcaatggagcacgtgccaacagtgcatctgacaacagtccgtccccatcgcctgagaacccaacaattgctcaggtgttgaacaatcagactcagataatgacaatgatgatgcaacagatgcagcaacagtaccatcaggtgttgcagcaggtgcagcagcaagcacagcagcagcagcagaacctgcagtttggtcctccacctcctcagtccaaactgttagaatttcttcgtgtcaagccgcccaccttctcaagcaccaccaacccaatcgaggcccacgactggcttcatgccattgagaagaagctgaatcttttgcaatgcaacgagcaagagaaggttgcttttgctacataccagctgcaaggccccgcttctgtttggtgggacaactacatggtgacccgtccagctggggcagaggttacttggacagagttttgtcatagtttcaataaagcccaggttcccgagggagttgtggcgcaaaagaagagagagttccattccctgcaacaaggaaccagaacagttatagagtatttgcatgagttcaaccgcctcgcgcgctacgcccctgaggacgtgcgtaccgatgccgagaagcaggagaagtttatgtctggtcttgatgatgaattgaccaaccagttgatctctagagactatgaggactttgagaagcttgtggacaaggctattcgtcaagaggagcagtctaacaaaatgaaccgtaagaggaaggcagcctagttcaggactccccaggggaagtgttagaagcctcgtttcacaatgggatatcagggtggaccttccaccatgattatccgacagcaccgtccctaccacccgggtagcttcaacaagaaccaccatagtggcagtcacaacaacagtgagtagcacagcctcaaccctactccgagttcactaaagattccagcccaatcagttcagccacctttgccagaacagcccaagaggttgggagaaaaacccgaactctgcttcaattgtaacaaacccggacacacggttggaaagtgcccgaagccaagacgtgctggacccaagttcgttcaggcccgtgttaatcatgcatctgcagaggaggtgcagtcagcaccagaggttatattgggcacattccccgtcaactcgacaccggcagtaatattgtttgattctggtgcaacccattccttcatttccaagcgttttgctggtgcacatgggttatctttagtgaagcttaagataccaatgcgagttcatactcctggaggtggcatgaccacaactcactactgcccatctgtgacagttgaaattcaagggttgatttttccagcccacctcattcttctcgaatccaaggacctagatgtcatacttggaatggattggttgacaaggcacagaggagtgattgattgcgccagccgcaccatcaagttgaccaatgcaaaaggagaggtggtaaccttccagtctctagtgccgcagaagccagggatcagtttaaaccaggctgctggtgaagaacaagaggtagcagtggagaaaaccactaagaagctagaggatattcccatagtcagagagtatccagaggtttttccggacgatctgacaacaatgccaccaaagagggatatcgagttccggattgacttggtacctggaactgcaccgatccacaagaggccttacagaatgggagccaacgagttggcggaagtcaagaagcaagtcgatgaacagttacagaagggatacatccgcccgagcacgtcgccttggggtgctccggttatctttgtggagaagaaagacaaaaccaagaggatgtgcgttgactaccgcgcactcaataaggtcaccatcaagaacaagtatcctttgccaaggattgatgatctgtttgatcagttgaaaggagctactgtgttctctaagatagacctgcgatcaggctatcaccagttgaggatccgcgaagaggatattccaaagacagcattcatcactcggtacgggttgttcgaatgcacagttatgtctttcggactcactaatacacctgccttcttcatgaatttgatgaacaaggtgtttatggaatttctagacaagtttgtcgtggttttcatcgatgacatacttatctactccaagtccgaggaagaacatgagcagcatcttcggctggtacttgaaaagttaaaagagcaccagctatatgccaagttcagcaagtgcgacttctggcttaaggaagttcagtttctcggtcacatcgtgaatgctcaaggagtagctgtggatccagcaaatgtggagtcagttaccaaatggaccccaccaaggacagtcactcaggttcggagtttcttaggacttgcgggctattaccgccggttcattgagaacttctctaaaattgctaagccaatgacacagctattgaagaaggaagaaaagtttatctggtctgctgaatgcaataggagttttgaagaactcaaacgacggttggtgtctgcaccagtcttaatccagcctgatcagacgaaagatttccaggtctattgtgatgcatctcgccaggggctaggatgtgtgttgatgcaggatggcaaagtggtttcttatgcttcacggcagttgcgtcctcatgaaggcaactacccgacgcatgatctggaattggccgcagttgttcatgctttaaagatttggcggcactagcaactacccgacgcatgatctagaattggccgcagttgttcatgctttaaagatttggcggcactatctcatcggtaaccgttgtgaggtatatacagatcacaaaagtctaaagtacatcttcactcaacctgatttgaatctcagacagcgaagatggttggagctgatcaaggattatgatatgggaatacattatcatcccggcaaggctaatgtggttgcagatgccttgagcaggaagagctactgcaatgttgcatgggtagagcaactatgttgtgaggttcaacgcgatttggaacatctgaaccttggtatagttgagcacggattcgtggttgccctagaggcacagcccacactggtggagcaggttcgcatagctcaagcaagtgatcctgaaatagcagagctcaaaaagaacatgagagttggaaaagcccgaggttctgttgaggatgaacaaggaacaatctggatgggagaaagattgtgtgtacccgaaaacaaggaattaaaagacctgatactaaccgaggctcatcaaactcaatatttcattcatcccggtagtacaaagatgtaccaagacctcaaagagaagttttggtgggtcagcatgagaagggaaatagctgaattcgtagcactctatgacgtctgtcaacgagtaaaggcagaacaccaaaggccagcaggtttgctacagccacttcagattccagaatggaagtgggaagaaatcggaatggatttcatcaccggtttgcccagaacgtcatcggggcatgattctgtttgggtagtcgttgaccgactcaccaaagtggctcacttcattccggtgcacactacctactcagggaagaaattagcagaactctatctggcaagaattatgtgtttacatggtgtacctaagaagatcgtgtctgatcgaggaaaccaatttacttcaaagttctggcagaaattacaagaagaattgggaacccggttgaatttcggcactgcttaccatccacaaacggatggccagaccgagcgagtcaatcaaatactagaggatatgttgagagcctgtgcgcttgactttggtggagcatgggacaaaagcttgccgtatgctgagttctcttacgacaacagttaccaagctagtctacagatggcaccgtttgaagcactgtatggacgaaggtgtcgtactccgctcttctgggatcagacaggggaacgccagttgtttggtacagaagttttaaatgaggcagaagagaacgtcagagctattagggaaagattgagaatcgcgcaatctcggcagaaaagctatgcagacaaccgccgaagggagctcgctttcgaaacaggggattatgtgtatctccgtatcactccgctcaggggagtacatcgcttccagaccaaaggaaagttggcaccacgctttatgggaccatacaggatcttggaacgtagaggtgaagttgcttaccagcttgagcttccctccaacatgcttggcatccacaacgtgttccacgtctctcagttgaagaaatgtttgagagttcctgaggaacaggcaagtccggatcacaccgaaattcaggaagatctgacatatgtggagaagccgactcgtatcctcgaaaccagcgagagaaggaccagaaacaaagtaataagattctgcaaggttcagtggagccaccactcagaggaagaagccacttgggaaagagaagatgagttgaaggccgcccacccgcacctcttcgccagctcttccgaatctcggggtcgagattccgtttaaggggggtaggtttgtcacgcccagaagtttccccctttttcttgctttaaaaattggttaaataaattgcctgaagaaattatcttaattaacctagagctaactccataattaataaatgcaattaataatcggaaatagcgtggtggaatttttcttgagttccccatgctccaatgcattaacaagatttttagtggaattttcagagccttagaaataattttaaccaattaaaaatcaccaaagtgcaatatttaatcccaggaaaatccttctcctctttttctttttcttttccttcctttttcactagatgggccgtcggcccatctctctccccgcgctcggcacccctttcctgggccggcccgctcctcctttcccctccccgaagtcctccctccctccctttctctttcgggtgccgataggtggggcccacctgtcggtcgtcccctacctccggtcgttggagccggagctccaaccgcccacgccgccgccttctccgctccacgtcgcgcctccactccgcgcccgcaccttgcacccacgtcgccgccctctcccccgcatctcccgcgcgcgcgcgcccccaagtggtgggggatttgaaatcccccaacaccctctctctctctcctccacctctccacgtcgccggccaaataggggccatccccggccgattctgcccctccctcgcccataaaaaccctcactcgagctctctctctcatttcccccattcaccgtcctctcccatgccttctactgccgtcgcgccgcgctcgccgagctccgccgccgccgccgcgccaagccaccgccgccgctagctccgccgccgtgtgggccatctcggccaccgcctcgcgtcgcccgaaccccaccggaaccccatctccctcgcgagccggtgagctatccattcccctccgtctccggccagccactttggtcgtcgcggtcgccttctccatccctaactcctctcctcccctcctctaggtgtcggtgctgctcgtccgcccgtcctctcgtcgggtcgtcgtcgccggtcaccgccgtcggtggccgtgcctcgccgccgcctcgccttggtcggccggtcggccttgaggccgagctgagcctggccggcgcctccctcgcctcccctttgagccaccacctggtggggcccacctgccaggcaccacctccctccctttggagccgctgacccgtggggcccacgtgccggcaccccccctttcgctgacgtcagccctgggctttattgcgcaataaaatgattaaggctttttctttattagtaaaaacacagtttatcttctaaaattcttaagtaattcatccgagctccgtttaagtccattcaagtctcagtaaatcaagaaaaatgcaaagaatccactaaaaatggttttgtttcctgtttcagtagtcttatagcatgttttgcttgtgtgctttgtttgtcgcgtaggtttcggccgtttcgtcgatccgcggtttctcgaagacgttgctgaggtctcatcagttcgagagcaaggcaagtcatgcaatacgtttgatcatattgtacccaatttacaaatatcccgcatttctattaaatgttgcattcttttacaatgtaatgtgggatgggtcctattcctcagccacatattggttaccttatgccattgataacttgggtatcaaaatgactagatgttggcttaggaaatgcttagccatgcttagttcaactagtacacaaatggggatcacattattacatagactctgactattggtatagctttagattggcgccaccgcaagggtgtcagttaattaaaatattctgaatggcgggctgtgagtgcatggttttgccggtcgcacccatggcagttaaagaccagttcacgggaaaccctgngagacttaccgtgcttaccacaagcgggagtgggtaactgcttgatct

SEQ ID NO: 28483 - DNA, 1041 bp, Oryza sativa
tgccggcaggtcgactctataggatccccatgtacccaagttagtgttttaattcctaaaacctgcttaacaactaaaatgtggaatggttggcctgggttggcttgggacgagctgggacccagggtcgggttgccagttcggtctgaatcatcataggccttgggttaaggcaggttcgtgtgggttcacggccttgattaataacattgtatagttctaggatcgcgtttacaaaatagccttgagcaactaaatgtctttaaatgctgtttactgcaaccctaaccctttatattataattcccttgtactcccttgcatttattctgcatttgtgggtgtgtcttgttgagtacggtggttgtactcagtcttgctcaatttttcccaagcccagaagaggagctccttgaagatgaaggctttggtgtctagctcgtgcctgccgtcaagcgcctgtggtcgtcgccctagtcttccgctgtttctcgtttgtctttgtgtgtgctgggccttcgctgcccatgtaataagttaactatttacgcttccgcttgttaaactctgaattgtatcaacttttggtgtaccttgcctcctgggacaaggattaatgcacgcacgtcaggaacgcccgttgggttatttccggtcgtgacaataatgacgccaaattttcaacgcatgaactactgcagctaactcaatatcatgagtagggtagttcttctcatgcggacgtaactgacgagatgcataggtaaccaccttcccatcttgcatcagaacacaacctaacccaagtttggatgcatcacaatacacctggaaacccttttttggatcaggtaaaatcaagataggagctgatattaagcgattcttcaactcttgaaaactctgctcacattcttccgaccacttatacttcacatctttctgtagcagtcgtgtcatgggcttagtaatcttggaaaaattctctataaacctccggtaatatcctgcgaggcctaagaaactgcgaatctgtgaaac

SEQ ID NO: 28484 - DNA, 1288 bp, Oryza sativa
ataaattggacaagatgttggaggaccacagaacttcgttgtacccaagttgcgagcaggggcacaaaaagttggataccactctggagttgttgcaatggaaggcaaaaaatggggttagtgacaaggcatttggcgatttattgaaactcgtcaagaacattcttccggggggaaagaaattgcccgagacaacgtacgaggctaagaagatagtctgcccgttaggactgaaagttcataagattcacgcatgtccgaacgattgtatcctatatcgcggtgaggagtatgagaacctagaagcatgccctgtttgcaaagcactacgatacaagattagacgggacgatccaggagaagttgacgggcagctaacaaagaagagaattcctgctaaggtgatgtggtattttcctataataccacggctaaggcgtttgttcaggaacaaggggaatgctagaatgttgcgatggcacgctgaagagcgtcaacatgacgggatgctgagacactcagccgatggttcgcagtggcgaaacatcgacagaaaatttaaagaatttggaaaggacgcacgaaacatacggtttggtttgagtacggatggcatgaatccttttggagagatgagcagcggccatagcacttggcccgttacgatgtgtatctacaacctccccccctggctatgcatgaagaggaagtacataatgatgccgattattattcaaggccccaagcaacctggtaacgacatcgacgtgtacctaagaccactggtcgaagatcttaaacagttgtggaagaaggaaggtgtccccgtgtgggacgaggacaaacaggaggagtttaacctacgagcgctgctgttcgtaaccatcaacgattggcctgcacttagcaacctatccggacagtccaacaaggggtacaaggcttgcactcactgtatggatgaaacagaaagtacgtatcttaagcactgtaggaaggttgtatacatgggtcatcgtcgattccttgcagcaaaccacccggtacggaagaaaggcaagcacttcgaacataaggccgaccaccgtacgaagcctaaacatcgcagcgggaaaacagtgtttgctatggttaaagatcttaaagtagtgttcggaaaggggcctggaagccagcatatagagagcgaagatggtcacgcggcgatgtggaaaaagaactctatattttgggagttaccatattgggaattcttggacgtacgccacgcaatcgacgtgatgcacct

SEQ ID NO: 28485 - DNA, 709 bp, Oryza sativa
gtcttcagatggctccgtacgaagcactgtatggtcggaagtgccgcactccgcttttgtgggatcaaacgggagaacgtcaggttttcgggacagatatcctaagggaagcagaagaaaaggtgaaaatcattcaagaaagattgcgtgtggctcagtctcgacataagagttatgccgataatcgccgcagagatttgagttttgaagaaggagattatgtgtatcttcgtgtcacgcctcttcgaggagttcattgttttcacaccaaaggaaaattggcaccgcgttttgtgggaccttataagattgtccgtagaagaggagaagttgcttatcagttggagttacctcaatctttggcaggagtccataatgtgttccatgtgtctcaattgaagaaatgtttaagggtacctaccgaaggagctaatcttgaacaaatagaagtccaagaggatctgacctatgttgaaaagccaatccgtatcttggaaatagatgagagaagaaccaggaatcgagttatccgtttttgcaaagtccagtggagtaatcactcggaagaagagtcaacttgggaacgagaagatgaattgaagtcagctcatccgtatctgttcgccagttcttccgaatctcgaggacgagattctgtttaaggggggtaggtttgtcacaccctaaaaattcaaattatataaattgt

SEQ ID NO: 28486 - DNA, 15931 bp, Oryza sativa
atctgaaaattgtcgtgctctcaagtttccctgcaatgtatgagagatacgagactgaagtcagaccagttggtatctaaaggtagccaagaactaaagaaattctacaaggttgattccaattcatgtgatgaacagattggagaggccctattgagacaaaatctcattaaaatgtacctgcaaaaagaacctctttgagaccgtaactgagtcgtgaggtacctgttacaatgttagtgacatacatggctttgtcaaaatcaaaccagattctgtaatacctgtggaaaataaaagaaatatagtttctaactttctatgcacactagctagcagcactacatgatatgctaacactcaagcacaaatgttagaaagtaaaagcaaaactgcgccgatgtaaaggctgcaacagagctcacttgattacatttaaatgtgtgatagcttatcgaaataagcaccttggtttgatggcaaggggataactagcaagactatccttgtacgtcgttcgtctcgatttctgagccacgaacaatatggcggaatacgaaggactcctagcgggactgagggccgcggcaggaatgggcatccactgcctcctagttctgggcgactcctagctggtcgtgaactagctatctaaggagtaccaatgcaccaaccagcagatggacgcctacgtccacgaagttcgacgcatggaccgccacttcgatgggctcgagctccgacacgttcccaggcgcgacaatgcagtcgccgatgagttgtcgcgcatggcgtcagcacgagccccactcccccaggggcctttgaagaaaatctcacacagccgtcggcgcactcggaccccccgagggtgcctaacgccgcgacccccaccctgacgcctggtgagccacaggcctcggggcccgagggggtcaaccccgaccccccatgtcaggtcgcctggatggccgacatccgggcatacctcgacaatcacactcttcctaaggatcgcgccgaagccgaaaagctcgcgcacatctccaaacggtacatgcttgtagaagggaccctctaccggagcggcgccaatggggtcctcttgaaatgtatctctcgggagcaaggcgtagagcttatcaccgacgcccgcgagggaaaatgcggggcccactcggcctcgcgcactttggtcggtaaagccttccgtcaaggattttagtggccagctacactccaggatgcccaggactgggtcaggtgatgcaaggcttgccagttctatgccaagcaaacccatcagttggcccaagctttgcaggtcatccccttctcttggtgttgacggtcattattgatcagtttcgaccgtcaatattaccaaaatagaagagaactagtgatgcttgcaatgcatatatctgttagaataataatattccactagtattaggtataataaccttttgcagagaatgacaataaagtggaggagaatcgacatcaacttagaccataaatcaatcggacgatatcaaaaaccagacttatgtatgaatgggccaaaaactcagtattgacacgacacactgggccaaaattcacaagtctatggagaggaacaccagaggaggtcactagccaacttgtgggctggttgggccagcccagggttcgggttcgaccgaaccaatgccaacgctgatggatgcagggtttcgagggaacggtagagattaactccctatggtggttggagggtattaccgacctttccaaccaccataaccatcattacctgcctatttaaggagttcactatcttcacttcaacacatacctcaagcaagagctctctcatttctctcaaatttagtttagtagtatctagctggtggaataggaatacaatagaaatcaggagtccggaagccttcggaagagttcgggtatggctctagtagctctcctttcctcttttgtaggctttttacttttattagaatactcttctatatacatttatggtattgaaatactttctgagtatatgagtacctactttacattatgttcatgttatactgaatatacagctagcttatctgggagatgctttggtgcgggtataatgtttgcatatgcaattactctatgtcatgacgatgatattagagtagtatctggtagtttaggcgtggtgtatagattacgggatatcattatttgggattatatactgcggatgagaggtggaccgctgatggtgacagctcagtatgggtattcctccacgccggtatataatcctaagttaattccctggggagggtattcccccgtatttagctccggttgtatggtcataacgggctgtcataaggaactcggcagtcaggggtggcttctcaaagtaccaggagggcatcggatagaggatattagctagtatatcggttaactagaatgtatgtacactatgtacattagaagtataggaatagattttctctctcttttctttccgcttagcttagataatatattatgagaatgagtagctagagcttgtgtgtcactctacccttggattatcttaacccctgcttagaatatgattatcacaactaatatataaattattagtcaagttctctctacatgatcttcccacgggataaaataaatacgatacccttggaatactctcgggtgaaatgctacaatggtatatccgtgcgcttgcggatgaactctgtaaccataaaataacagaagtatttctgcgctattgctgggaattatatttctagtaatgacgttaagaaataccaacaagcatttctggcgccgttgccagggaagattcataatagagattacctgcaataatactttatatttacctctgtataatcattttcctttgcatgctaacattggttgttttcacttttttttgtgaaaacagggtagtgcatgactggtttcaacttgccggaaaacttcaaagaaaatccagatgctttcttccggagcgtcaggccgcgagtcgctgctccgcagaaaactctatcgataaagaaaccagccgtaccagcgccatcgaactttaagactatggctaacaagactctctggcaccgaacgtgtgatggcttatcgaaataagcaccttggtttgatgtcaaggcgataacccgcaagactatcctcatacaaaataggaacaaagggcataatctcagtgtcattggagcaagcagaattcttcctagatgaagcgggtgcaggcgcatcataagagaacctgtcatgttctagaggtgacagccatatgcgaaacttcctgacagaatgctgacattttaactgggaaccatcatggacttggatctgctaagatttttctttatcttcgacatgcagcgtctcatctgtctgtttgacacgcagcacctcatcaagatcatacaggttttcgataacccgcttcgttggatcatagagacccaatttactccctgtgttgagcagaatccttccatccttcggatcaacagccatcggaaccacgacattagctccaagggaataaccaggccaacctttcagacacactctgtatgctctatcccattgaccatgctccatcttccaaatatccaattcctcttcaaacggattagcgagaacaacgcaaagcattccttcaagctctaccacaaatgattcgcaagggcttctgttgtgtcttgttagagcacacgaagggcactggatgacaacaaatgtcttggtcgcgatctcgaacgagagaatggcgcttgtcttactctggctcaaccttggctcactcatccagtacagaaatccagccaagtaagccggaggcatgtcattcacaggcagaggcgggctgtaaaaaatcacacgtgtgacgcgatttacaggtaaaaagcgagcatgttatgttgtaacgacaaggttttgaagtttcttcactgatagaaatgacatgcccctgcatcagtggatcgaaccccaggccgacattcttattaccggtagtaaaagcatgatcgtgacgaaatctatcactaggtattctatttggaatgtagacaagagcccctcgggtactgcggacatagcggtaacctgtacaagggttgtatagataatcctccagctcagtgcttatgagattcatcccatggcaaggcttggagcaaaccacctttgcatcaagccatgtatcttactaggagattcttgaagcaatttttctatgctggcaaaactaaaacctgatgatccacctgtgcccatgcccacaagcctgatctttggcctcctgtccctgttgttatacatgtggtatccacgagcgaagctccaactttcaataaatctatgccactgcttagagacaagtttgaactgcacggcataatcacccggaagccgtagtagggcctcctttatcaccttggcaaggggagatgacaatgctatctcttcattggttttacacacaggagcaagactgtcttcaaacaaactgatcagtccaagagcagaacgtgcagtttggtaaggcaaaggagttcccttgatctcaaggattgtttctagtgtttcagatgtaggatcataggcgatcgccttgcgattggatgtagcaatgattacattcttcttccctgacataccactactgccagcagaaccaataactctgataaatctggtttcattaaatctcgggcaacatgctccgtcgacaaatcgatgcgatgctccaatgaccaatcactggagtaaagatcattcagcttccaaatctccagcgtagacgacatgcgacgaaggtcccggaccatgcacaggttaccagagagatccaccaagtgcactcctgaaacctgaaagggcggtgacctgaccaatctgaatgtctcttctgtcacagagaaggataagatggcagcatgtggcctcaagaaagagaacaaagagccagtaagccagtgaagaaacccatccacaaacactggaagaagtttatgttgttgtgaagctgaaatagaataagttccagcagtgcggaatttgaaaggtacacctccactagctggtctccatgagtcaccatgcttgccccctagagtgtatatctgacacttggtatgcggttctccagaaattatctctcgaaacagcctaaccaccttgtactcccctgtccgggcatcgaatcccagtccagcagatccagatggcacggtttggcaaggtggcagacggctgatcgacctggttgccgcattgagaacgtagtactctagtcccatagcatcgtgcagaagggtgaggccatggcacggtgtaggcgtcatggccatgaaatcgccgcgcacattgtccagattgaagagcagatcacgatgattgtcaccgccggggactgaccgcgacagcggcgaggatgtgtgcaccgatgtggagccgaatcccgcggtctgcgagacgaagaacagcttgggtggcaacggcttgatcttgttcttggccgtgtggaaaccgcggaattggtcggaagagagagccgtggcccaggacctgcaaacggctcgaaaacgtaggacggattcgacgggtagccattggagcacctcaatcatcatctcttctggcagcactaccgttgcaccactggctggtgaaaccttcctcctcttgcagctcatcatcaccatggatacatcggctcaaattcgccaaaaaaaaaaagtacggcagaacgaagttgcttgtatatcaggacaaggaaggtaaatgttgagttctgaattaaacagggtcaatacatatagaaatataaattaattagccgaaaaggtccaatgcacaatacggtgagaatatataacggattgataataatttgatataggtgtattattagacgaaattagactcatacgggaaaggaacgaactcttctttgcatccaaattgcagatctaacgtggacatggaggttcagaaaaaagcttcaaccttccagacctagaacagaagcttgccctagaggtaaaccaaattcgagaacaggtgcgtgttgtgtagagagatgatcgatcgagatgctcaccaggatgctcctgctcgcgagattgatggagatcggcgcaggtggcgggcgaagttccctcgcgggccgacggggaggagagatactcgagggggagaggcacaatatttttcggcacagatgaatttgacacgttttgggctggtggccgaggcttgtaagttgtaacaccacacggtttcatcaaattttgcggcttgaaaagaaaaatctaaacatccaataagctttgctcactacagatttcatttttgcataaggcccatggggataggcatacgctcaaaaaatcaggattttgcatgcgttcagcccaaccacatgcgaaaaaaaaaaattttcatgcgggcgcttaagccaaccgcatgaaaatcaaaatattgtgaaaaaaataaaattctcaaaaagaagaaacctagccccgccgctgacggtctgccacagctggttgcctaatcccaaaccctagcccgcccatcggcctgccacctgtcgccgctcctgtcacgaccggaaataacccaacaggcattccatgcgtgcgtatattattccttgtcctagagagccgtggcccaggatcggcagacggctcgaaaacgtaggacggattcgacgggcagccactggagcacctcaatcattatctcttctggcagcactaccggtgcaccagcaccactggctggtgaaacctttcttctcttgcagctcatcatcaccatggttgtcaagctcaaattcgccgaaaaaaaagagagtacggcagaacgaagttgcttgtatatcaggacaaggaagttaaatgtcgagttctgaattaaacagggtcaatacatatatagaaatatagattagctgaaaaggtaccacaatacggtgagaatatataccggattattttgatataggtgtattattagacgaaattagtctcgtatgggaaaggaacgaactctttgcatccagattggaataaaccaagagcggatctaacgttccagacctacagcagaagcttgctaggggtaacgcaaatacgagaacaggtgcatattgtagagagatgatcaagatgctcacaaggatgcggcggaaggagcaggacggacgatctcgcgggatcgagggagatcggcgcaggtggcgggcgggcgacctcctccaggggaggctggaggcacaatgattttgggcacagttgaattgtgctaggaatctgatacgttcgggccttcgggggcttggggctggcggccggggctttcaagttttaacacgacacagggtctcatcaactcgcgagagctaattcgcgcgtgcgtgatagcggcacgcgtttaggccataaggcccacagcgctggctcgtacgcacgcagacggcgttcacgtccatattttttttttcgaaaaacctaaacctaacgtacgtgcctttttcgtttctctttgcctttttttctgcgatctttttattttagaagttgaatctttcatcttcaattttagttgaaagttttgaatttgagttaaaagtttttaagatttgagttgaatttttgaattttaagataaaagttttcaaatttgagttaaatgtttcgaattttcaaatgaatgtttttatatctgagttgaaagttttcaaatctttagttaaaagtttttaaatccgagttgaaagttttcaaatatttgacttgaattttttcaaatcgagatttgaaagtttcaaaatataagttgaattttttttaaaaaattggattaaaagtattcaaatcttgactttaaaattttcaaatctgagttaaaagtttttcaaaaatcttgacttaatgttttcaaatccgagtcgaaagtttttaaatctgagttgaaagttttcaaatttggattgaaagttttccaaatctgagtcgaaagtttttaaatctgggttgaaagtttcaaatccgggttgaaagttttccaaatctgagttaaaagttctatttatgtattattttatttaaaaaaactaatactaacaattatcattagcgctaattaacgtcatcaatgctaatcatgttattagcgttgaggagaggtggaattgggacgtgcgtggctgcgccagttaggcagctagcgcacccgcgcccattagcaagcccctcatcaacttgcggctgaaaagaaaaatataaacatccgatcagttctgctaaactttaacccgattaattataaccgatgcttctacttatatgtcccttcttccgcattgtctcctatcttctttttttttttacgactcacacgagacggtgcggttctactgatagagcagaaaaaaattacaagattacaaccttggaaggtcgtaaccaggaaaaaggaaaaatatataccaccacccacacaccgatagcgccaacacataggtccgggagaaggctgtaccggaccggctgccgctagccatgaccgaccgccgctaggccaacaaaggagcatagacgagatcgcacaaaaaacgcccttacaaccaatacaaagcccaactctatcttagagcgtgcttgcaccaatcgttcgagtggttttcagcaaggggatgcctaaatgacatctccaaggagagaagtgatggaaaaccaccgccgccatctgtcagggactcaaaagagccaagactgggctttcgcccgcaactacccttgagggatgagacggcacgacaatgcccttaggaggggggatgaaccattgttttcggtctggccaaggcggggctgggttttcacccgccgctcatcacctgcgagtccacggctgacccaccgatgatccaacaccgctcaacctctaccgacatgtgggaccactgcactggcgccccccgctagccagccttcttgcgccgaagaccgcgccacacccaccagtagctctccttgcatcgtggtcgcctcctttactaccgaccgcgcctcatcgcgccccgctggcctactcaaccaccagacgcgcgtctggcgctagtccggcctcccgccatcagtcgcgcctgtcgcaccaagccggcctgcaccgtcaccagacgcgcctttcgcaccagtccggcctcctaccatcggctgcgcctctctgcgccaagccggcctccgatggtcggagtccgacccttgctccaatcgctgtcgcgctggctaggtgcagccatctgccaagcccccagctagccgtctgagaccaccatgcctcccccagcagtcacggtcaccaccaccgtgcctccacccatcgcagccacagtagtcgctgctgctgacggccagccacctcgccgccgtctagccactagcgtcgttgccacagtagccggcagccgatgctaccgttggccagccacctgttgtcgccgctgtccagtcgctgccaccaccatcgccatgagcccgcgaactccgcagcgccgccaccactgcgggcttgcctcacaccagatctgcccgactccggcgcgactggatccggcccgctgtcaccatcctcgccgccggcttccatccccgccatcatctccatccccgctgccgtcggtccccatatattctccttcttcggctgcccgttgtcgccaccttcccgagtcgcgccggccctagaggtccctgccgtcgcaccgtcgctgacagccgcgccgtcctcctgccaggccaccagccaccatgaagccttgctggctcacccagccaccggcctcctggcaacaccgttggcgcgccgccaccagccagatccgccataaggggtggcaaatgggggccccgcctcaggatccgtggtcatcgccaccgcctccattgatccgcagccatgaagttcccaccgctgaagggacctcacagcgtcaaccgtcacgctcttgcgtcgccctacccccgggacggctccggaggcgacaagtccggccaccccttcccgctccttcttcctcctccacctcgccgctgcctgagcggtcgccagcaaagaccgtaaggatggcggcggcggggcttctcgccagcctgctccggtggccaggggagtcgccccggtggcggcggcggcgaccgctagatccgtgccgccccggcctgatctggcggggtggcggccggcggcagggacagtaatgtcagcaacgaagaaggggattgtctccaatcttcgctttgggataaaaaagaaatgagatttaaaatagcagaaatgttgatagagagcgcaacaattacctgggacagtctttcacacggatccgtcggcagggagcggcaggggttgctacatcggcccgatttggtctgtcgccgccgtctcccaaaaatgagtaaaggaggggactgaaagagcattattctagaaaccatcgctagcggactactactgggtggttctgtcccaaaataatcgggattaataaattggttgacacgtgtctcacgcttgttgataggaaatggattactttaagagcaaggtcaatagtgtagccaactactggctccaaaacatctatagccaatctaatagcccattcatcaatagttaactataaaaatatactgcaccattaatacacggtcccacctctcatacacacataatatcttggagtccgtgttgcaaccggctacaaatctgtagcccgctttcttctctctcttctcttttcttctcgatatatggttacagccggcttatagcctgctattgtacctgctctaaaaaactgtcacgcccggaatttctatccaaaattccaaatgcttatatgtgtgtaaaccctcgtccaggaatcagccgaggcacacaataacaaattgataatagagtacagttattactctaattattaagcgtataaaatatcattacagaggtagatagttcctctcaatcaataaagatctaagcagcggaaaaagataaacagcgcagacggctccactccacaggcagcttgaccagggctacacctaatcctccacaccatcagcttcactgtagaactcttcctctgatgaatgattgcaagatgagtatatgacatactcagcaagccacgcagcaaatatgcaagtgcacaggataacaaaggatggcataatagggtttcatttgcaaaagcagcatttagcaaacatttgagaatttaataaaacagttaagtaattaaacaatattaatccaacgctatacaacataccctgttgcataggcccaaccattctgaacaaccatcccggctgcacagttctatctccaaaccaggaatataccattccaaaccaggagctaatcaaattttaccagttatagcatcttctattatggtgagaagggtgagactaatcacgaaagacattgttagacccgcccataaccgcgggcacggctattcgaatagttttactctgatcagaggtgtaccactgtacccacaagacacaaccccacatcatgtcaccatgtgcctcaataccaccacggtacctcggaaaggagttgtgacaataccccttgcacaacacaatccactacagcgcacctttcctggatcataatcacccccttataaacaaggcatggactccccagcgacccccgtgggcttatctccgccacttctcagtctggtgccccgcaatgaaccatgctatacaaaagataaagccgttgcccatgctggcttgtggttggcacggttaatgtttcacaaccgaaactcgtgaaccggtccttaattgtcatgagcacgaccatcaaaaccatgtgctcacaacccaccattaccaggttttagttggcacattaattaattaactaatcacgattgaccatcgtgaactatcattaagccatcattaaataaagtgagtcataagttatcccaatagtgagctaatgtttctaagcagggctaagcaattatatctaatatctagttgaaccaatacataaagctcaactagtcaagttataataacccaaggtatcaaggaataaagtaatcaagaacaaaagggctataacaaacaataggttaattccacccaatggcattcgaaaataaatgcaatagttgaatagaaacaatagctttaaataggatcaacatgctcaaagggttgtttgggatctgtgtgacttgccttgctggccttggaactcttcaaattcttctccggcgaaaacggactctccggaaacgacggaatctaagcagaaaagaacaaaatcaccaaaacagcacataaacaagcatgaacagtacatgtggatatttttaatgtgtagatctcaattttagaaaaatttagagacttgaaccaactaaatcggagctaagatgaattagttatgaatttttaaagattaaatcggattaaaacacttaaatcggtttaaattgaattatgacgcaataatgaattatttttgaaaaggaaaagaaggtttattgcgtcagcgggctagggtttgcggtggaccgggcgcacgggcggcggttcacgcgaacggacggccgagattcgatccaatccaaacggacggccgagatcgatcgggtccacggcggctcacggcggacgaccccgatgacgtcggcaatgacgtcaccgacggcggcggcggctcggcggggcagacggctcgggcggcgcacgctcgccggcgaacggcggcgcgaggacgaaaacggaaagcaccaggacgaagcgggcggcacgggaactcaccggcgaccaaaacgacggcggaagatcaacggacggcgacggcgacgaggaggaagcggcgaagctcttcgggtcgacgacggcgatgacgctccggcggtcttcggcggtggcgaaggggaggacgaggacggcgacgcgacggcgaacacgacgtcggccttcccgagcgacggcgacggctggagcgacggcggcgcacgactggagcgacggtgacgacggcggcgctagggcacacggtgctagagcttttccggcgacaagaggcgaaggcgagggtggcggcgggtagaggagacaccggggagccttttaaagggactcggaggcggcggcgaaggcccacggcgacggcaacggcgaaggaaagctcggcttggagagagagagcccgatccgattcgaactcgaatccctcgatttccaaaccgatttagccgatgattccataggagaaaaggtagaggagatcccggagattgtttcccctcaatcaatttcaccggaaacggaaaagaacggccggatttggaaaggaacggcggcggcagctcggcggcggcgcgctagggtttcggcccgaggaagatgacgggcctgacaggtgggacccacctgtcagcgatcgaacgcgcgcgcgcgcgcgggcggctgcgaactgggccgacttgggccggggagagagagagaaggttttgggccgactttcggcccaaagccaaaagagaactttttaaaacctttttcaatttaaattatttcttaaatgcaattccatttattaaaaatacttccttagctcaaataaatcccagaaaaatcttggaattatagaattaagcaaagtatttaatgaaattttatctggccccattttatattggaatttattaattaaaattagatcttcttttcaagacttttaaaattattttctagaaattccatttaaacaacaatttatataatttgaatttttagggtgtgacaaaaacgctgctcaattctaatttacagatcgacacgtgtctcgttcgtttgttacttcctccgtttcaggaaagtcaaataacctgaaacggaggcagtagtaaatagattactggctatagggggttttcagttgcaatatattcgtagtaatccatttacaaacgaatctaatagccgatacgcacggtcacgagagtacggtttgttgcaacgtgggacctagtgcatcgtggcaacatggtgtctgttggtatttcttaacgacattactaaaaatataattcccagcaatggcgcataaatactcatgttatattatggttatagagttcacccacaaacgcacggatataccattgtaccatttcacccgagagtattctaagagtatcatatttattttatcccgtgggaagatcatgtagaaagaaattgactaataatttatatattacttgtgataatcatatcctaagcaggagttaagataatccaagggtagagtgacacacaagctgtagctactcattctcatactaaattatataagctaagtggaaagaaaagagaaagataatctactcctatacttctagtatacatagtatacatacattctagttttctgatatactagctaataccctctatccaatgccctcctggtacttcgaaaagccacccctgactgctgagtttcttatgacagcccgtcatgaccatacaaccggggctaaatacgtaggagtaccctccccagggaattaacgtagtattatatacacgcgcggaggaatacccgtactgagctgtcaccatcagcggcccacatctcatccgcagcatataaccccaaataatgatatcccgtaatctagacaccacgtctaaactaccggatactactctaatatcatcgtcacgacatagagtaattgcatatgcaaacattatacccgcaccaaagcatgtcctagataagctagcagtatattcagtataacacgaacataatgtaaagttgtcattaatatactcggaaagtatttcaataccataaatgtataaagaagagtattctaaataaagtacaaggcttacaaaagaggaaaggaaagctactagagccatacccgaactcttcagaagacttccaaactccttatttctactctattcctattccactagtttaagaacactaaactaacttgagagaatataagagagctcttgcttgaagtgtgtgagtgaagtaagaagaggagctccttttatagctgaactatgacggttgtgatggttacaatggtcggtaataccctccaactgtcattggggcttcatctcaaccgtccagtcaaaacctgcatccaacggtggcatggtgggttcggccgaaccagggaccggcccaatccagcccaatttcggctggcggcctccttcgttgttctcctttgcagacttatgaattttggcccaatccagaatgtcaactttgaattcttggcccattcatgcataagtttgattctcgacatcgtccgattgatttatcgtttgagttgatgccgattctcctttacttaatgtttattctctgtaaaaggttagtaaacctaatactagtggaatattattattctaacatatttatgcattgcaagcatcactagttcttctctatttaggtaatattgatagtcgaaactgattgataacgactgtcaatagtgccttgtccataagaacatgggtacgcgtgtcctacgtggacacaattaggcgctcagaatattaggaggtgttgtgcttctaataatatctctaataaattcatgctatctctaaaaattgtgaaataaatcttgttaaactctaagggaacatactctatactgcagtgaccttgttaaactctaagggaatacactctatactgcagtgacccgaaacttaaaaaaacttgattctaaactgcataaaaa

SEQ ID NO: 28487 - DNA, 3873 bp, Oryza sativa
cggagaaggaaaggaacggccgaatttggaaaggaacggcggtggcggcgtgctagggtttcggcccgaggaagacgacgggcctgacaggtggaccccacctgtcagcggcagcgagggcgcgcgcgcgggcggctgcgaactgggccggctgggccgaggagagagagaaagcggttttgggccgactttcggcccaaagccaaaagaggactttttaaaacctttttcaatttaaattatttcttaaatgcaattccatttattaaaaatacttccttagctcaaataaatcccagaaaaatctaggaattatagaattaagcaaagtatttaatgaaattttatctggccccattttatattggaatttattaattaaaattagatcttcttttcaagacttttaaaattattttctagaaattccatttaaacaacaatttatataatttgaatttttagggtgtgacaaacccctttaaaggctccccggtgtctcctctacccgccgccaccctcgccttctcctctcgtcgtcggaaacgccctagcgccgtgtgccctagcgtcgccgtcgccgccgtcgctcccgccgtgcgccgccgtcgttctcgtcgtcgccgtcgctcgggaagaccgccgttgtggtcgccaagtcatcgccgtcctcgtccgccccttcgccgtcgttgtagaccgccggagcaccgtcgccgtcgtcaagctgaagagctccgccgtttcaacctcatcgccgtcgccgtccgttggtcttccgccgctcctttggtcatcggtgagttcgccgcgtcgcgctctacccgttggtgtcctccgttcgtgccgaagcgccgccgttcgccggtgagcttgcgccgtccgagctgtcgagccgccgccgccggtggtgatgtcatcaccgacgtcatcgtcgccctctcccgtgagccggtcgtagaccgatcgatctcggccgtctgttttggatggatcgatctcggccgtccgttcgcgtgaactgccgccgtgcgcccggtccaccgaaaccctagcctgctgacgcaataaatccctttttccttttcaaaaataattcattattgcgtcataattcaattaaaatcaatataagtgttttaatctgattaaatcttcaaaaattcataactaattcatcttagctccgatttagttggttcaagtctctaaatttttctaaaattgagatctacatattaaaaatatccacatgtactgttcatgcttatttatgtgctgttttggtgattttgctcttttctgcttagattccgtcgtttccggagagtccgttttcgccggagaagagtttgaagagttccaaggccagcaaggcaagtcacacagatcccaaacaaccctttgagcatgttgatcccgtttaaagctattgtttcttttcaactattgcatttattttcgaatgtcattgggtggatttaacctattgtttgatatagccctttttgttattggttcctttattccttgataccttgggttattataatttgactagttgaactttatatatattggttcaactagatattagatataatagcttagccctacttagaaacattagttcactattgggataacttatgactcactattatttaatgatggcttaatgatagttcacgatggacaatcgtgattggttaattaattaatatgccaactaaaacctggtaatggtgggttgtgagcacatggttttgatggtcgtgctcatgacaattaaggaccggttcacgagtttcggttgtgaaacattaaccgtgccaaccacaagccagcatgggcaacggctttatcttttgtatagcatggttcattgcggggcaccagactgagaagtggcggagataagcccacgggggtcgctggggagtccatgccttgtttataaggtggtgattatgatccacgaaaggtgcgctgcggtggaattgtgttatgcaaggggtattgtcacagctcctttccgaggtaccgtggtggtattgaggcacatggtgacatgatgtggggctgtgtcttgtgggtacagtagtacacctctaatcagagtaaaactattcgaatagccgtgcccgcggttatggacgggtctaacaatgtctttcgtgattagtctcacacctctcacaataatttgatgctataattggtaataatttgattagctcctggtttggaatggtacattcctggtttggagatagaactgtgcagccgggatggttgttcagaatggatgggcctatacaacagggtatgttgtatagcgttggattaatattgtttaattattacttaactgttttattaaattctgaaatgtttgctaaatgctgcttttgcaaatgaaaccctactatgccatcctttgttatcctgtgcacttgcatatttgctgcgtggcttgctgagtatgtcatatactcaccttgcaatcattcatcagaggaagagttctacaatgaggctgatggtgtggaggattaggtgtagccttggtcaagctccctgtggagtggagccgtctgcgccgtttatcttttttttccgctgcttagatctttattgtttgagaggaactatctacctctgtaatgacattttcttcgcttattaattagagtaataattgtatcctattatcaatttgttattgtgtgcctcggctgattcctggacgagggttcacacatatgtaagcgtttggaattttggatagaaattccgggcgtgacaccttacattggcagtacccgctccatgaacttacatcctcatgcactctaagcgtcataagtttctagcacagagaggagttctggcactcccgagggggaaactcacgcaagcctaacattgcatcctgtagttgaacccaatccatgctgtcctcttttgggtatctccttgtagtcttgtaatcttgacaagtcagtctctggccatccatatcaggtatccgccatttggccatccgtatcgggtatcagccagcaaactgcttgttcgtccacacacctaagtgaaaccactatgtagggatactgcctccgctcgcctatctactccgctaggtctatacccattcgagaagtacggttgtactggggtcgtttcatgcttaacttcatggctcgatccttaactgatcagggacggcactagcctttactggacaccacccaagccctccagccgccctagtcgaaaacatttgttcagtttaattttctttcacatatcatctcatcattatcatggcaatgtggcgctcatgtctccacatgctgtatgtcaattaccttccctaagataattgcccaagcataaagcattttgacaaatatgaatatgcatggatcaaaattagcatgggctaagcatttgtcaaatattgactaaagacacacgatatcatggattacaaagattatatggataatcaatatcaaaggtatggcatataacaaggtaggacattcacatataaatagcatgcaaactttatttaaatcaaaataagttcgcaataagtccaacatgctcaaagattagtgatgacttgccttgctcgcagatttgctgacccggatcttcgattaactcagcaactccttcggaatctaaatttacgtgcgaaagatttgatttgaattcaattagaattcaaataaaatcaccaaaaattcaaaaattacaaattaaatcgagaaagtggtaccaacagttagatcttgattttagataaatttaggttcaagtttcattcgaatccgagttaaaatgagtgagttatgcaag

SEQ ID NO: 28488 - DNA, 4462 bp, Oryza sativa
ggcgaattcgagctcggtacccagtttaattctctttcacatatcatctcatcattatcatggcaatgtggcgctcatgtctccacatgctgtatgtcaattaccttccctaagataattgcccaagcataaagcattttgacaaatatgaatatgcatggatcaaaattagcatgggctaagcatttgtcaaatattgactaaagacacacgatatcatggattacaaagactatatggatcatcaatatcaaaggtatggcatataacaaggtaggacattcacatataaatagcatgcaaactttatttaaatcaaaataagttcgcaataagtccaacatgctcaaagattagtgatgacttgccttgctcgcagatttgctgacccggatcttcgattaactcagcaactccttcggaatctaaatttacgtgcgaaagatttgatttgaattcaattagaattcaaataaaatcaccaaaaattcaaaaattacaaattaaatcgagaaagtggtaccaacagttagatcttgattttagataaatttaggttcaagtttcattcgaatccgagttaaaatgagtgagttatgcaagtttaaagattcaaatttgaattaattccaataattgtgaaatgttactattcataattgatttatttttattccagcattaaccgtatgtggtagtgactgacaggtgggtccattcttatttccttttctttatcttattctttcaaaggaaatgagatgtgctattgacaggtgggtccggcccctttttgactgtggttaagccggccatataatctccggtgggtcccgcctgtcattgtaacaaaatctataattaagtttacttagattttaataatagggaccccacatgtcattgagtgggttaatcaccattaggtggaggattactgtgcgcaaactagatgtgggccccacacggtttctctctctcgtccctttctttttcccgtcgtcttctacctctcgccaggcagaggcagccgcgccatgcgcctagcgcgcatgccgggacggtgcgaggccggcacagcagcagccggggaggatgaggcgaatctccagcgacctcccgccggcaacaacggtgcagtacggcgcgggggcgagcggcgcggcatggccgccatggccgagctccggggtgcaaggggacagggcggtagggctaggttccacccaaatagatgggtgcgcaagcttctacagtgtatggtggttccgtttttctaacaagatggaaggggaagcctccgggatagcatgtccacggggacatcgccggcggcggaacagcagccgggccggcacggccatgggtgctaatattagggtagaggacgctaaggtgggatggcgagtcggcgaaacgcggcgtcgcggtggggaggcggtaaggaagcagaggatgccgacggcggcgagcgcacaggcgttcgacagcaggtcctcgggctccagcggcacccggcgttgatcgaaggcatcagcagcaacagaggcggcccgagccacggttcccgcggtcagctacgccggcttcggctacgcatgcacctaaggtgttcgatgaaatgtatttgaggaagaaggtagagagggatgggtttttttttatgggggtttggcttggggataagccataatggcatggaggataaggtcgacgacaggcgcgctcgatggctgtctacggcctaggtttagggaggttgacgcggctaagctttcctccacctatgattcgggttcaatgcatcgatcgggcatgattgcctatgcgatagccgatagggtttcagaagagggagtactagctggggaagaaacatcgcattatccaacggtctcagctaggggcgacgagatggcaatgcgatggcgacatgattagcggcgacgggcagtggtaacgaccgccgatacagaggtgcaggctattttctagggtgacgcggaacaacgtggcggccgttatccctcagctcgttggcgactcgcgatgagacgggacgacgcaggcgcttgtggtgacgcggcctttgtgcgggatttcggcggctcggtcggtcggcggtcccacgcgggcgtggcacggcacacggcgcggcgcacggtgcaaggtgaccaggagggcgcaccggtcgtgcgcgacacgttcgcggctcggaggtgtggcgttgtgtgtgcggcttgggctagggctctggtcgagcacctggcggcctaggaacagtggcggctgggaaaaagagagaaaaggaagaaaagggaataggaaaagatggaggggccaaactgcacaatgtcttggattggaattctgaattgagatgtaacctatacattttgggtttaagaattcaaatatttgatttgaatatttatttatttattcattcatcatttcccaaaatgaaattggctttactttatatcatcctaaattcatcctatataactcgaaggctttgatatttctaaagttaattaaaatattctaatgtgacctttaataatacattagcacatcggtcgagtttatttgtatggcaatgtattgcattttgatatgtttaatctattcaattcctattccatgaaggcactgtgagacttggtgcaatatcagtctaaatattgaatcgagtactcatataagcctttttatatatagaactcaatttatttacatactaattattttatgtgagtgaaatttattccatgagagcctcaaggcaagttatacatatcaacttaattattagggtcgttgtagtggtgactatttcatatgtacttagatgtcacagacacttatcacatggctccaatatttaatatttaacctataaattaaattagtaattaacattctctttgtattgctttgttgtgttgtgtgtaaatatttgtagggttcacaataaataccataattttataactattacttagttgtatagctttagcttaattttcatttgtgacaatttatagtttggcaagcaataacaaccataacatccatcatgatgcacaacaaaagaaccaataacattggcaatgcaatttatttaaaagtttttgaaagtactcaacttcgggtttcattttattggtcgaattttcagggtgttacaatgagcaaccgctggacccactattggtggggagggaggaggagagaagtgcggcaaaggaggagcgggtggtggtggatcttttttttttttgaaactgagaccattagcccggctttttatagaaagccaaacacggcatcgttatggggatacccattttacatcacgcacagaaaaggtccagaattaacaccattagggggggataaaaactgaacagcattaacaggaaccaaaacaactctaagacggtcttaacatcaaaactctcaagctaagtaaacgactaagaactaaaaacttcagacgatcagccaactccagatcttggttgtctcagagttgaagtagcatccatgagcttccgagtaatcttgtcaaaattctcagcgtccttgctgctaaggattctcccgagctgcaaaaatgaattgatttggaacattaatgataggggtgagtagactaatttttctctaaaaatcatgttgttcctagtggaccacagcacccagcaaactgcagcaagtagggacaaaagaactctcagatcatccccacccaaagagccattgatcaggtagaaatcctcaaaagacctaggtataatactcgagtcaaaagcatctctgcatatgcaccaaactaaagaggccattgggcattggaaaagaatgtgatcagtggtttcaagcatcccacaaagaacacaaaactcagaacccttccacccatttttcttcagctgttcagtagattgaatcctgtttttcaaagcaagcgacagaaagtgtttaattttttcaaggcagggacatttccacacaccctgcattctagtgttagtcactcctctaaagagaattgctcgatacatggatttagaggtgtaagttttattcttattaagcccccaaagaaacacatctgggccatcagacaactcaatagagttaatgatatccacaatagctagccattcctcagattctctctccccaaaagaccttctaaaagtgagagcattagcatttgcagtgacctcagcaactaagatgttttgttgattgcaaatctcaaaaattcttgcgaagcaaattttcatggggcatgtgccatgccacacatcatgccagaaccagatatggtcacccttccccaaagcccattctgaaccaagtttcaaccatttcctaatgttcataatccccttccagaactgggagccagaatctgaacattggaaaactctagaattcctcaaat

SEQ ID NO: 28489 - DNA, 579 bp, Oryza sativa
cgacgatttttcttttgcatgggagaaccacttgacgcttaggctcatcaggccctctgcccttctttcctttgctagacatgtccttcacgaaaaagacttgcgttacatcattggcaaggacaaaaggttcgtccgagtatccaaccttgttaaggtcaacagttgtcatcccactgtcatcaatcattacgcctccaccagtcaacctaacccattggcaccggaacagaggaaccttgagaggaccatagtcaagttcccgtatgtcctcgatggcaccgtaatacgtggcagttgttccatcgtgtcccatggcatcgacacaaacagcgctgttttggttcgtgctcttcatgtcttgggctctcgtgtagaatgtgtacccattgatctcatatccctggaatgtcgcgatcgaccaagacggtcccctcgccaggaaggcaagttgttggttgatcgactcgttacccatgagatgttgtcgtagccacgcggggaaagtatcaatgtgatgccgtgtaatccatgcatcggacttaccgatgttcttggcgcgaactagagccaagtgct

SEQ ID NO: 28490 - DNA, 561 bp, Oryza sativa
ctgcagggacccgcatctctatggtgggaccatttccaggctacgcagccagaggggcaacctattacttgggctcgcttcaccgccgctttccgaaggacccatgtgcccgctggagtcgtggcacttaagaaaagagaattccgagagttgaagcaaggcaaccgctccgtgatggagtatttgcacgagttcaacaacttggcccgttacgccccagaggatgtgcgggaagatgaggagaagcaagagaagttcttggcaggaatggaccctgagctgtccgtccgtctagtctctggggattatccggattttcaacgactggtggacaagagcatccgcttggaagccaagcacaaggaactggagtcgcacaagcgccgcttggcaaatttccgcaatcagcagggtgctaaccaaagggtccgctacaccaatccctatccagggggatcctcctcgcgcagcagcaacaacagcagcagcaacctcgctccgcgcctcgacctcaattcgtggtgcgcgtcccacagccgcagcagcagcagaatcagcaag

SEQ ID NO: 28491 - DNA, 4111 bp, Oryza sativa
tccccgacctcccaagacgacgccggtatccacgacgccggcaactgcaccgccgaccaggtacgacgcccccctcatcctgaacatgatatgatgaatggatgaattgcagtttggttggatgacttgcttgaattgaatggatgaattgcatgattgatgaaatatatgaggtgatgaatttgcactgtttgtggatgaaatatatgcactgtttttagtctttttgtattagatgattttaggattaattttggccttggtatatggaatatatagccagggttaattttggccttgattaattttggccctggtgattaattttgtggatgaaatatatgctactgctgttatatggccctgctactgctctgctgtttatgtttctgttgtttctgtttatgtttctgttgttgtttatggccctgctactgctgttatatggccctgctactgctctgatgtttaattttggccctggtgattaattttgtggatgaaatatatgctactgctgttatatggccctgctacagtgctactgctctgctgtttattaattttgtggattaaaaataatgactctgctgttatatggccctgctactgctcttattgtgcctacttgttctttttttttatctacaattgtttatatacatgatttatataccactgctgttgttgcccctgtacttcttattaaatggccaatgatgaattgctcaataaaattctatctatacctgttcttttctttatggataagaacagactatctacacttgttgatttatatacccttgctgtcaaggatgaatttccctctgctgttgctgtttatgtgaatttccccctgttgttgctgtttacgtgaatttccccctactgttgctacccctgtggcatatatacccctactgctgttatatggccatgctactactcttattgtgcctacttgttcatttttttatctacaataatatatgcatgatttatataccactgctgttgttgcccctgtacttcttgttaaatggtcaaggatgaattgcttaataacattctatctatacctgttcttttctttatggataagaacagattatctacacttgttgatttatatacccttgctgtctatgtgaatttccctctgctgttgctgtttatgtgaatttccaccctgctgttgctgtttatgtgaatctccccctgctgttgctgcccctgtggcatatatacccctactgctgttatatggccctgctactgctcttattgctactattatatggccatgctgttgctactgctctaatttcctgcacttgctcttttctttatggataagaacagatgaactacacttgttctattttatggataagaacagatgaactacacttgttctattttctttgggttgctttttcctcctagtagctgatttcctctttttatcccttcatgcaaatgattataattgatgcatatttctgagcaaaactgaggccatatctttcatagtataccccgtattacattggatctaatgctatttagtataatggtaggaaatttataagctttttcgcgaaaattagaccatgtcaacgcccggcgcaaacccgctctccccaatacctgcgaggatccaggaagaagcaaacccagccacggagacagttgccgaaggtcatcccgcgacaacggcggtccaacaacccaaaattcatggtaatttataggataaattttcaccacatgaccacataaattttagctagcaccccttagcaaatattgccttctgtttgtgctgcagaattgccacaggaacaacatacatcgatgtcgggcgggacaagtgcaagtaggtctagtagaaatccctagtcacaaaatatatggccgaccatagtgcaagttataagagaggttgacgctagtggtaggcccaccgcgcccatgactgtcattggaagatggtctaactgctgcgggctagaggcacgtaagaacttccggatcctccataaaaatatcgggaagggcacagaagccgagaaagagcgagcttggacgggaatggagaaatggttcacatttccggctgaagcaaaggataggctcaagcggaaggcattccaaaagatggcaaaagcttggaagaattggaagtcgaagctcttcaccgagtttgtcaacctgcccgacaatcatacgccgttcgatgaataccctcaaataaccgaagcggtgtgggaggaattctgctctctcaagacctcccaagagtttagggaatcaagcgaggcacatcgcctactacaacagcggaatgagcacccgcatcggctgggcaccgcagggtacatcggcaaggaggcaatatgggcccaagaagatgcagccgctgcagcagcgaatgtccctgccccgttttcagacatccctgaacaaagagctcgcaactgggtgcgggcaaggggtaaggtcaacccggacggctctgtcacatttgagaacaaaagtgatgccgtcgtctatcaggaactggtgagttcactacttaacctaactaatttccgctcgtataaagtacaagttcgtataaacgactattttcttttctagttgggcttggttgctgaacaagcttcacaaagcgaggttgagtccgcgccgaagaggcgcgaagatgacatcctcacaaaggcacttggaaccaaagaacatcctggccgaactcggggaattggtagcgatgtgccctggaagcatggactctctcagtacagctcccaatacaggaaatgaaaagtctccaaggaagagagggatgctcgtttgaaggccgaacataaggttgaggtcattcaagaactagaagctagcatgaatgcaagggtggaagaaagggttaacaaggtcctcgccgacatgaatataccccgtcacaacacctgctgtgcaaccaactcctcgtgcacaacacgacgcgagtccgtcacagcataggagtagttgtgcatccacagaggtgccggcccctggtcttccgatcgcaccactagctgcagtggaccacatcgaggtaattgttgttatccgatccatatctaataaaagacatttacacgttccaatattaaattcaaactttcaccttatgcagggcgcagcacagtgtgtcctactagcgagagtccacccaactttcgctcctgaagtcgctgagggcatggctttcaagccctcggttacagacaaggtccacggcgcagacctactagctgggtatgccaaggtgtccatcgatatagtaaaggacacctggtcaggctatccgctgcccgtgcccccaaatgatgaaatcatgactttaggcgatgcgcgcaagacgttcatacaatggcccaaagaagacatagttgtgaagatgactcctcgtccaagtcgaccgacggagtttacacctcccaagtttaagctatcaattgaggctccccgtggaccggcattgtcagtacctcattctcctggtggagctgatatggacttggcagatatagctcaaagcttggctccaataaagaccacaagaaaggccgatagctccccaccacttgtcaagggccagaagcgtgaacacggcaaggggaaggtcggggagttggcgccggagccaaaaagagacaaggctgcgacgtcgatgccaaaaaggggcaaggctgcgccagctcaatttgagctaggcatgccattggtggaggacaatgtgttagccgtgatgggtattgcttgccgagagctacataaacaatacatggagctaagcaatgccaagcggaaaatgagggagtcatccatagttagacatcacgaccaccagccgttcctatcgtcgcctgcctatataactataggctttgatgacctcttcgaccttttcaggatccggaagttggacactggtcttctaaaatgctactccttgtaagtgcataccttctatacttgtgatatgattggactatatctcctaattaaattagttctaatacgtaaatgttttaaggttgtgttggatcgagagtcg

SEQ ID NO: 28492 - DNA, 1054 bp, Oryza sativa
tttttgaagttaaggtttttagtactaacactacataaccactgcgcaggcgacatggattctcctagtcatcgtacctaagtggagtagggttacctaccttaactccaataagtccaaagattatgatttcagtgaaatcaccaaggccttaaatatggcttggggcccatatgtggaaaagggtggtaggcacaagaagggcaaggacgaactttatcatgacaccaagtttgcatgcgcacaacagatcggagaccaatgtggtttccacgtgtgccacaacatgttaacacttctaagagaggtgaaagatttcgacccttaggttgttgctaatggcgaataagctcatttcaatacctacattgctattgaaaacgtgctaattaacctcttatttattaaacagaaaggtagagctggcttcaagatctcacccatcaaccctcccgctatcagaggcgaagtgtgcgccttcattcttgcagaaataatgaacaagaaaggacgttttcatgtcaaatagactcatgaacttggctagataatttattgtgatgtaaaaagatgtttttataatttcttgcgatgtaaaaaattatgtttttatggagtgcaatgtaatttactttcatatgtgcaatatttatggtagtttactaaattgtcatcacatttgatcaactacgatttacgttgtactattcatctgttttctccttttttttcccttattgataggttgtggaggtcgagtacattatggctttaatccatttggtaagtatatatgcggttctatgagcaacgaccgaaattgtggctttcaaggggtgtgaatttgctgtgcaaatttgtggcatttgaactgcatatatgtgttgttggggatctgtgatgtttgagatggatctgtgatgttatattgggggggtgatgtatctgtgactagaatatatctgtaatgtatctgtgtttcagagggcatggctagcaaatcctaagactagccaatatttagcatttatttatttcttctgaaattaactca

SEQ ID NO: 28493 - DNA, 7037 bp, Oryza sativa
ccaagataccacattatcattcactaattaacaagatgctacatcatcatccattaacaatcatcacatttaaacatcatgcaaacatgctatatctttatagtttttataatttaacagcttttcaactacaaacatgttaaattatcatccaacatcattcacataatgtttcaatgtatatctttttatgttttatgatatcctatatacttatatagttcatcctcacttagtgattaaatgattaatctatggtccaaattatctttttccttttttcctctaattaagtcatatcacatcaattgtttttagcctttagatgattatacggtccaaattatctccctacttttcttcttccataaagtcataccaacttactttttacgtttgaatcaccaatctatatactaattaaatttaaattatcataaaccacattaatttacttaatctgatgttatctatctatctacatgttatttttttaaagttatcataccgaattcccgcagcaaatgcgcgaggttttatctagttaatatagcacctagccaccaagtgtccatagcctcgctacaacaaaacaacccaacggagacattttatttgtaggatagagacgtgacgttttatttcgtctcccacagataactgaggcgcttttataaagcatagtaggaatgtcaatgtttgcaccgtctcaaaattatggagacgctttttaaagcgtacctacattatataagacgttgctagagacgtgtaaattgcatatctataaaatatagaaacgcttttatacaagcattaatataggcacatacgtcttaatatatttgatattgaatatttaacgctttcatccgggctcgcacacagcacctacgggttgcaaagttcaggcactaaccaagtcattgacgtgaacaatcttgaaggtaaatacacttttttttttatattgcaactcttcaaacatgcgtcctgtagcagatactcttctttttaatctgagactggatattaaatattcaagtttttttgtccaaataaatataatattattataatggtatttgatgatgacgattaggatcagtgtgtttgttttcgtctttctctatataaataattatatattggctaataacgatgacacgcatataataaaaacgtctcaaaactcatctgtacagatgagacgttccaaaacgtctcaatattcatctctaaacgatttaattttgtgctaacctgtaaagcgtcttaaactatgtcctcaacaaataaagcgtctcaaacatcgtccctatttcaacattaaacaatggttctgttgtagtatatcctctccttgcgtatgtacactacatggttacattatggtgcccttctttatttaaaggattgtcgggttatatagtccaaatctaactccactccctgcgacatattccaactccaagtccaactcctagtagaactagtatcttcgacaaatattctaacaaagtccagcttcgaatatatgatacctagaagcagtagaattaccataccgatccatcggtcctccaaacttgaattgtcttcatttgaatcttcactgtaagccacccgatgagcctacaccaaactcaccgtcattaagagactccaccttaactcaaccttctctcgactccacctttccaccttctttcctatcattaaagtcgtattgcaaagcgaaaatggactactccttagctgaacaccctagactcctcgaagactgtcagggttatggataaggtataccctctacccttggatgtacgctatacggcaatacggtatatcggcgcgtgtacggacgttctctgaatacgttaaggaaattcatttcgaagtccaccaatggaaaggttcctacccatataggactgggtcgcactatatcgtgtagggtccgatgtctccgagtcctacttggagacctcctgacctgcgatataaaagggaccctccgggaagacctagggcatcgaatctcatagccaacatgtcacaccctaaaaattcaaattatataaattgttgtttaaatggaatttctagaaaataattttaaaagtcttgaaaagaagatctaattttaattaataaattccaatataaaatggggccagataaaatttcattaaatactttgcttaattctataattcctagatttttctgggatttatttgagctaaggaagtatttttaataaatggaattgcatttaagaaataatttaaattgaaaaaggttttaaaaagtcctcttttggctttgggccgaaagtcggcccaaaaccgctttctctctctcctcggcccagccggcccagttcgcagccgcccgcgcgcgcgccctcgctgccgctgacaggtggggtccacctgtcaggcccgtcgtcttcctcgggccgaaaccctagcacgccgccaccgccgttcctttccaaattcggccgttcctttccttctccggccgagtcaatagaggggaaatgatcctcgggatctcctctaccttttctcctttggaatcatcggctaaatcggtttggaaatcgagggattcgagttcgaatcggatcgggctctctctctccaagccgagctttccttcgccgttgccgtcgccgtgggccttcgccgccgcctccgagtccctttaaaaggctccccgtggtctcctctacccgtcgccaccctcgccttcgcctctcgtcgccggaagagctctagcgccgtgtgccctagcgccgccgtcgtcgccgccgctccagccgtgctccgccgccgttccagacgtcgccgtcgctcgggaaggacgtcatcgtggtcgccgttgcgtcgccgtcctcgtccgccccttcgccgccgccgaagatcgccggagcatcatcgccgtcgtcgacccgaagagcttcgccgcttcctcctcgtcgccgtcgccgtccgttgaccttccgccgccgttgtggtcaccggtgagttcgccgcgtcgtcctctacgtgctggtgccttccgtttgcgtcctcgcgccgtcgttcgccagcgagcgtttgcgtcctcgcgccgtctgctccgccgagccgccgccgccgtcggtgacgtcattgccgacgtcatcgaggtcgtccgctgtgagccgccgtggacccgatcgatctcggccgtccatcttagatcggttcgatctcggccgtccgttcgcgtgaaccgccgccgtgcgcccggtccaccgcaaaccctagcccgctgacgcaataaaccttcttttccttttcaaaaataattcattattgcgtcataattcaattttaaccgatataagtgttttaatccgatttaatctttaaaaattcataactaattcatcttagctccgatttagttggttcaagtctctaattttttctaaaattgagatctacatgttaaaaatatccacatgtactgttcatgcttgtttatgtgctgttttggtgattttgttcttttctgcttagattccgtcgtttccggagagtccgttttcgccggagaagagtttgaagagttccaaggccagcaaggcaagtcacacagatcccaaacaaccctttgagcatgttgatcctatttaaagctattgtttctattcaaatattgcatttattttcgaatgtcattgggtggaattaacctattgtttgttatagcccttttgttcttgattactttattccttgataccttgggttattataacttgactagttgggctttatttattggttcaactagatattagatataattgctcagccctgcttagaaacattagcacactattgggataacttatgactcactttatttaatgatggcttaatgatagttcacgatggtcaatcgtgattagttaattaattaatgtgccaactaaaacctggtaatggtgggttgtgagcacatggttttgatggtcgtgctcatgacaattaaggaccggttcacgagtttcggttgtgaaacattaaccgtgccaaccacaagccagcatgggcaacggctttatcttttgtatagcatggttcattgcggggcaccagactgagaagtggcggagataagcccacgggggtcgctggggagtccatgccttgtttataagggggtgattatgatccaggaaggtgcgctgcaatggattgtgttgtataaggggtattgtcacaactcctttccgaggtaccgtggtggtattgaggcacatggtgacatgatgtggggttgtgtcttgtgggtacagtggtacacctctgatcagagtaaaactattcgaatagccgtgcccgcggttatgggcgggtctaacaatgtctttcgtgattagtctcacccttctcaccataatagaagatgctataactggtaaaatttgattagctcctggtttggaatggtatattcctggtttggagatagaactgtgcagccgggatggttgttcagaatggttgggcctatgcaacagggtatgttgtatagcgttggattaatattgtttaattacttaactgttttattaaattctcaaatgtttgctaaaagctgcttttgcaaatgaaaccctattatgccatcctttgttatcctgtgcacttgcatatttgctgcgtggcttgctgagtatgtcatatactcaccttgcaatcattcatcagaggaagagttctacagtgaagctgatggtgtggaggattaggtgtagccctggtcaagctgcctgtggagtggagtcgtccgcgccgtttatctttttccgctgcttagatctttattgattgagaggaactatctacctctgtaatgatattttatacgcttaataattagagtaataactgtactctattatcaatttgttattgtgtgcctcggctgattcctggacgagggtttacacacatgtaagcgtttggaattttggatagaaattccgggcgtgacacaacacaacgaccacagcctacgaagccggagcctacaggagccaagtcgccgggtgatctagtcgaatcaactcgactacgatctcgctggtatcatccagttctattattccctttgtaatttgtggtcatctccatataatcctatatcaactggattagggctattacctatttaggggcctgaaccagtataatctttgtctcttgtttccttcatgtcgtactacgttgatcatcgtaccagtgtaccccaataccctctatatccggtctatgggtacccatcgtcgacagtggcgcgccacgtagggagctttggtgctcaaggttctactactatgacatcaagcttcgtcgacaacggcgtcagcaccggccccattcatggagtccctacttgaacaatgctggtgtggactcaagttggcgaaatcatcttcccggtttacaccacggtgccaatctcggctggtccatcaattatcggaaacgagaacgccgtggctataaccccggacgatcccgcgtctaaggatcctcccgccgtagcagagaatggaacatcgacgtcatacgagcccgagaaggttcctagtgtggccgaaccttgtccttccgacaagaactccgagccgacaaggacaacttctgaggtaaaaaagtcctggtatcctatccacaagtccaggaagcacaacttgcaagcttgctgggtttttctcaacgtacaagctaaaattcgtgcttgcaaagagcgtggaatccagcgtacttctccaactcatgatgtctattgtcctattcacaagacgaagaatcacgacttctcaagctacaaggtctttctccacgccatgaaaacgacgcttcctaaggtccagcaggtaggaacctctcgtaagggcacaaacaaggaacaaggagcgacgttgacctcggatcgatttgttggagtaatcgacattgatccccacgagccatcagtcctacacttgctcgaagactatggctcatcatcttccagtacaccacgcgacatgtttgccatcggtgggactagcacgtctgcacacgctaacgcaggggcggagaaccagacggtcacgccggcccaacatctcggcaccatcaatgcagtactgagagaagctccctatgaccccgttcttaacgatgatctcgcacgatggatagaacgactatgggaatcggtagccaatctcagtaacgcgttcgaggaagccgctaccagagcacaacaagagcgactgatagctggcgctgccaacggcgaaccaccggagcagcggacgtcacctagatgagctacccatccacctcgcagcaccggcgatctccgcgaccatctgaatggccgccgagaagcacgacgcacgcgagacaatgagaatcattcccgacatcgtgtttcttcacaacgtcgcgagaacgaagagcgagtgtcacacccagaaattctcgaaccagaatttgtaagctgaatgtgcattaaatccctgtccaggaccagccagggtacacaaacgacatttgttgacatacagacccacgtcttacaaaaatataaaagattacaaatgcagcgagaaagataaaagcgagctaaaccgggaagcttgacttcagcagcgggcgactccactccacaagcaaaccttgacggcagcgacgaaaccaacctctctgagacggctccatctgagaagaacttcaactctggtgtgggggaaaagagagcaagactgagtactacccactgtactcagcaagtcataccggaaaaggaggtatgatgcaggatataaccaaaggaagctaggggttcttttgcataaagcaggcatttcaaagcagtagttgaaagcagtaaaatagctgtagtaattaatcaatattaaccaattactgtccaacgctacaccacgttgcaacaggcccaaccaaccacctgaactacaccagctcatt

SEQ ID NO: 28494 - DNA, 3644 bp, Oryza sativa
actctattatcaatttgttattgtgtgcctcggctgattcctggacgagggtttacacacatgtaagcgtttggaattttggatagaaattccgggcgtgacaagttggtatcagagctcccttgaccctaggttatgccaaatggttacccatagaagccctctaaaaatattggaaaagtagaactgttctcctccctttctcttttaattaaaccaaactaatggcacatgcacttcataatctcttttaatggttctcattcaaaatttattccagtgttattagtactgtacatctattactgtactaatggctcattttccagcaaaaattttacaatgttgtttcatttaatcttgctgcaataaaataaatttaacaagttgattttataactttcttttatttcttttggaacctgttattcaaaagtataaaacttgtaacctggtttccaactgtttcaacttatcttgcaaacttggtttactttgtttacttaccttttactttgaatttctaaaactttattcaaattaatccaaaaacttgtgatattaattggatagatgtcttaactccctcctttcacttgtgtttagatgccgcgctacaagcctgagtacttgtttggtgttgagggttttgtccaggagttgcgtacaatgtcctttgtcattggatttgggactgcccctttttatgctcagattcctcatgatcgtcatgaagagaggtgccgagtcaaagtcaccttgaacagtaatagtgaagacattctatcagtgatgttcgaagctggaggaagaaactacatccatgcatgtcaggaagtggcaaggatcgccataggagagctccgcgatcgctacagtgatcaattggccgacactgagtatcgttaccatcctcgtcaaccacagggaagtgaccgtggcagttaccttgagactgaaggaattgagaatgatgctaccacaagacatttggttgagatgctatgggctatggatgaaagtcatgcagagactgtgttagcagcccaagatcgtgaagattggaatcgtggtaagatttgcaagctagaagacaaggtggatcgtttggagaaggaactagctgcgttgaagggagaagcaccgccgcagaaggccaggattcgtcttaccgcaaggaagagagctctatttgtccctcgttatcaattggcgccaaaggtccgtgtggtggagaaagaagttgccccagcagatcctccggtcgtcaacgtaagtgatgatgaagaagaagaatccaagcgcaaccattccaagattgagtgggtagcaactcaagatgatgaagacgagccgaacgagccttcaatcgacctccgatgctcggaagaactagagtgacttgttaagtcgttgtcttagatcgttgtgttagtttgcttgttttaagtttgcttgtgtgtgggtcttgcatgtgatttacatcagtggtaggatgtaagtgcatgcgtttgtttgttttttttgagtgttaggaagttggtgagtttagtggtgtgagagtcttcagtttgtaataatgaaactcagttaagatcaataaaagttaaagtaattctctgtcctaagtagttttccccggtttctcttcttgtgccctgtccatgccagatggtgaacactcgcagcaacgggaatggtcccaacctcaacaaccccaacaacaacaataacaatgaggggaacccaacccttgctcaagttcttgctcaacagactcagctaatgcacatgatgatgcaacaacttcagaatcagcagaaccaaggaaataaccatgcacctcctcagaataagttagcagaatttcttcgtgtgaggccgcctattttctctagtaccactaaccctgttgaagctggtgattggctgcatgccatagagaagaagttggatttgcttcagtgcactgatcaggagaaggtctcatttgcatcacaccagttgcatggccctgcctctgaatggtgggatcacttccgtctgaataggactactgctgaacctatcacttggcttgaattgaccgctgcttttcggaagacgcatataccatcgggagtggtgtctctcaagaagaaggagttcaggtcgcttacccagggatctcgcactgttacggagtatctacacgagttcaatcgtctagcccgttatgctccggaaaatgtacgcaatgatgaagagcgtcaggagaagttcttggaaggacttaatgatgagctttcttacccactcatgactggagattattctgatttccagaaattagtggataaggctattcgtcaggaggacaagtataatcgcatggagcagaagaaacgccagattgctcaattcaagacgcaacaggggaataatcagaggccgcgtcttactttaggaccccagtctatgccacatggaggttcttcgtctgtcgttcgtccgcagcgtcagttcttcaacaacaatgttggcaacaacatccgcaatcaagttccacgtcttattgcagctccaacacaacaacagcctgccaagagggagcaaggtagcaagcccgtggtgtgtttcaactgtggagacccgggacattatgctgacaagtgtccgaagccccgacgcgtgaaggttgtccctgtccagagcaactctaccgcaccagcatcaaaggcccgtgtcaatcatgttgcagctgcagaagctcaagatgctccagatgtgattttgggtacgttccttgttaactcagttcctgcaacagtgcttttcgattctggtgctacacattcatttctatctatgagttttgcgggaaatcatgggatggaagtagaagatcttagacgtcctttgatggttagtaccccaagtaatcaagcactctctttgcaacgtagcccctctgtcagaatagaaattaagggagtaccatttctggccaatcttatcttgttagaatccaaagaccttgatgtcatcctagggatggactggttaaccagacataaaggtgttatagactgtgctaacagaaaagtaactctcaccagtagtgatggtcgagttgtaactgttcatgcattatcttctgagtctttaaggtcaagactgactcagataactttggaagagattcctatagtccgggagtatcccgatgtgttcccagatgatttacctggtatgccgcccaaaagggatatagagttcagaatagatttggtacctggaacaactccgattcataagaggccttatagaatggcagccaatgagttggcagaagtcaagaggcaagtggatgatttgcttcagaagggatacatcagaccgagttcatctccatggggagctccggttatttttgtggaaaagaaagatcatacccagaggatgtgtgtggactatcgtgcattaaatgatgtgactatcaagaataagtatccactacccagaattgatgatttgtttgatcagcttaaaggtgccactgttttctctaagatcgatcttcgatcagggtatcaccagttgagaatcaaagaggaagatatacctaagacagcttttaccactaggtatggattgttcgaatg

SEQ ID NO: 28495 - DNA, 1612 bp, Oryza sativa
atgtcatcctagggatggactggttagccagacataaaggtgtgatagactgtgctaacagaaaagtaactctcaccagtaatgatggtcgagttgtaactgttcatgcattgtcttctgagtctttaaggtcaagactgaaccaagtaactttggaagagattcctatagttcgggagtatcctgatgtgttcccagacgatttacctggtatgccgcctaaaagggatatagagttcagaatagatttggtacctggaacaactccgatccataagagaccttatagaatggcagccaatgagttggcagaagttaagaggcaagtagatgatttgcttcagaaaggatacatcagaccgagttcatctccatggggagctccggttatttttgtggaaaagaaagatcatacccagaggatgtgtgtggactatcgtgcactaaatgatgtgactatcaagaataagtatccactacccagaattgatgatttgtttgatcagcttaaaggtgccactgttttctccaagatagatcttcgatcagggtatcaccagttgagaatcaaagaggaagatatacctaagacagcttttaccactaggtatggattgttcgaatgtactgttatgtcttttggacttaccaatgcccctgctttcttcatgaacttgatgaataaggtgtttatggaatacctagataagtttgtggtggtctttattgatgacattcttatctactctcgaaccaaagaagagcatgaagaacatcttcgccttgcattagagaagctacgagaacatcaactgtatgctaagtttagcaagtgtgaattttggttgtctgaagtgaagttccttggtcacgtcatctcagcaggaggagttgccgttgatcccagtaatgtggaatccgtaaccaactggaaacaactaaagacagtttcagagattcgcagtttcttaggcctcgcaggatattaccggaggtttatagagaatttttccaagattactaagcccatgacacgactgctacagaaagatgtgaagtataagtggtcagaagaatgtgagcagagttttcaagagttgaagaatcgcttaatatcagctcctattttgattttacctgatccaaaaaagggtttccaggtgtattgtgatgcatccaaacttgggttaggttgtgttctgatgcaagatgggaaggtggttgcctatgcatctcgtcagttacgcttgcatgagaagaactaccctactcatgatcttgaattagctgcagtagttcatgcgttgaagatttggcatcattatcttttcggtactcgtacagaggtatacactgatcacaagagtttaaagtatatctttactcagccggatctgaacatgagacaacggagatggttggaattaattaaggattttgacatgggaattcattatcacccgggaaaggctaatgttgtagcagatgctcttagcaggaaaagctattgcaatgctacggaaggacgacagttgccattggaattatgcaaggaatttgaaagattaaatttgggaattgtccgtaagaggtttcgttgcagccttagaag

SEQ ID NO: 28496 - DNA, 1168 bp, Oryza sativa
agtacaagtggtcggaagaatgtgagcagagttttcaagagttgaagaatcgcttgatatcagctcctattttgattttgcctgatccaaagaagggtttccaagtgtattgtgatgcatccaaacttgggttaggttgtgttctgatgcaagatgggaaggtggttacctatgcatctcgtcagttacgtctgcatgagaagaactatcctactcatgatcttgagttagctgcagtagttcatgcgttgaagatttggcgtcattatcttttcggtactcgtccagaggtatataccgatcacaagagtttaaagtatatctttactcagccggatctgaacatgagacaaaggagatggttggaattaattaaggattatgacatgggaattcattatcacccgggaaaggctaatgttgtagcagatgctcttagcaggaaaggctattgcaatgctacagaaggacgatagttgccattggaattatgcaaggaatttgaaagattaaatttgggaattgtcagtagaggtttcgttgcagccttagaagcgaagcccactctaattgattgtcacgcccggaatttctatccaaaattccaaacgcttacatgtgtgttaaaccctcgtccaggaatcaaccgaggcacacaatgacaatattgataatagagtacaaataattaactattgaatactcgcaaattaaaattattacagaggtagatagttcctctcaaagaaaataacatactacgcagcggaaaacaaaactataacaaactacggaacagctaaggcgactccactccacaggcaacttaaccagaataagcctattcctccagatcatcaccttcactgagatactcctcttctgatgaatgaatattgcaagaatgagcatataacatactcaacaagccacacagcaaatatgcaagtgcacaggataacaaaggatggcataacatagctcatttgcagaaacaacatttaataaatatttaagagaatagtaaaacagttgtataattaatcaatattaaataaacaccatacaacacacccgtgttgcacaggcccaaccacatttgaacaaccaaccccagttgaacaaattaaacctccaaaccaggaattaaccattccaacattaatac

SEQ ID NO: 28497 - DNA, 741 bp, Oryza sativa
actctagaggatccccggattaccacgatctcatcacgaagggaggcttgatggtgttggtactgttggaagaaagactattaggttggatcggaaggtgtacgataaagctcatttcacggtactacaacatatgactgaggtggtgccgtacgttgacgaacaccttgagttatccgacaagagaacccaggccgatcagagagttgggtcaggaataagcacatgtcttctttcaacgagtggctgaagaaccgaattgccaggttgcagaacttgtctagtgaaacacttcagtggttgtcacagggtcttgaatggagtgccaccacctggcaaggatatgacataaatggatacacctttcacacggtaaagcaagacagcaaatgcacagtgcagaacagtggttacgcatcgaggctgctagtgacggtggtcgtcgtgatcaatactatagattacttgaagttcaaagtcccgttgtttccgttgtcgatgggtcgatcttcgcaatgtaaaagttgacaatgaaggtttcaccactgtcaacttggctaacgacgcgtacaagcatgaaccgttcgttctcgccaaacaaggttgttcaagtgttctacatagtcgacccgtgtaacaagaaactacatgttgtttgtgaagggaaaagtagaattgttggattggtcaatcttgcacccgaggatgattgcaaccagcacgtccacggcataggtcaag

SEQ ID NO: 28498 - DNA, 11044 bp, Oryza sativa
  unsure (1)..(11044): unsure at all n locations
gcggaagaggaacggacagcactggcgacgaggttgaagcggcggcggtcttcgggtcgacggtgacggcgatgctccggcggtcaacagcgacggcggaggggtggacaaggacggcgacgacttggcgatcccaacggtggccttcccgagcgatgacgacgaccggaacggcggcggcgcacggctggagcgacggcggcgactgcggctcgaggtctcacggcgctagggcgcttccgacgacgagaggcgaaggcgagggtggcgacgggtagaggagagctcggggatccttttaaaggggttcaagggcgacggcgaaggcccacggcgaccagcgacgacgaaggaaacttcgggaaaaacgaatccgaagcaaactcgaatccatcgatttccaaaccgatttagccgatgtttccaaaggggaaaaggtagaggagatctcgaagatcatttcccctctattgatttcaccggaaaaggaaaggagcggccggatttggaaggaaacggcggcggcgcggcgctagggtttcgggcagcggccgacgcgaggaagacgacgacctgacaggcggaccccacctgacagcgagcgagggcgcgcgcgcgcggctgcggactgggccgacttgggccgaggagagagagaagggttttgggccgactttcggcccaaagccaaaagagactttttaaaacctttttcaatttaaattattccttaaatgcaattgcatttattaaaaatacttacttagctcaaataaatcccagaaaaatctaggaattataaaattaagcaaagtatttaatgaaattttatctggccccattttatattggaatttattaattaaaattagatcttctcttcaaggcttttaaaatcatttctaaaaattccaattaaacaacaatttatagattttgaatttttagggtgtgacaatatacacctcgaccagacgattgccaagaatgctaagaatgcatcccacaaagagagtagtggcttcctcgaattgcttctgctgatcagcaataagaattccttcaggtttgccagtactcacccagaagcatttcatagtcgtcagccacagagtgaccctgatttgctgtcacgactggaaataacccaacgggcattccttacgtgcgtgcattaatccttgtcccaggaggcaaggtacaccaaaagttgatacaaatcagactctaagaatcccaagcgtaaatagttaacttattacatgggcagcgaaggcccagcacacacaaagacaaacgagaaacagcggaagactagggcgacgaccacaggcgcttgacggcaggcacgagctagacaccaaagccttcatcttcaaggagctcctcttctgggcttgggaaaaattgagcaagactgagtacaaccaccgtactcaacaagacacacccataaatgcagaataaatgcaagggagtacaagggaattataatataaaggggatagggttgcagtaaacagcatttaaagacatttagttgctcaaagccaatttgtaaacccgatcctagaactatacaatattattaatcaaggccgtgaacccacacgaacctgccttaacccaaggcctatgatgattcagaccgaactggcaacccgaccctgggtcccagctcgtcctaagccaacccaggccaaccattccacattttagttgttaagcaggttttaagaattaaaacactaacttgggtacattgctcggcttgcccataaccgagggctcggctattcgaatagattatactctgatcagaggtgtacatctttacccacaagacacatcttcctcacgtgtaaccacgtgccacataccaccatggtatacagacggaagacgtgacatagtttccaacccatcctagccatagacaagagtaccgacccaatcctgcctgcggccggaacccccgggacaggcaggcaagactgagcccctagcagcagggcaccaaccctgtgccaatgacatctcgactaccgggccgcagctcgtgtaaccttcatttgccctggagaatgtccatcgacccccgacttcatccatctccaatccgtgtacttttgtttatgactagactgagccacaaactaagccttacccactagacatgtggaagtacggtagtgctttgcaacagaggcccgaagaccggtccttatgtggccgaggtgctactatcaaaaccatgcaccccgagcccagcctaaaaccattttaggggattttgaatagagggggcggtgtgaagccaattccacaatgatccaacaattccagtgtgtccaggtgatgagaatatcccaaagtctagagttgtaaaaccacctaatgttacctaattaaattgcgaagcatctacctaaaattaaactagtggtgccatgagtagagtgtccactagttgaggttttgtttgatctagggtgaacaaggtaataatattaacaataacaataataatatggtcataacaaaggtaaataggcatggctaaataaaacagtggtaacgcgggaatttaaataaagcgataatgcaataatttaaatcaacataattttataaactgggattcaatatgctcaaagatgatgtgacttgccttgctcgcttttccaaccgacggcttcgactttcacgaagagcggatcttccgaagctgcagcgtctacacaaccaacggaaaagaaaaaggcttttactctaataaacttcacataacagcagaaacaaagcacaaaaatgggttcttgacttcttaaggaaaaattagagacttgaacggtccaatttcgagttcaattggccaagatatggccatttgaagtttatatgctcttaaatggatatttacgaatttcttcatttaaatttaattaaaaaccgggtttattgcgtcagccgagggagagggcgcgcggaccgagtccaccggagtggggcccacgcgtcagcctctcggtccacggtggaccgggcgcacgcggccgacgggagggggacgcgcccggccccgatggtcaccgccggcgaccaccggcgcggcggagcggcacccgagagagaggagggaagggggaagcgaatggagcggtctttcgcttaccccggtcgacggagactacgggaacggcggccgaagcggaggaaggcggcggtgcggttcgggacgacaaggacgacggcgctccgacggtcggcgagcgaaacggaggagcggactgtgtcgacgactactcggcgaaacccaaggaggcgaccccgagaggggaggaagtnctgagcgaccgcggncggcgacccggaactcgtctgcgactgctgatagagagaanagctgtgcgagcgctatttccaccgtgagggcgagcggcgaacggcggaaacggaggagagaggcacggggaacaattaaatagcgtctggtgagagggaaagcggcctgaggagggggaaaccggcgcggagatctcggccgccattgattgcgccggcgaactttgcgggcacaaaatcggacgaatcctagggagagagagaggggaaagtgggggaatcgggagagggaatcgcggggagtaattccccccactttaatgcgcgcggggacggcgggatgcggcggattcggcggcggcggcggcgctagggcacgggcgggcggcgggcccggcgcgaggaagccaatgacaggtgggccccacccgtcagcgagggtggcgggcgggcccgcctgtcagcggcgcgcgcgcgggggaggagccgatgggccggaggagaggagagagagggagggaagagaagtgggccgagccggccccagaaaggaagggggggaaagaggacttcttttagggtttttctttttataaaccttttcaactttgtttatttcttctcaattattatttgtgctctgaaaattccactaaaatttatttacgcattttaggcttttaggaaatatacaaaaatcctccaagccttatttgacttttatctttgcacattttaattgttggaggctttcacatgaattttaattattctcggcacaatttcgaggatgtattttagagtcgatttgggacgcgacatttgccatctcttaaaatgcacacctgtgaatttatccggtcttctacctcctgaagttggtggtctgttgagctttacatttccccttgctcttgttctgggccttgtgcacaacattggcactggactgcccagtatcgtccttagacgcggcatctttttcccgagctttctcctcaacatcaagagacgctatcaacccctcaacggagtattcctgtctcttgtgtttgagtgcaataccgaaacttctccatgatggaggtagtttcgcaataatgcacccggccacaaatttgtcgggtaagacacacttaaggagttcgagttccttagccatggtttgtatctcatgagcctgttcgactacaaaacggttgtcagccatcttgtagtcatgaaactgctccatgatatacagatcattgctagcatcagtagcaccgaatttagtattcagtgcatcctacaactccttagcgtcggtcatatgcatatacacctcgaccagacgatcgccaagaacgctaagaatgcatcccacaaagagagtagtggcttcctcgaattgcttctgctgatcagcagtaagaattccttcaggtttgccagtactcacccaaaagcatttcatagccgtcagccacatagtgaccctgatctgccatctcttagagtgcacacctgtgaatttatccggcctcattgcatcggcaaaaccaatcatagtaaaatcacagagcctataataaggtttttggattgttataattataagcacataatgatttaatttattccataaataaaccatgacattgcagatgtaaactagattgaacacatcattagatctacacatgtaaactaagcagtaaaacatgaacagatcaaatatgcgcaacatatcgaacacgtaccgaggtggcggaaagaccggttgctcggcaggaactactggcggttgcgagcgtcgacgaagtcgcgaagcacgcgagcggagaggaaggcgagccgtcgcagacgaacagggagcagtcgcgcgaagcgcttcccaaaaaccttattgccaccttctcccgatgcaggacgtcaaaggcagaggttccggagacctgctctcccgatcgccagtgcacgccggcgagcgggatggagtagtctacgagtgacgacgcagtacagagtagaaggcaaaccctagattgatttcgcgtgtgttgcgtgaaggcggcggcttggtttatatagagatagatcgcctgatcagggtgcccgcgtaaaccgaaccggataagtcgcgcgtaacctatccggactccatgccgttttcacacaccggatttttcggaatgtttccaaaacaaaacaaatccgaatcccgcagcaaaacaaaactgcaaaaggaggctgcatctgcgcaagggtgaggagccaattttgccgagcattcgacacgtacgtcgtgcgcgcgccgccggcccggccaggcgagcgagcgcgcgcgtgtgtttccccctcttctctccaccacacatgcttcaagtgactaggagggcatcctcccttttaaggaggtccccctcttctagaataagcaaggtggtactaaactccacatgcatgccatcccatgaggtgggtttttgcgattttccaaagaattaatcttcgaatgggccttagcccatctattaattccaacatggatctcacgacttgtgtatacaaggttcctctggtctcaacgaaggatgccctacttggtgccaaaaatctattcaccataaaggtgcagtttagtgccaagaaatgtccaactacatgatgtaccagctatttgtgaatcctgggatgctattggcgggcagcaggcgaaacttgttcactgatgcctacaaacaattgaagggtatcgtcaaggagaagaacctgtcactgaatgaaagagaacttgcccagagaattatcgtcaaggttcagcagccacacgaggagaatgaaggagagctcatcgatgatgcttggtccattgcagaagagctcctgaatttagaagatgaggagaagatgtggagggtgattgaaggagtgtgggtagagatgctctgcttctctgcagccagatgcaggggctacctgcacgctaagagtctcggcacaggcggggagttcctaagctatgtctggctccttctgcattacatgggaatggagaccttggcagagaagctggcgagagcagagctcccaaacggagcacgctcaggtaattcatccactaaacatgctggagactcctatggcaaagagcaagctcctggtgcatcgacttctcatgctagaggagcctatggtgatgaagatggcgctggtccatcctcctatcatgaaatcgaagttatggggcatgaaaacgtgtgacatgatgcatacaagatgtccttttttctctttaggcgagatgcatacgtgatgtcagtcccagtttgacgcttttatttgtgcgttctgcttaaatggttcaaattcttctctcaatgtaatgtcttgtgtgagtcatgtatcctagcaacttaataaaccatggaactaataaccatgaactggatccagactcggattgaagaaaaaaaatagaagttcacataatgtggttctaatgtatagtactccctcctgttttttttatatgacactggttagtttaaattttaactagccagcgtcatgcaaacaaaaatggaggtagtaatatggaagaaaaaattttaaaacacgtttatgttcagaggtcctcgcatgatgccccattatcggctagcttcctgacagctagcgggacgagattgaggcgtcagcagcagcccaagtggtggtgcactagaagtctagcacagtgtagcgaggagcagcagcagctgctgctcttgcgaggatggcaaagtcgtcgttcaacgtgtgggccacagtgctgtggactccgcttgcttgatggcatcatcctagtcgcgttgttgcctaagagcaagtatattaggagaatgtaagtcggctaaatgctgagatggaggatagaagagaggagggagaggagaagcgagctgtaaacttacagctggcttggacgcaagaaccaagaaactctgtgagaaagacaagtgtgctctgtattaattgtaaatagctaactattatatgtgtgggctaagagaaggttgtaaaaaacattataaccaacaagtcggctgtattattagccttactctaagcaaggcgctcgacgtgggagcaagggaaagtggatccctcggagctcttacctcgaggggacagtgacactgtaaaatcaaagtgtttgattattattttgtgatggacaattggtatttcagattatttgttttgatatttggagataattagtgaaatggttttgaagatgattggattttcaggttatggacaggattgagttgtctaatgattgcagtcaaaccggctgggttaggccagtcagaccgaggctatgcgagcagtcagaccagttagcatgcggtctgatcggccgacgttgtgtcaatttcagtttagggttgattatttggatatccgtgaaaaattcatgtttatggcttagtcaacccaccgtgacacgggaccactcaaacggtcaaccgaaccggcagtttagaacgactctattagtaaataacgacttgggatgaccgaatgaacgaggctttggactatacttcgtgcgaacgaacgattagcggctagcgaatggctccggcacaacccagtacacttaactcagtttgcggaaatggcccggtacgacaacgataggctagtagtgattcgagcttacggctgcggctaggcaactcggctaccaagcgacaagcagcggctaagcagcgacgtcggcgcgaaatggtagacttaactcgtttgcggcaacggcccgatacggcaacgttaggctggtagcgactcgagcttacgactgcggctaggcaactctgctaccgagcgacaagcagtggctaggcagcgacggcggcgctcggctgcagcggcggcgcatggcacacagcggcaggagcagcggtagcggcggctggcggctagggcacagggtgacgcggcagcggcgcggcagggcgatgcggagcggcacgacggcgcggtaggacgacgcagcggcggcagcaacagcgacagcggcgcggcactcggtggtggcggtagcggcggctagggtttaccggcatcttcaacttgatttttttatcatacttgcagcatgtggttcatgagtcgattatatctcttgactgcactacaactatatgttagtagtactacttaatttagtactacctccatcccaaaatggtagtcgctttgactttgctttaactttttcttgtaatgtttaaccatttgtcttatttaacagattagtgcaaatataaaaacagaaaagtcatatttaaagcacttttgataataaagcaaatcataaacaaaagaaatgataattccataattttttgaataagacgaaagatcaaaagttacaaacaaaaactcaaagcgacaactatactgggacggaggtagtatacagttttcgaccccaagtaggttttaaagtgtttttttcacatacagttcagttttacgcctaataaacagaaaagatgtgaattgcagtcaaattttgcttgattctgaatctgaatgcaaccatggttgctaattccatttcatggtgttgggtttagtcccggaacgatttccatgggtcacatggtggggaggccaggtaacaagtcttcggggtcacatgggttgatgtgacaggggagattgttagacccgaggctcaggtaacaagtcttcggggtcacattggttgatgtgacgggggagattgttgtgtttaatcccacatcggtaattgatgatgagggagcacgacttaaaaggtggggcggtcctcatccattagactagtctttttggttgtgtaggctcaggacctaaagttgtagctccggttgggcctgtggtggagcaggctcaatataacctggggtggcccatagttggtgggctgggctgcgcactctaacacatggcattcaaaaaacaggttcaatatttacagagttgtaggacattaggcatccaaaaaataggttcaatatttacagagttgcaggacattagagaggatacatgactcactgaatcacacaaaacatagcattgaaagaagaattgaaacatgatgtgcaataaaagtgacaaaatgggactcactgctctcataaccaccatatgtgatacatcacacatgttcttccccaatgacgcttatctctccgatggcagatggatccgctactctttcatcacaatgagatctgctatcatgagaagtcaatggaccagcaactcgctcaattatgccggagggctcaccaacatgggtagtggatgaattagctaagaattctctgttttggaggtctgctcttgacagcttctctgccaaggtttccatccccatataatgcaggagcaaccagatatagctcaggaactccctcccgtgccgaggctcttagcatgcaggtaccctctacatctggcagctgaaaagcagagcatctccacccacacgccttcaatcaccctccacattttctcctcgtcatctaacttcaggagctcttcagcaatggaccaagcgtcatcgatgagccctgttccatcggatggtggtgtgtcttcattggttatctcctcgaggggctgctgccgcgaggcgattattctctgaataaatgcctccagtttgttgtagacaattctaacaaaatttggcgtagttcgtgccacaagtgccttctcaatcaaggcggttattcgatgcctaagtgcccttagtggctcatgcaccaaagtgtttcttatcttcctatgtaccaaccgttcctgctgcatccaagtgattattctctgcatacatgcctttaactggttgtaggcaattgtgaagaagtttcgcctagcgtctgctgactctactgggttctgcacgaaatcaaatattctcaagacaagttctttttcattcaatcaaggattctcatccttgatgatgtcctttagttggttgtaggcatttgtgaataagtttcgcctggtgcctggcatcagcatctcaggattcacaaacagcaggtacatcatgtagttggatagttctcggcactgaacagcactcttgtggtgaatcgatctttcacggccatatgatccactagtgtaatagcagaaatcagtggcaagatgccagagaaggacactctcatcaaatgccccctctaagctccatcctagttcctgaaagtacccctcggagcgaagagtccatttccccttgttatcattgaacaacctgtaaatgtgaaagtgttctcacctcccggaggaggccgcgtaattatatttatactgtcaagaacagcccttgacgtggcacttacaaaggatatgatcaagttgttacaacggatgttatccatctcaactaccctattatctagccagcaactcaactaactagaagataagatgtacactgttttacactccccctcaatcataacttggacaagttaagattatacatgaaatgtcttaaactctgtatagacagagcctttgtaaatccatcggctatttgatcttttgatccaataaacctaatatcaaacatcttatttgctactctttctcttacaaaatgataatcaatctcaatgtgctttgttcgtgcatgaaagaccggatt

SEQ ID NO: 28499 - DNA, 2081 bp, Oryza sativa
gccatctgacattgaagtttgattggtctcggattcagtgctgctgccatcaatctcgctgccggttgatatgatttcatgtgagctttgcatcagatcttcaccgttttgcctcagatttccaccattttgcaccaaattttcgccagcgatctgtactgctcctgtgcttgatcatcacaggcagggttagtagaacatgttagcatatgatcattagtaatttctcccccttgatcggtgatggacagcaaatgagaaggcaagagagagatctctcgctggagacgggcgccggcattgggatgcagggaggcgaacggaaagactgtctcatcgaagacaacatcacgcgagatatagacacggccagtggatatctcaaggcacttgtatcctttgtggagaggactatagccaaggaaagcacaccggattgatctaaaagaaagcttgcgatgattatatggtcgtaggtttggccagcaggcacacccgaacacgcgcaagtggctgaactcaggagttgcagagaaaagttgttcaaacggcgttttgaatgagatagcagaactaggcaacctgttaatgagatatgtggcggtaagaaaggcttcatcccagaattttaaaggaaccgaggcttgggatagaagagcaaggcctttctcaactatgtcacgatgcttacgttctgctgagccgttttgctgatgcgcgtgagggcaagaaacatggtgagttatgcctatcttctggaaaagggagtttaatttctcgtactcaccaccccaatcggtctgcatggtgagtattttggttttaaactgtcgttcgacatactgttgaaagtttaggaaggcttgaaagacatcggatttctttttaagaagatagatccatgtgtatttgctaaaatcatcgatgaaactaacataataatcatgtcgcccaacagaagtgggcgccggtccccaaacatcagagaatacaagagcaaacggaacattagatgaactcagagatttagggtacggcaattgatggctcttggcccgttgacatgaatcacaaatgtgttctacattattggactcgctagaacaaggaagctgaaaacttttaatgactcgactaacaatcggaaaagctggatgacctaaacgataatgccacctagtcgaagatggcttgacaatgctcaaggcatgtttattgagacttgaatcaccgggtgctggagccaaaggataaagccgtcccttacttctgccgtgaagaagcagcttcctcgttgcctgatccttgatgttaaagaatttggggtaaatttcaacgaatgcattgttatcaaaggctaagcgatttgccgagacaagattcttatttgcagatggaacataaagtatatttttcagatgtaaatctttgtttggggttgaaattactgaatgaccaatatgactaatgttcatacctgtgccgttggctgcatggacttgctcctgtccattatacttctcacgaacagagagcttgtcaagctccccagtgatgtggtcgttggcaccgcagtcgacataccagttggtatctatgccgtaggcggagttcgtcgctgctgctgcaaccttctcttcgggctgataggtttgatcaaacctataccagcacttgagcaccgtatggccagttttgccacacagttgacagaccggacgtggtccttgtggacctccaccgcgtccgccattgccacgaccacggcctccattgccgccgccaccacgaccgcggaagttgttgccgttgccgttgccacgtccgcgtgaagcggcgttagcagaagattggatttgtccgcctacttggagatgatccatctggttgtcgtagctaaccatctgagaatacaaatcactcaaggagattggatcagatcgacctaccacggtggaaaccagcggattgtagtcgatgtcgaggcccgcgaggatgtacgacaccagttcttcgtcatccaggggcttgctagccgacgcaagatcgtcagccagccccttcatcttggagaagtagac

SEQ ID NO: 28500 - DNA, 2046 bp, Oryza sativa
acgcaagatcgtcagccagccccttcatcttggagaagtagactgcagtggtcatggatcccttcctggtgttggcaaggctgatcctgaggttggcgatgcgtgcgcgagattgagatgcatacatgttggtgagggcattccaaacttgcgccgaggtgttgagagtcgccacttgttgcagaacgtccttggacagggaattcagcagataggcaagaacctgctggtcctgagccatccactttgcgtagtccgggttcttggtgacgatctccttgtcgttcttgtcgacggtggtcctcgtcttggccggctccacagccgtgccgtcgaggtagtcggtgagcagcgctccgcgaagcgcagggagaacttgtgcacgccagagaacgtagttgtccctggtgagcttctctgtcaccggtggaccaagtgcagccggcgcagatgtggaagaggaactcgccatgacgagaaaaggatctagggtttgtgttgggtagaagagagaggctctgataccatgtaaatgtggaagcgttctcacctcccggaggaggccgcgtaattatatttatactgttaagaacagcccttgacgtggcacttacaaacatcaaggcaccaataagtagaagcatcagttttgttcgcccaccaacgcttcacgtgctgaagtactaagcttgtaatgcagcgtgatgaggagctggacttcatttgccacctctgatcaaggtagtccttgcacccaaaactgtcgcaaagctcctaatgtaatgcctttggttacagatgaagcatccaatgaggttgtgttggtaaagcatggcatccatatgctgggaaacattgccatccataccagttttgcttctccctatggatgaactcgacttcctttcagcagtgttaacaatatccagagcaagttggccaaaaaaattcaagtgctgcagtacaacaaagcaaggcatatgtaaccttcacatccctatcattgtaagcttgtctgtgactgtggtgaaataggcctatggctccaaattgcaggtataaagctatcatacgtagcagtgaaccaacaattgattttctaaataaccccttcaaccaatctcgtttgacattttgcatcatttgttgaacacgaccttcaggaggaaggtacatctttcgtttcgtgtagagaagatcgaaggtgtgagataaccctttctgcagccaaccatttgttttgtctgcgtcaagtgctgagaaccactttagtttcttaagccgataatcaaaagaaggagatgaaaggtctacaaatatttcacttgggtcaaagttcaccgttgttcctggtgttccattaacatcagaataatagcccctcaccatcgtcacgaaatcatcaattgaatcaatcttgccatttctgcctgttgtcctccgaacattttgcggagagttcactaggctattaatgctagcactatggagggcccaaggtttctccaagcatttcagaaccccagggatgaaaagaaacaccgctgttagcagcaataatgtgtcaccacctgaccatgatttatagaacacatagatggctatggtgatctgagacaacgacgtgagggcgtgccgcgtccacagctcgttatcttcaacattgtagcggtaatgctgtcctgtccaccaaggtgtatgaggaggataggtgcccaaaccacctataggatgctcctgttctgtgtgtatagccatcgtctttctttctatggcgattgaagagtgttgcaagtgcatatatcgctagggcatcgctgctgaggtatgcaagccagataaagtatctcaggtagaatttcataggaatcttacgccgaggagacatgatgaggaggatgtactgaacaacgaggctgctgagggcgagtatgcgcagctgccactcctcccaccgttgcagagcacttgagatacccatcctcttcttctcctcctcctagtctctttgtctatgtgtctgtcttgtatactcggtggaggttc

SEQ ID NO: 28501 - DNA, 5395 bp, Oryza sativa
aggtgcccaaaccacctttaggatgctcctgttctgtgtgtatagccatcgtctttctttctatggcgattgaagagtgttgcaagtgcatatatcgctagggcatcgctgctgaggtatgcaagccagataaagtatctcaggtagaatttcataggaatcttacgccgaggagacatgatgaggaggatgtactgaacaacgaggctgctgagggcgagtatgcgcagctgccactcctcccaccgttgcagagcacttgagatacccatcctcttcttctcctcctcctagtctctttgtctatgtgtctgtcttgtatactcggtggaggttccattcaggagtaataacaactagtgcatcaataaaaatgcaagatgcacaatcgttgtgtggcgcccctaatattccaacgatccggcttttagatagattaatatgtacgggaatatcactgagtagtggcatgaaaagcacacagacactttctgtcaatcgtatatgtgtagatagttatatacttatatattactcccccggtttacaatttgttgtcacttttgatcgcattatttgcacacaaatacttgccgagtcatgcttcctgatacatgttttcctattttcccatattaataacccttattactattttctccaccactggctattttgtggtctagaattatacgtttaaatttttttgaagggtaatatatattatattttcacatgaaaacaaatgtacgtagatatacatgctatggttaaaagtgacaagatataacgaagtagcctgatgaatcctgtttttcttgacttgaccaaatgttttgagcactcctctttaaaagttcttcctttatataattatatgtgatttccacctagtggccagcagcagcgaaaatgctccaatgtgggcgcccgatctgaccccaaaaatcggacccttgcacccgcacgagccaattgtttttttttttttttttttttttttgagaaagaggaggcagagccctctcccattttcattaaagaaaacgattacaaggtccataaaatctgttaactttgatcatcttataaacaaacacaaaacacctacaagaatccttagttcttcaaaaaaagctagtaaaactttctcacatctatttatctattatattaataagacagctcaaaaaaagacaccacgtttatcgtggaggctagaaattctcacgttaatcgaaaaaaatataaattatttacaccgttggattgtaagaggcatagatttcaatgtgtgagatttaacacaaacttgacatgttaactgcattagaatcaatctctaaccaggacctttacatgcaaacggactcaaaatagttttgtccaatttcctaaacttaagttaggttctagattagttaggctataatgtatagtagcaacggaaatctacagcagcgggtcgagccccgcggctgcacgatgagcaggaattggacgatgcacgttaacaaacagaaggaacgatggcatgtgcacagcagctagccaggtgcgcaccttaagcgatacaattaaaaataaaatttagaataaaaatgtaataccagtaataaatatgtaaatattctttgccaaatatgtatatttatctatatatattattaagaaacatagaaatctttattattaagacaactcgaaaagaatgtgccatatttattctaaaggatataaattatcacgttaatcgaacaataaattccaagccgttagactgtggtggaaccaaattagaatggtgaagattgataacagaaatatatgtaatataagtgtatctttagaactaaacaatggtatatagaggagtaagtgacagcatttgatgaaacttctaaatattataaaaatgaaacgaaacaagataataaactctaaaaagtataaggtccaatttttaaaggtttgggactttagaaagtaaaaaaaacaatgataataaagttccaatttaaatcacaatgataataaagagaggagggagcatgcgagccatagaatagtacaatggcaaagccgataatggtttggtgggacttatagaaagtaaaaaaatgaactcaaacaataattatgtttgatttttagaatcctaatgacaataaagagaggaggtagcagatgggccgtagaagagttcagtggtagcgtttgatgagactttaaaaatataaaaatgaactcaacgagaaaataaactctgaaaacaaccaggtcctatttttaaagattcggaacttctaagaagtaaaaaaaaccaatgataataatgttcgattttaaaatctcaacgacaataaagaggggggcagcgggtgggccgtagaagagtacagtggcaaagccgctaacggtttggcgggacttctagaaagtaaaaaatgaacccaaacaataattatgttcgattttaaaaatcccaataacaataaagaaaggaggcaacggatggacattagaggagtcgagtggcagtgtttgatgggatttctaaaaattataaaaacgaaacccactaagccaataaactctaaaaattataacatcaaaattttaaagtttccaaggagaatgaataggaaaagtgatagatcgagcaagcaaataaagaatagggtaacttttaaagactataatattaaacacgaggatgatatggtttgatttttaaaagttttaaaataatgagataactattcaataaaatttaagtaaaatcatattaaaaatagataatttcatatggatgctagccgcgcaattgcgcgggccacccagctagttaaaactaaaaacatctcgaaacaaagaccacagcttctcccctgcatcccaaactgtgtttttctccataggtacaagaccctttcaagatttcgtgccgcaagcgccgtgtcgtccatcccatgccgcaagcgcaggcctccacggcgtagcggccaacgcaccggctctatccccggtctctcctgatctcctcgcctttcctcgtcccacttggagaagctcacgtcagccgtcctcaccgcacagggagccaccgcagagcaacagcactcggacccagccgcccggtcaattggtacaccaccatccatccccgtgagcgagcccatcccatcatcccacctcgccaaggcgccacgtgtgtttccatttccatattttttgccatttctatttttgtttcggtcgattaccaatttcacatggctcggccggtagaaagtcgaaaacaaacaccggtcggctcacccctgactaggcttccttatttctcgatcctatcttatctctttcccatgtatttctatattattcaacatcatatcagagcggatcatctagtcaactctctcacgcttccgccgccattgtccccgagtgggttctaatctcctggggacagccatccccactcgtttttttcttcatcgatgtcgttctcgtcctagagagatcaatctcctggtgctgtgcgtcgtcgtcttcgtgtcgttgaatcagcagcaacagcaccagcgacctccacacgtgcccggccagtcccttcatagacactgttccgttatcaaggacatgtcgacgctggtgccgagtcgctgctgccctggaacccctcgaccccgacctcatgccgtcacgggcggatcttgtcagccctcgccaaccatcgatcccgccgcccgatctggaggacgagcgcgccacctccggctcgtgcagcccaggttgtcgccaacacgctgccatcgactcctctgcagtcatcaccgccactcttaattaccaccactagccctcacctggattccaccggtcgagcacgcctgccgggccgcctcctttatcgacttcagccgtgatctgctctgcttggcgccctccaccagcccccacaactctgggatcctctactccatggccactgacttctcgctcgcaactatcaaacctagcaaacttatatcaaggtgggctatatatggctttcattttggcataaaagcaagttttagttcacaatcttttgcaaagggattttataaagcaattcaaaccatgaatatgaatatatcacaatatttataattgtaataacataacacttgttgtcctccatggcaacaagtctcatgatcatcgtcatagtcaccaaaactcaacacaaatcatcattccaatgccccattttcataaacacatttataaatcaagtactcatgacactccaccaagtcgctcatgactctgcctatttggtacaactttaccaacatgatgtgtatcactctagtctgtccggtacctgttggtaccaccgcacaatacacgttgaatgtggtctagaggtcacaacacaacctttatattatctaatgcctagccttgcaccagcacgatgcatgttactccacattacacctagaatgtagtgtcgctaggtggtgggtccatgccttgaacctaacaacgtaggcacaaccaacgtggtcccctacgaagcacaacaccattgtattcgataaacttagacgcccatgccgtgaggcggaatagttagtcgtcccctcccccgaacacacacacgaatgaatcatccgcacatcaaacacacatacacacatggatagctcctctagacaggtcattaaataacttaattggctaaggccaccccataaatagaacttgtggatgcacgatatactttaattggtgacacgaagtttagtccttaacagaggaacttgccttattctttggataaatcggacaactcctaaatctctccttcaccactaacgcaattaatctatacaaaatgacatgatatgcaaataccgagagatgcaaaaaaaatccaaaatgctctaaaatgcatgatttgtgcgcagtgggttggtactgacctatgatgaatttaagtgagagaatttctattttatcacttttcttttgggagttatgaattttataattatgctctattaaattttttatgcagtttagaatcaagtttttttaagtttcgggtcactgcagtatagagtgtattcccttagagtttaacaaggtcactgcagtatagagtatgttcccttagagtttaacaagatttatttcacaatttttagagatagcatgaatttattagagatattattagaagcacaacacctcctaatattctgagcgcctaattgtgtccacgtaggacacgcgtacccatgttcttatggacaaggcactattgacagtcgttatcaatcagtttcgactatcaatattacctaaatagagaagaactagtgatgcttgcaatgca

SEQ ID NO: 28502 - DNA, 8550 bp, Oryza sativa
cggccgaattgatagaggggaaacactctccgggatctcctctaccttttctcctttggaatcatcggctaaatcggtttggaaatcgagggattcgagttcgtctcggattcgtttttcccgaaccttccttcctcatcgccggccgcagtggcccttcgccttcgcctccgagcccctttaaaagtttccccgagctcttctctacccaccgccaccctcgccttcgcctctcgtcgtcggaatcgcgctagcgccgtgagccctagcttcgccgccgccgccgccgctccagccgtgcgccgccgtcgttccagccgtcgccgtcgctcgggaaggccgccgtcgtgttcgccgtcgcgtcgccgtcctcgttcgccccttcgccgccgccgaagaccgccggagcgtcatcgccgtcgtcgacccgaagagcttcgccgcttcttcctcgtcgccgtcgccgtccgttgatcttccgccgtcgttttggtcgccggtgagttcgccgtgccgcccgcttcgtcctggtgctttccgttttcgtcctcgcgccgccgttcgccggcgagcgtgcgccgcccgagccgtccgctccgccgagccgccgccgccgtcggtgacatcattgctgacgtcatcaaggccgtccgccgtgaaccgccgtggacccgatcgatctcggccgtccgtttggattggatcgaatctcggccgtccgttcgcgtgaaccgccgcccgtgcgcccggtccaccgaaaccctagcccgctgacgcaataaaccttcttttccttttcaaaaataattcaatattgcgtcataattcaatttaaaccgatttaagtgttttaatccgatttaatctttaaaaattcataactaattcatcttagctccgatttagttggttcaagtctctaattgtttctaaaattgagatctacatgttaaaaatatccacatgtactgttcatgcttgtttatgtgctgttttggtgattttgttcttttctgcttagattccgtcgtttccggagagtccgttttcgccggagaagagtttgaagagttccaaggccagcaaggcaagtcacacagatcccaaacaaccctttgagcatgttgatcatatttaaagctattgtttctattcaaatattgcatttattttcgaatgtcattgggtggaattaacctattgtttgttatagcccttttgttcttgattactttattccttgataccttgggttattataacttgactagttgggctttatttattggttcaactagatattagatataattgctcagccctgcttagaaacattagcacactattgggataacttatgactcactgttatttaatgatggcttaatgatagttcacgatggtcaatcgtgattggttaattaattaacgtgccaactaaaacctgataatggtgggttgtgagcacatggtttttgatggttgcgctcatgacaattaacgaccggtttgcgagctactgttgtgaaacatttaccgtaccaaccacaagccagcgtgggcaacggctttatcttttgtatagcatgaacattatagtgtgccagactgtgaagaggcgagaagtccatgggggtcgctggggagtccatgcctctggttgtagagggggtgattatgatccacgaatggtgcactgtggtgagttgtgttatgtagggggtaatgtcacagcctctattcgggtactttccagtatcgcgacgcatggttgacatgatgttgaggttgtgtcttgtgggtatagtggtacacctctggccagagtaaaactattcgaatagccgtgcccgcggttatgggcgagttgagcaatgtttttcgtgattagtctcacacctctcacaataattattgatgattaactggtaataatttgcttagctcctggtttggagttagatttgtacagccgggtacggttgttcaggatggttgggcctgtgcagcatgggtgtgctgttcagtgttgattaaaatttctgattaattactctactgttttacttctcttaaatgttttgctaaatgctgcttttgcaaatgagcctatattttgccatccattggaatccttgtgcacttgcatatttgctgtgtggcttgttgagtatgtcatatgctcattcttgcaataataaatcaacctcagttgaagaaaaaggatccagaaggagaagacgtttggcttataccccagttgagctgcctgtgggagtggagccggagcttcgctagattttattttttccgctgcagttttcttcttggtgaggactaagtgcctcataataagtatttatcgttttagtttattatgatggatttgtatattaaattgtcagtttgtgtacctcggctgattcctggacgaggattttatgcacaaataagttcggaaattattagtgaatttccgggcgtgacaatggagtacgggtgaagtgtacatccactgcagtgtgagtaaaccgaatatattcgaatagccgtgctcacggttattgagcaccgggacatgtattacacttggctagactctgaactcttaaaatgatgggtgggatatgcataatgattttttgactagtggatcaacttctcgagaggcgagaaggggtagaccccagaaaaccatgacgaccagtggcgagaagctatccttgggagcacaatggatggtggacagaaccatcgctgtttaatgaactatggagataaaatttgatcagttatgctaggtcttaagcttgtgaaaagaattgcaaaattgactttatgcaaataaaccattagcctttcattgaatatcctctatcatatgcatcgttgttgtgggggcttgctgagtacggttggtactcactcttgctatttacaaatttcatcagaagccggtgatgaagtctcggatgacccacatgcttactaccaggagggtgaagaagatggcggcgcttaataggtcttagttatggtcgttgcctgtggcaatggcgtcgccgctgccttgattccgatgcttatctatttctgcttttggtatgtattccggaccgtttggtcctatgttctaagactccctgcgggtctatgatgtaataaatcgcgctagacaatctatgtatgcgcaattgatattccagcaatgtaatcgtgaataccagactacttgatccagggaaatggtactattaacacgagagattcctgttataaaaacaggggtctacactcgtgcaagcgggggcagctccggtggcggctagcgcaggtgatggctcagcgacggaggagggggatcatgaaggtggtggcaactacccgggaaggcgacgacaaggagaacagcttcaccgccgggccactgggggcacggatcggccaccaccgggctcctcctcccttgtcccaggtctagtaagcagtggtgttaacaataaaatttggtaagccccgaagagaattctcacatcgccaatagtcgaattcatgctatattcggttaaggaaattaatctattaaaggaatcttatccagaagtgattgacttcaaggaggatgtggtatgcaagttatctattaattaggaatagtttgttagtttccttttatctttagggaagtgcgtttagtgtcctataaggactttatgttttccttttatttttaggaaagtttctttcttgtcttacaaggactagtatctccccatgggtataaatatgtacactcggggtcatcgtaaactatctctcgatcaataatactctcggcgcatcgccaccctctttaccgaggttttccttatcattcggcggaacttggcacctgatgtggggttgcataagctttcgatctccggcgaaggggtaagtcctacgttccaccggccctggcaactatattggcttcatcggcgtcgttcaaggctgcctcagtacgttcgatctcttggattgctctggttcggtcgatatatttacctacttatttatcatatgtctctattaatctagtcttagcatatcaatttagctctatcggccgcttctcgctttagggtttccgctggtatcggctaaatcgtgttgctagattagattagcttagacatccaccaccctgaaaatcagttaacggcttgattgtctagatattatgtttatttttatacttagtgctgcatcagttaagtttgatctactaagtcgtgtttagaaccataatctctagcctgtttcttgactgccaataacggtttcatcgggattttagccgatgaggtatctagacgttgcatcggcctacaaggattgcatataagttggatttagccgatgacatccaaggtttttactgtttatctaatcttgtggattttatgacatcggacttccagccaatgtatgctttaaccttcagatcattgcttagtctatcatatcattattagccgattgtttctactggatattattattgttatattatatcactatcagccgatcatctttatttatatcaagtgtcatattctatatcaaacatatagccgattgttcaaaaccctattgctatcgactggtatcagtatcggctggaatcactccatcggcttgtcagccgatcggttatttgatctgctatttgtatatcttgtcagttgcaggattaaactggctggcacgtcagcatctcatcaacctttggatctgcactggagctaagcatatctcccaggcaagtgtgtgtttttcacgtcaacaggtgggtcggggcgtggaattatgcgggcagcaatgtctgcagcgaacacagcgggcgtcacacatcttctggctggcagtgcagatgcatagatttgctttgtgacttgttcttggatttgctttgcaattgtgctcattgatgtgtggatttgcattgtgacttgttcttggatttgcttaatgcaaggctgctgcatctgggcattttcaaattttgtttgaacatctttgctggcggtcagagcaaatgcgtgtgctttgttttcaactttttctaaaccaaaattgaactttgcaggcggccgtcgtaagacagatgtcactggaaacggattattgtcggcggcctgcggaacacaccgctaacaaaaactgattttcacttgcagcccacgtaacacagccgccagcgaaaacctattgtcgctggcggttcaaatcccatcaatgatgaactttgattttctctggcctttggtcgcaggcggctagcctaaccgccagcaaacgctgattttagccgccaggaaaaaaatgtgtttgtagtgaatgggaatttagcaaagactcctaataatcccttctttctatataaagctatgtgcactaaacacctaaagctcagcatgcaaacaatgtatttattagcactcctaaaacccagatgcaagcataccacatcaacccattaagcacacaaagctcaacgtgcaagcatatagtaattatatctacaatttatttcatttaaaactaaacatacacatgctaaaccatcattctcaaatcattttcataatatttgaatccaaataattttatcatttctccattagctaacatatatcctgcagcaaagcgcggggcatcatctagttatagtatggagtagtatatatagtacgtatagtatccaaacataaacgtaacataacaaagttatttgttaatgaaggtgggatgtaaaaaaactccatcactactacaacatctattttcgcaagatgacccccttactgtacatatggttctctgcagcctactgcgccttttcgccaaacctggtggttttcaccacttctaacaatcttcgcccgacgaaacaatatccatctccagtccaagggttcgatgacctttcctccaacggctagcatattttctttgctttgggtatgcctagtgaaacactgccatcaaataattattaccttttgcaactgtcaatgaaccaggtgtgtccctagttgtttgcagattgtcacagtgatcggatggcagcactttatgctgagattgctgctgaaccttagtctttggttgtataatccacgtttgctgatcggccgataaccgcgcatcctcccgccatgcggcacagccacgtggtgcgcggagagggggatggcgggagggcgcgggagagggggcacgtagcggttttttctattttttcagtattttttgttttatatatacatatatatatatatatgtatacaaactttgtatacgtgtatatatttttttatacgtcaaaactatatactgttggcaactttttatgacaagtcgacaagcacgatcgcaacacctaaacgccttgtggtgatatagagtcgccaaccacctcgatctagccaaagggccaaatcaagatgggattcgtagaaaaacagctaaccgggctagcgaagccgatttaaagatcaaaatcagcctctaggccgatttagatcgatatgaggataactacccgtctcgttgggcaaaacggaaggttttcaggacaaacctacaaagaggtgtcgcactctcgcagcggcggcggacggtttacggcgcaaactgacaaagatggactaaactagggtaaaatagaaaacatagtaaaagaacgattcaagtagattgtattcggggattttacaatgaaccggccttgtcccttaaataggggttggtcttgccctctacatgctcttctccacatccaactcgggatagaaaccaaagaaaacacgaaacctgccttcccgagtaaggaaacccgtcactttccaaactttggcaattttcccctatttcgtccataggtgccatatttgggtgtaaacacatgccccctgcctttttggtgaacagacgtgaacctaaaagcatagaacatgttatctccgggcgataatccaattaccggccataggacttcctaagcatcttgccaaatgctcgggaagtatttctttaagtatttcccattaattgatctctgaaaacaccgtcttgaagtgtcttcatctccctcaaagtcttcaaacgctcgtcgatgacatcttcaaaaattacttcccatcaaggtcttgtaatcttcaaccgacaagtcgccttgcttgaaataccgaagagagccaagatttacctcaactggcaaaacggcaatttcaacaatgttttgttactcgactcggcttatccattagcccgagcgtagtaaagagaagaactcaccaacttaatatcataagattcggcaaaacttctcacttccttggacataaaagaagctcctttaatgttttaggaataccgaatctatgaacgatatgcttcaaaataaagtcaattacttccgcataagtaatattctcgagcggcacaacctcggcccacttagtgaagtaatccattgcaactagcacgaaccaatgccattttgatggcgaaggataaatttgaccaatgaaaaccaaagcccaacctcggaacggccatagtttaatgataggattcaatacagcggtaggcgttaattgaacattgccgatccgttaacaagcttcactctctctatagtatttgaaacaatcatcaattattgtcggccattcacccccccactctcttaagcaaccaatttatcttacgggccgattgatgaattccacaaatcccttcatgaacttctctcccagcaactttagattgatcattatctaagcatttcaacaatactccatctatttttcggcgatataatatttgaacatttgccgccgaatcttccgatcaatcttaagtgtaggatctttcaaatatctaatcaaaggaattcgccaagctatttctatctcatgggcacaaatgtccgaattcacaattaattcggccttttaatcaattgtaacgtgccccccagcctcctgtctgggttcggtcagaccggccacgcaatgccggtcagaccaccctgtctgcccggtcagaccggccatgcagagccgatcagaccgcgggtaccactggtcagaccggccgtgcaatgccagtcagaccacccctagtctatgactttgccaatttcgtccaaacttttgaaatcaagcatcggcctttagtatataattttttttttcacataatagctagatgcttggtatatcaaattattggaccaaaattccttctctatagacatatgaaaaattataacattcaactaatatgtctagatgaatactaattcaattggcttttgaaacaataatcatcatgacatcaaaacacttagccaattgaagcataatcaataatgaatcaccaaagtcatatgtgtcacatgcatatattccaataaactaaaaatgtaagtaatcggcttgagcatgtatgcaaaatattaacaatgccaatgttcctaaagaaaaccactctaga

SEQ ID NO: 28503 - DNA, 10796 bp, Oryza sativa
tttttaacatctataaaccttttaatataatcagcaacagattcattgtatttatgcctaactgatgttaaatcagacaacttaaacttagtttcattagcataaaaataatcatgaaattgttcttctaattgagcccaagtatgaatagaatttaaaagtatcactattagcctcaccacattgcgccagaaattgacctaaatgctcccatgtggtcttaccatcctcaccactaaacttggcaaattcgggaactctataatttcgaggaaacggcacattatcataataatcaggatatggctttttataagctctagcacgattcctagtttcaatcctgaatctattcctcataatatcactaatcatatcctccatgctattaggcccttgtggatttggtggtgggtttggtggcctaataggttgcgtttgcggcgcaatatgattatattggccttgcctagtatcgggaggatatcccctagaaacatcattataagcattaggaatatgtgggggaacttgaggattacttgtagcagtagatacaggaggatcaaatgttctaaagtggtacaaataactagcattagtcattggatctataccctgtattgggacaattgcgccggtctgaccggccgagggcccggtctgaccggtgtcattatgcgcggtcggaccggcctgagggccggtctgacctctggggtaatacccggtctgaccggccgtttggttggtcggaccgacggctatattgcggtctgaccggccgtcaggcccggtcggaccgaccgtgaacgccgtcccgtcggttttactacccattggatctataggagattgatcaacagtggtataggctttatcctttaatgtgtaatcatccataaaagaatctagcctactccttaaaaatccatcaatcttatccttaaacattacatctaatctatctttaaaattagccatagatgaatctattgtagatgcaatttgttgttggatagattgtgatacctcgtcattgcttaccacgtcgggagctagcttgggacgcggcccgggcttgatgatcacgccttgacgagtcctagtagtggctctcatcaacgcctcccgtgtgagctcgttgatgtactcctccatagctttacgatcttctccttcgaagtcatccaatgtgactggcatcacattagatggctccacctccgttttggatgatggcttcgtcatggcgaagtcgaagttgagttgacgatgaacggatctcttccccagcggagtcgccaaaaatcgtgttggcaactttttcgactagtcgacaagcacgatcgcaacacctaaacgctttgcggtgatatgtagtcgccatccacctcgatctagccaaagggccaaatcaacatgggttttgcaaaaagaaaagctaaatcggctagcggagccgatttagagatcaaaatcagcctctaggccgatttagatcgatatgaggataactacctgtctcgtaggcaaaacggaaggttttcaggacaaacctacaaagaggtgtcgcactctcgcagcggcggcggacggtttacggcgcaaaccgacaaagatggactaaaactagggtaaaatagaaaacatggtaaaagaacgattcaagtagattgtattcgggggttttacaatgaaccggccttgtcccttaaatagtggttggtcttgccctctacaggcccttctccacatccaactcgggatagaaaccaaaggaaacacgaaacctgtcttcccgagtaaggaaacccgagacccgacgaaaacagactcggacttggaccctgacggtctgaccgcccacatacctgcggtcagaccggccctactagccggtcagaccgcccacatacctgtggtctgaccggccctatgaaggaaacccgtcactttccaaactttgacgattttcccctatttcgtccatagatgccatatttgggtgtaaacatatacgtaaaaaaattgtttatagtatatacgtatgtatatttctacgtacgtataagtgtatgcaaagctcatacatagtatatatatacacgtatatacgtatagagaggagagcagaaagagaggggggggggggggactcatcgcgcaggcgcacgaccgcccgcgagcatgtgccacccgctgcataatcgacagtcaaataatggttgccattactattaatacaaacaggagaggctttgcctctctttctaaaaaaaaaaaagaaaagaaaataaaaaacaaacaaacaaaaaagaaaccggacatcgcagccagctaacagtacaaggaggaccattagttagctgcactactgcaagctttggtttgagtccaccacaagcaagagtgcagatgtcaaccaccaaatgctgagcagctatgagttaagctgtgacaccaggtgcaccttttcatcctgcagcaaattagttcatggtcacactgtagttgtatccaacttgcaatgctaatctgttcctggaggcagctaatcgttcagcagttgcaattaacaagattgccagtgtcgcccaagcctacaatttgccggtctttctagtttcttgcaactattggccaagccaaatgctgctgttgatatgtagaaagtcatctgctctatatgagttcgatatatcttcacacatattggtctaatatatagctgataagaacaatggtgcttgatcaaccacccttcatttagtgccctatagcttccatgggattcgattttattcattacaatgtcaaagggaacttgcttttatcgaacaagttgtttagtacgctgtgacatttcaaattatacgagagtactacttgaattggtagtgtagataaatatagtccttggattaaaaaaaaaaagaagatgaatgacttgatttaattctgctgctagtagaaatcactctaaaatttgtccacaaattaacactaaaaaggcatagtacaagtgccaaaacgttcctaagcagggctgctggtagaattaatcttttgaaagatttctgtgtagtaattaaacactacacgtctgcatacatgtcatcaacccatgtgtcgtccatgtgccctattttattgttctattaatgaactatcaaaatataggtatatataccaaaaaaattctatctttcttgacttacgtaaataacaatatagcaaatcgacttatgatgggcaacaaatcatctgctctattccattacaaattaaaactcgtgagagcttcagaaactacgtactgattgtccaaaaattctcagagattctatgcatgctccttctgcagtacaagtagaggataggcattagaggcatagggacattgattttgttacaaagcaaacagattgctctgctaagcctatctcatggtcaatagtgacacagaatggtatcaagcagatgccttcccatttctgaggcaaactcacctgcattacatgcaggcttcaactgaccgttatcagatggatgatcgtctagcttgatccaatgcgctcaactcagcaccaaattaatcaaaagcaacccgttcattcacacgaacaaagtctcctggaaactcgagctgatgatctgaaaaatagtacgcattatgcgattcaatcctaaacttgaacttgtaacctgtgcatgtgcttcacttttacatgtagcaggatgtacaaacttttaaacagcatgataaaagtataagtttgaatatcgcgtctcaaatcgcaggggatgcaatgtaccatcatggagagatctgaagttcaaaatctattttagcacaactatcactagaggtttcaagaaggggatacagcgagtagtatcctgatctgccttttgtaccaaggattgacaaaaatacaaaattcaactagtgctgtctggttttgaaattttaccaaaatatgcaaaactttgctatagtgtctatgttgtatactcgctccagcctcaaaaacatattgttctggaattttcagagtcaattttcaatatacaactttgactacctagttctttaccataaactagtaggaagcagacatccagtacgtagccagcaagggagaaaagctacgtggagtggagaccaggtgaatggacacggagaaaagctaccgtgaagtgaagaccaggcgaatggacactagcaaacaagctgcttccgacaatcacaaatatgcatggtaggatgtttctactcggtggggtgcctatgttgtatgtgccatacatacttaggaacgtatatatcacatcttatactatgattattgtcaattaatatattaaagctgcaaacttgtaagcaattattacttaggtcataaacatacaaatatatggttttcttttttggaaaaagtacaccaaaggtcccacaacgtgtcatcgagttacaaaatcgtcctccaaaaccagatatccagcgtcccttaactaaccaaaaccggtcctaataggtacttcggtggtttttaccccggttttatcatatgtggcggctgaatcagcgtgggacccacgtgtcaggctgccacgtcacatctctcttccttcagtgtactttttccttcacgggaaggaggagtcaaaagggtgggtcccacttcctttttctttcctttctagttttattttcttgtttttctctgtttcttctcttcgccgttttctctctctgccctttttttcctcctcacgcgcgagtagcagagggagggcgccggcaacgcaggtgatggccagcggcggtggggaagacggcaacatggaagggggagagcatggcagcgcggtcgcgcgtagggggagagaggctgcacggcgcggcagctcggcagcgttgcctggagcggtgtagagaggaggaatcggagcggcgccgagcagaggtggtagggaagggagtggcgccaggaggaggaggtccgggcgccaattggagggggcggccaacagtggcgtcggtgtcgcttgggcgatggccgggcacatcagtgcggcgcgatagtcggcgcccgaggggaaagggtggctaaacgacagcacccatctaggcgtgacgacggtttgggggtggatgaagacgacgacgatggcggctttagtggcggaggaggaggtggttgtggaggcggcgcttgtgtggctcggtcgcgctcgggggctgcactcggcaccctggcatgcggcccgtgcttagcacatcatcctcctcgtcgccattctctgtgctcatccaagcatcggcctcgcgtgtgcaatgccgaggactacggccgccgccgcgcccgggctacttcgtcacaggcgaggacgccgcctccttctcctgcctcccgggcctctctgaccctgagctcccttccttctcccccgtggtctccaccgctgccaccgttgtcgccggcgtggcgccgccctcctcctctcctaccttgccccagcgacctcctctccgcccaccagcgaggagaaaagagagagaaaggggagagatgacatggcaacctgacatgtggggtccacgtgggtctcacgctgactcagccgccacgtaggacaaaaccagggttgaaaccactgaaggacctattgtgaccagatatccggttttgcggttgggggacgatttcgtaactcgatgacaagttgagggcttctactcccttagtcccaaaatattagggattataatgaatctggacactagtaacgccaatgattattaatacaatgctattatgtctatcgtgattattttgggcattatatgcttgctgtttgacccaagatactatgacattttcattgatgtttttgttcttttaataattagtagaaaatgaacacaaatgttggtgcgtcacactggtggagaaaccctttgaagtcccggttcgtaacccccttttagtcccggtttccaaaccgggagtaccaatccgggactaaagatcgctatctttagtcccgggtgaaataaccgggactaaagatcgatctttagtcccggttggtaacaccaaccgggactaaagatggctcagccacgtggccggctgagctgacctttttttttttgcatggccctgttgctgcatggtttatatatatatatatatatatatatatatatatatatatatatataaaccatgcatatatatgtttcaatacatatatatgcatacatatatatatgtatatatattatattatattatatgtatatacatgcataatatatatgtatttatacatatatatgttatgcaaatgcatatgtatatagatatatatatgaccaaaatatatttacattatagaaaatgtgtacacatgcatatagaaacatatgtagtcatgtattaattacaatccattatatgtcctagctagctacgatttcgacgtagtagtactcgctgctagctcagaagctaaggaccggtgaattgtgtttccgtcgtagtagaattcacccttgggatcaaggatttcttcgttgatgaatcccatgagttgttcttgaaccgctgcgataaattctttgtgtgtggtcaggttatccctcatgcgaataaactatatgaatgtatgaaattgattagtaattaaacaagaaatcgttacgtaataaaattttgaatttatttgtacgtacatcgagctctcttgtggtgatgatttggtctgcaaggcagtggcaatactcacacacgtagtagccgcacaagttagttccctgcttttgctttgcgcactacaaataaatgacaaattaacggcgtgagatctaattaatatatagttgtatgtattaatttgaatcggagaaatataaatgtagagcatgtgtactcacaggaaatttgaacttccgcctaagtctttctctccatttgccgcggaccaaatgacggaaccgataccaagccctacatggagtttaaagctatgattcgtagtagcaattaacataacaagattttcttaattaacaaaggaacttatgacggtacctgtctataagttcgaaaaccttgtcaaacgtagactcttttttatccattgagtcatatacgttgacggtgcaggcctccaggtcgaagagtaaaagcacccagtggaatctgcaatgtgcgtgggatgcattacatatgaaacacttagcaagttcgtacgggaatgaaatttggtatgtaggaagacagtaaaattaaactaactctgtgttgtatggcaacagtatgaacgtcttgtaatgctgcgccttcaggagatggacgagattgtcctttgtttcttgtggatattggtcgagcattgcgacgtttactttccgagggtcgatgaatccagtatcgaaaaccctccgccgtcgggccctttgaatctccattccacaacgataaaagggagtatattattttctatagtctacttatatacaaggacctaattaattaaaggagacgtatagtaagaaatctaactgaacgatatacttacaaaatccagcaactcataatagagacgtcgagggcgtccagctggtatagttcgtagattcccctgaaattgatccagagaatgtcatctccttgcaagaagtctgtgtccctgatcctcgctccgatcatctctctaccggtggcgctcatctccatgtacagctgatggaacttgtacatttgtgtgggtagggactgcagcagctcaggcttgacaagcggtttaccgagttcgtacatgtatttcacttccgccttttcgattggtgcgactcctacaattgatccgtagttagaccggtgtcagtaataaattgttctatcgtcatttctttaccggtcaccaacggctcgatctcctggtttggttgctctccaagctgagggactggtttggactttccagaagatgctttcttcagcgttcgctcatagtccgatagcttgatggcctccttgacagatgcagacatacccctgaagaagttcctgacactggggtctataggaatcttcttttctggacttcgaggcttgaattgtctcttgacttctgatgcaacgtaagcgtcaagctcctcttgcgtgcaatcgtaccctgggtccttgttcttggcggcgtcaactttcgccttcttcgttgcccttgtgtgggcaggcgatggagctggggggggcccttgactttgaaggtgccggaagaggagcttgcggaggagtaggtgtaggagcccgaggaggagtcggtgcaggatcctgaggaggagtcggtgctggcggagcatgaggaggagacggtgcaggatcttgaggaggagatggcggagccggaggagatggtgcacgagacgccgcttgtcgcccagggaggatgatgtaccgcctgcgccatagaataatggcatggcttgtgtctcgtagatgcgtctcaccgtctcctccagggtaatccagctcgaggtcctcgtacgcgccttcgaccaagtcaacttcgaccttcgagtatcctgctggaatcggcctgcagtggtaagtacctgaagggtccgttgggatggccatgcccgacgccaccttcatgttgtgagagattatttattagtaatcaacatatataagcagcaactagcggaatggctaaatcttacctttattgataagttcttcaaaggaatatgcagctcacatggtgtccgctgagtgatgtcatcaacgggacaggtcgattcgtcctgtgtttgcatggcgtccatgctctgtgatcctacctgccccgttgaggcgcagctgctacggtttcctgacgggctcaccattgcaggaggaatggtcggctggggatcatgggaccgatgtgcggccatgcgttcatcaaccttccttgccacctcctcttgcatgttgagttcgtagctcgatacccggaactctaggtctgcaatcttcgcctcggtatctctcttgctcctcatccgactcctgtacgtgtggatgtcctccttgaaaccaatcttccaaggaatcacccctttccctcgtgttcatcctggatgctctggagtctgcagggcgagtgtcagctcgtccctatctctgtcgggtcagaacgtgccctgagaggaggcttccactgcatctgttagtcgtcgcgcagcctctcgtatctgaacgccgaagaccagtgagccatcagctgggttgagcgttccaccgtgagcatagtaccagaacttcgatcgttccggccaattggctgttgccggttcgatacccctctcaatcaagctagcctccatctcctcccacttcggcatcgcgacgctatagcctcctgaccccaagtggtgatggtacttcttcttggcggcattttctttgtttctttccatcatcgcctgcccttgttcacctgtcttatatgcaacgaactcgtcccagtgatcccttagctttgggaatgtgtcgaagttcggtgtctgccccttcagtatatacttctggtacagatctcccttgaagctctgaaactgttctgccattttcttcagagtccaccttttcactttgtcctctgtacccgcaggaagggtgaatgtctcgagcattgtggtccacagcatctctttctccgaatctgggacaaagctctcatgatctccgcgtgcccttgttcttcgccagtacaccctactgacaggcacgttatcccgcacaacccaaccgctgtgacgtacatagttcttggcggcttcggccggggcactaggacgtccatcttcttccacttccgttatgatgtgccgaccctcaagcttcttcgctgcacctcgttgcccgcatgccctcttctgtccaacggagggttgactaccactagcctcctcctcctggttcccctccacatccctttccacgtgcccctgctggttcccctccgcatccctctccacgttcccttcctcgttcaagtactggtttggatcctcgttcccctcttcttcattccagtactggctgcttccctccgcgattgtatcgtacaatatctgttcctcatcgcggtcagccatctgttgatacaagaaacatctgctaagtcacgagacatttatgttttaacaatctaagtcatgtatgctaagtgtaaatgtcgtacattagaaccctacacaaccttacgtgctaagtctaattacaaatcgtgatataagctaagtctaggtgacgtatattatacaaccctagctagtaaataattatatactaagtctaattacaaataaagtaatcttatattaaaactcaaataatattacatgctaagactaaaatagtcatgtatgctaagtgtttcgtgcgtatatgctaagtctaattaagactacaatagtcaattgctacttgtcgcaccacttccgtagtcaataattatatactaagtctaattacaaataaagtaatcttatattaaaactcaaataatattacatgctaagactaaaatagtcatgtatgctaagtgtttcgtgcgtatatgctaagtctaattaagactacaatagtcaattgctacttgtcgcaccacttccgtagtcaataattacatactaagtctaattacaaataaagtaatcttatattaaaactcaaataatattagaacactacacaatcttatatgataagtctaattacagg

SEQ ID NO: 28504 - DNA, 1968 bp, Oryza sativa
cctagaaaattagggtttagcttgtaggcttttaaaataatttctaagaaatgatttaaaatatgcatttttaatttagtcgatttttagggcgtgacaaacctaccccccttaaacggaatctcgtcctcgagattcagaagaactggcgaacagatgaggatgagctgacttcaattcatcttctcgttcccaagtggcttcttcttctgaatgattactccactgaaccttgcagaaccgtataacgcgattccgagtattcctctcgcttacttccaatattctgactggcttctcaacataagttaaatcttcctgaagctctatacgatcaggatctgcttcctccgtaggtacacgtaaacatttattcaactgagacacgtggaacacgtcgtgtattcccgccattgacgaaggcaactctaactgataagctacctctcctcttcgactcacaatcttaaaaggtcccacaaaacgcggtgccaatttccctttggtttggaaacgatgaacacctcgtaacggcgtaacccgaagatatacataatctccttcttcaaaagccaaatctctgcgacgattgtcaacatagctcttctgacgtgactaagcaacgcgcaacctttcttggataatcttcactttttcttccgcctctcgcaatatgtctgtcccaaaaacttgacgttcaccggtttgatcccaaagaagcggcgtacggcactttcgaccatataatgcttcatacggagccatttgcaaactagcttgataactgttgttatatgagaattccgcgtacggcaaattcttatcccaacttccaccaaaatctagaacacaagctctcaacatatcttctaaaatttggtttactctttccgtctgaccatttgtttgagggtgataagcagtactgaaattcaaacgggtacccatctctacttgtaatttctgccaaaacttcgaagtaaactggctacctctatctgacactatcttcttaggaacaccatgcaaacataccactctggccatatataactctgcaagcttatgccctgtataggttgttttgaccggtatgaagtgagcgacttttgtcaacctatcaaccactacccaaatagaatcatgtcctgccgacgttctgggtagaccggttataaaatccattcctatttcttcccacttccactctggaatcttcaacggttgtaacagaccggctggcttctgatgttctgccttgacccgctgacatacatcacatagagccacatattctgctatctcacgtcgcatactggcccaccagaattgttgcttcaagtcttggtacatcttagtgcttccagggtgaatggaatacaaagtttcatgagcttctttcatgatagtatccttcaactccttattatctgggacgcaaattctttctcctaaccacacagttccttgctcatcttctacaaaaccgatggctttacctctcctcatgttctttttaatttcttgtatgtcaggatcattcacttgagcttctctaatgtcacaccctgattttcgtcttaggatttataaattatttaataaattattaatagaatttatattaaatgttcattaatttacaagtgaagttaaatgtgggaaataaaatttcctaaatataaagcatggatggatttaatttttattaaattctccgtggttaattatactctctggaattttctcggatttttcggagctcaattcctaattttaatcatacaaagagcatttcagtaattacccacatattaaattaatcattaaatggtctaattataattttgttaagtacttttagtgtccaagtattttcaggatttttcttgaaattatttgagcattggaagtatttttaacaattgaaagatcatttaagtgattattttaattggaaaaagtttt

SEQ ID NO: 28505 - DNA, 956 bp, Oryza sativa
atcgattcctctcgtttggagttcgatctcttcaatccaatgctataaatagcatcccctagtcgtcctcttgcgtttgccccaagtcccgagctccctggtcgctcgtagcgctgccgcgccgttgccctagccgctagccgtcgccggcgatctccagttgcgccgcgccgtcgcctccgccgtcgccgccgtttgccgtcgccgccgttaggtgcgccgtggtgagaggaatctcggccgcccgttccccttcgccgccgaccaccggagctccgccgtcgccgtcaagccgagccgccgctgccgttctcttcgtcgccggttgtcgtcgtgcgtcgtttgacgttgtggtgagtaccgttgggttcgcctcgtcgtcctctacacgtaggtgtcttccaaatccccggccaaggcccctatctccggcgagcttgctaaccctaatcggccggccgtgggtgacgtcatgctgacgtcatcatcctttctttttccctttttcttttaatagattagatcttctaaaaatcatatctaaataaccgtagatccgtttcaggtggttcaagttgctaaatttttctaaaataaagatctacatattaaaattgtccataaattgaattaaatttatttaattctttttaaatgggctttaattagatttgatcttgtaaaattcataattaattcatatgaagtcagaatgaggccgttcaagtcttataattcatctaaaattatgatctacatgtttgtttactttttatgtactgtttattttgtttttattagtctttttcttcgttttgcgtgttagcttgtcgtttccgtcgttgcgaaggttcgtgagtgcgtcgggggatcaagaagattaattgaagaccgattattgcaaggcaagtcacacagatcgtaaacacaatcctttgagcatgttgatcctatat

SEQ ID NO: 28506 - DNA, 705 bp, Oryza sativa
ccttcattgttcaatataatgacgcatctgctttgtcaccttgtgaaagagatccgtattctcgggcctatgtacctacacaacatgtttcctttcgagaggtacatgggcgttctgaagaagtatgttcgtaaccgtgctcgtccagaggcaagcatcgctaagggttatggaacagaggaggtcatcgaattttgcgtagaatttatcgaagaccttcgcccaatcggggtacctgaatcacgccatgaagggagactacggggaaagggaactctcagaaggaaagcaattatgacggtagacaacaatttattccgtaaagcccatttcactgttctgcaacactcttcattggtactccttacatcgaggagcacttggctctagttcgcgccaggaacatcggtaagtccgatgcatggattacacggcatcacattgatactttccccgcgtggctacgacaacatctcatgggtaacgagtcgatcaaccaacaactgccttcctggcgaggggaccgtcttggtcgatcgcgacattccagggatatgagatcaatgggtacacattctacacgagagcccaagacatgaagagcacgaaccaaaacagcgctgtttgtgtcgatgccatgggacacgatggaacaactgccacgtattacggtgccatcgaggacatacgggaacttgactatgg

SEQ ID NO: 28507 - DNA, 1496 bp, Oryza sativa
gcctcctccagctgccgctcatccccgtcgtccacgcttgtcaacttgtggatgagagagagagaagaaaagaggaagagggtagatgataggtggaccccaccatttttttaataagaaaatgctgactggattgccacatatacgccacgtaggcaaaacagctctaaattgggtcgaggggggtaatttgtccggtattaaaagttaagggtgaatgatgtctggtttttgggtttagggagtaattcggacgaccgcgatagttaggggggtaattagtacttttttacttattttattgactatggactaattttgaagtacattgtggaagccctaacatcgagagtggtcatttgaggagagtcaagtccatggttgcatagtcttccccgatagcatcatgagtgcaaccaggaggtgcaccaacaatggccccatttatgccagtaaggctatttgtctcgaaccaacaatgcatgaaactataagatgatatctccactactgtttacgagtattttttctttttacaaaactacatatactttgaccaaactatcaccaaactacatatttaaagatgtgtttcataaaatcacagatttaacaccaaaattattatattttacaaagcatcgtatcacacaactacagatgtagtgatgaaattatcaaataactacagactttaaagttcatatccatagcactagtgagcttacaaagtagttttataataaaactgatgtttaatttgtagtttttttgataccttaaatttctagtattgtgaagaaagctatagttttatgatacacgtggttaaatctatagttttgtgatagatttatcatagtatatgtaattttgtgaatttactcactgtttattgggtgctatatgtatctatgtataaaggctgcccgatgttatcagaattataaaattggcagaaaacgttcatacaaagcagtctatgaagctcctcatatcacatactgcagaattgaggagagtgaactttgctgaaagcgttgaataagagaagagtttttaatgattttacaagtttttgggacgaacgcatgttctttgcaatacagcagaggatctcaatacttttgagactttcttttcttcctctcctacctgaattttcacgttcttttaagattttttgtttgcataaacatagcacaaagacaccctgtgacgtatatatgtagagcttgctagaccataaaagaacaatttcaggctgaaatttcaaaacttacagtctgcaaccacaatttttttctatctccaccatattggatggtagtgtcaaccatatactagcaatagttatactcttgagacgatataaaacgaagtgcatagatagcataaataaagacgatactccaatatgcgtatggcttgacacattgagagcagcgctgatagtgcacatagtgaactagtgaagctgcagcagccactactag

SEQ ID NO: 28508 - DNA, 19591 bp, Oryza sativa
ctgcaaaaaaacattttttagacgccgcttaagtggtccgtctgcgaaaatagattttcgtaggtggataacgaacttcacccgatttatatttttgtaggcggtcatttggctccaagggtcatgtccgcctgcgaaaaaaagaccccacgtcggaaaaaaatgctttttttaagtagtgagctacatgcggtcctttttgttaatgcagaaatcgatgttagtcttctactgctatgtgctatgtaagtatgtatgggaggcatcggaagccacgaatctatctgctgggtcatgctatgcttaacgagcatcgagcaggtaatctcagaggcagcacagcaggtctgattgccattgtgtatttcctatacaagatgataccccacgtgttaaggtgggcattggagaaatacctaaaaatatcgtttcaagctacaatctctcttaccagtgtttgtcagcggttaagatgcatttttaaagaactaaaaagaacatatctataattggacctagtaaccagtacaactgatagcatgaaaataagtctttgtattatatgattaattcaacccatactaagaaagcgtgatttgctctttgatgaaagaaactgcatgaaaatatagcgagcaatatataacagaacattaaaaaaataataaggagaatgtctaaggatataaaaaagatttaaaagaacaactaatggtattaatgacatatatggtgacattgaaagagaaaaaggatgggccatcaaggccaccaatcctatcgtttcttctgctaattaagatctaatactgcagttgatattatgggtcaacttctaaggaaaaactgataacatggttgcacataatctaagctaatggtgactcatatagaaatcgtagatgtagccggtggttccccttggtaccggctgcccttcgtggcctggcttggcggtctctctcacatgatcatagcccgattggatatctactttctatactggtatgaacattatctatccgaatccattttgttttcatccctagagtggatgcagctgccgtctcgagcttagttggattgctgagcttaaggagtttttcttgccactgctaagtttaaggcttcaataaatttttcagtgtaattagtagaactgtgtttgctggcaggaaagagactacagttaatatgacaataaacatagaccgtcgtggaaatatgttttacatagtttttgatacaaagccattgaacctaataactgctttctatgcggtgctactatatcaagtgagtaaatttgaggccatctcaaaaatggaatagatcagaaaattaaacagagaggtaaaaggcaattaaatttgacaaaccccacatcacagtaaagatttcatttcataccaaatcgcctgctttcatagtaatctccatgttctgtccatttgcatttactgtttttaaaataaaccaaatgttcatcaattgtggctcattttcttttaaatagctctacggtcccacattttgtactgccattcacaacactacaagtctcgaagagtccatataaatgaccataagagaaagaaagagagaagaaaacacaggaacaagaacgagagcagctcagacatagcagaaggcaaggaataacatgccaagcagatgacaacaatttgctcctcaaaaaacttacatgcatattaggtctaagaggcatcaggagctccattacaatctacctgttgcatgtaccatgatagaaaaatcaagggagtgccgggagaggcacaaatacaacctggcccttctagttcgatgagagctaggcagccaagttttgctccttcggccaactaaaaagccttcctttctgctcctcgatcaacaaggtcacaaattcaagcatatcaggtcgcatatgggttatgtcccaacttccaattgccacatggtatgacaggcgagatgatacctctggcaaaggatcgaggaatggcagcagagtactttaggcttcaatatcttaatctctgtcccctgttactggataagtttttacaaatttgcttttagcggtcaatctcttcctcaatttcacttgtggactaacggtcaagaggaggcaaaggcttagagcattgtaacaaatacgtaggtaagcaaaagatcagagcaccctgtagtcaagcatcgaccatacttccttgttcttttcaccatattcatcgaattgttgtaatggattaattgctccatgcttcgcaaaatatgcctttgaaagaaaacatttttcaattgcattgttagacaacttattttaagttatttattcaatttattttataacatatttaagccatccctataatcaagtaaatagcatgtgacaataatcttcacaacaatctaattcaaacagtgcatttcgcgcaaacattttctatatataattttcctgaaatacttttttaaagtaacttttcataccaaaccaacattgaatgtcactcattcgccattatatgttaatttgatgacttaatgcactaaccatctggctcatgccattacacgtgcatagatgcattgagtttacatagcatatactccctccgtttcaggttataagccgttttgattttggtcaaagtcaaaatattttaagtttgaccaagtttatagaaaaaagtagtaacattttcaacccatgaaaaatttattataaaaatataattaattattgatttgatgaaactaattttaaatattactatatttgtctgtaaacttagtcaaacttaaaacaatttgactttaaccaaagtaaaaaacgtcttataacctggaacggagagagggagtatgtttaaaaagtgcctagatgttgacacaaaacaacaagaaaaatacaacgcactgtgcctcaccaagctgtttgactgatgcaccattaatctcgctagagttttggttgcacacattttccataggctgatttcctccgtgatttccccatatctctcatgcaatcaacataaacaagcaaaggagcaagtgaatgagtagatctactgccaccccattcacatgctgtagtagcaagcacaaagaagtcagaaagcaagcaacttttatcatacacgcaagcatgcagcttcggtaatagccgttgatagccgtggtgcagggatggcacacttagatgatatgtgaccagaaagtggaaaatcttgtggtgtttgtggtgagccttagtgaaggtggaggaagtggggcaaagtcggcgagacaaatctagtgggggaaggaggtgaataagccaaaaaattgcgttggtgctagctatttcggaaatactcaaccactcctaaacttaaagatttcaactactcggatccaactttttaatatgtgaatatgtttacacatgcagtagtctttagaatctgcttgcgagaacggtttacacatgtggatgtctttgaaaatatgcctgggtaaaggtgtgggcccacttgtcccgtggatagttagatatacttacatatacggacaacctaactaactgcttgtgaaaaggcggctatctaaagatgccgtcagagataacaattgttattttttttgaaaattaatagaaatcctataggaacttctcaaattttttgaaaattctttgtgaggaactttttctattaagattgaaagcctccaattctcctgctggtcaaaagtgcctaataatgttctgtttccattctgggaatgtactaatagtaaaattattactaatgtattctaattgctgtgcttctctgttctttttcttgaacgcaatatagactcacctactaccaatttattatagggtatcccatccttgcactcttgatctacgtagaaccatacgtgtaactttcatcacaacaaccaacattagtgttctacactttggtataactgactagcaacaaccactgtatgcgtctgaactctctaaatatttcttgggaaaaagttacatgcaatagaaatgggatgcaacatgaaatgtactgccaccatatctcaccagataactgcactgggtcgaggtctttgggagaaacttctgatgtggtcttcacgtgatagcggtgtcgaattctttcacaagagaggatagctttccgtcagactctagcacagaaacataagtgcgaatcaagtagaaagctcttggttgaaaagaaaaattagtcacaacaaatggatcataagttaaggaaggaacaaagtttcagagattgtgtctgatacaatgaattcactaattcttgaataagaccaatgaagcagaataaaatcgagggctgacaaagtttcgtaaactcagtatatatacttcctgtacatttctgtctcagctatatgcatcaacttccatgcataacgactttaggcaagaccaagggaaatgtgaacaaaggacgaactagttttgcttctttacatactacaagaaacatgacttcagtttggcttttgctttggttagttagtacttgatccttttacaatgttcaaaaaccttttagctacaaaactcagaatgaccaatcaggcaaccgtacgagagaataattcattgacccatcctatcctagcatgttttcactaactgtcttctatattggtgctagaacttccaagttccaaacattgatgacatgtctgaattccgttcacttctcaacaccataagccacaattcaggatcaaagcaaaaatggaatatctattgcctcaatgactgtatcctagaaaatagttgtgctctcaacattgaattgtgagtcctgttatccatacctacatttcaagggttgttgtagttggctacttaatatcatacacaaatccctatacatccaacattaacgtccacttccatgtcaaatacataattgacttttttaataattattaaacagtctactgacaaaacaggtataaatgatattaaaatcaaaatatatgggcatagaagagagtgagaaaaactcagacacaatagatcaactgaaaaattcccactagtggggaaccggtcatttgtgccaggcgataaccctcaactgtgttgacagagggcctggtaattgatgagtggtcattgaggagcaaatatttgccccactagccctcccacccgaagtagcacccgaagtaggaacagtacgctgggttgtgataactatttcaccaagtatcggggtatatatatagtcacttatatcattgatagtctgttaacaggaccccgtaaaaatgactatagtcctctttgttgggcactatcctctttcatatcatccggtgtgcttgtggcccatcacagatgacccgtgttgggccgcatatttagcctgccacaggtaacgggtacggcggtgaggaccaatcttcaacgtggatttttttcggtctgtcaccagtgagcacatctgtgatggccgttcacgatgcaaagttagtatctaatgaactcatatgtatgcaaagttaaataaattatccagattaactacacatctattggtgtcactatcactagggaagtgctgacacatgttgatatctgttagatcatcattaagtgcttgcagttaaactcatcagaaaatgaaaatgttaacagagataatagagtctgggccaactgttgacagacaccaaccctgggccaacataaacagagagcctcgccttttctattcctgtaaactgcaagtgagcatgtagtagtaataacagagaatcaaagcagtggttgtatcaaaacttacggtaaacaacctcatcttttcgcttatgcttttgtttatcagccaaaatttaaatttttaaccttaaatttagagttgattttggagttttttcatcgaagtttattttccagccttcgctttaagaccctaagaacacgcatataaaagttttatttacaaattatttttcgttggtaaatatgcccgaataagtgaaacgatgggacgtttttctccaccatatcgaatcgtaatgatgaccactcagggctgaggtacatactagctagtaatagttattcactcgagacgtaatgctatctataaataaagacactcgatcgaattttcatggcgtgccactttgagagctgttagtctcctactggtgcagtactccttttaggaggtaaaaatcgatgtagtctcctcctagctcgctctgctaactaggtatgggaggcactggaaactattcagccgcctcggatccctttgctgggtgattctatgcttaactacgatcgaactagcaatttcagcggcagtgcagcgagttcgattgccactgtttttcctatacgaagccggtggatcaccgtcttgctcaagcatcgtgcaccagaggccctccgctgcaacacgatgcagccttcaagtgatccggtcgttagctatgacgagcacacaccgcaagcacgctacgtcgctacgacgatgcccaggatatgtaagccctagcattggctcggcgacgagttttctcaaatgtacactgccctggcatgtcgagcttagttggggattgctcaacttaacgattattgtttttggccactgctgagatgaaagcttcaacaatattttaatatacttagtagaagtgtgcttgttaattagcatcaaaagagaccaccgtctggatgcaacataaacatgaatcctcatggaaatatattttagatagttttgatacaaagctattgaatctaataactgccttatgttatgttgggttggtgctactatatcaagtcagtaaattggaggccatctaaaaaatggagtagaaaattaaaacagagcagcaaaaggaaaataaattactctaaatctaacccaccccacttcgtagctagcaaaggtttcatttcataccaaaccctctggttttgtagtaatctctatattatgtctaattgcattgacagtttttgaaacgaaccaaacgttcatcggttctggcccattttcttttaaccaggtctacagtcccacattttgtcctaccgttcacaacactatacaagcatatatatacatatatatatatgtatgtatgtatgtatgtatgtatgtatgtatgtatgtatgcttgtatagtgttgtatatgagagagagagagagagagagagagagagagcaacacaaggacaataatgagagcagctcatgcatagcagaaggcaaggaataacctggcaagcagatgccaacaatttgcttctcaaactaacaatgcgtattaggtttgagagccagcaggatctcccttacaccctatctgttccatataccgtgatagaagaaccaagtgagttccaagaaaggcacaaatacaaccagtgccttccaacttgtagagatctagacaaccaagtttttctccttcggccaaccaagtggccttctgttatatatgctcctcgatcaacaacgtcacaagttcaagcttatctcagaccacatacgggttatgttccaacttcaccaatcgccaaatggtatagcaggtgagatgattcctcacatctaaggccctgtttgtttcagcttaagattattgtaatctagattataaaactagattactataagctggattataataagccgatatagaataagctgctagctgtttgtttctctggattattatctgtttgttagttgttagccacccaataatctaaaataagcacctttagagtggcttaccagattatagtaatctggcttatagattataataatttatcataataagctatctgtttgtttcagcttactcctaataatccagattataataatcctaagctgaatcaaacagggcctaaggacataattgttttcaatagctcttaaagcggtcaatcgacatgatttgtatggaagagataaaaaaaaatcagaatttaggggcatacaagggtgtgagaaaaaaaatcataaacacataaggtattggttcaaaattcaggctgctgcaagggattttctctcaataaaggcctgatatgcctaccatgcgtgttaaacaagttccagaataagattacaaatcttgcggtgtcatcaaatggtaaggtgctgacatatgttgatatatgttagatcatcattaagtacttgtagttaatcaggttttgagtagttgtagttaatctggttttgatctgtgtgatgttccaactttgttgttcatgtgcaggtgttgcttgagaccatgagagtatagtcggtgatggatagagattgggcttaggagaagttgaggtctacgcgaggcgctcaggcttgaaaacaatgcatgtggaggtgaagttttttttatggcatacacatggtgttgtgtgcatatggaaagataagtgaagtttggattagagtccaaatttgaaaagtttggagtgcggagttgtatgggatgctgtttccctgatttggtaggttttctatgtgattaggtgtcctagttttgcttggattcgtggctaggagcaaccatgttatgggtaatagaagagggattgaggctaaaagtacatttaccttttgggagaaaaattttagggtttgttttaaggtttcaatcttagtttgtgagttgagagagtagtgctttagatgcactttttaacaatctcgacaagttcagaattatgggttgatttatgaagatctcatcttgtttctcgtgatctagatgcccggccgggcaattgcagttattgttacctccatgtaggaaggaacttgtagccttgtattttaaatcctcaattgcctcttgaactaaaacatttttaattatgttaatctggaaagttcaatacagaatacttaattaatttggttatatattcagttaatctgaagataaactggattgcattgcttatttcctgcaatttccgatgataagttgatcaagtgtgctctgtggagagattacagtctctgcatatgtttcccttcattattattgctggctggggttgggcattatcttgctacgaatcacctagtaactgtgggagaaaacatgaaggaatgcttggtgtactgtagggcttcgggaagaagaatcaaatgcatggtattgtgtttcatggcgaggtattgtgtttaatggccatgtgtgcaaagggatagaaagatctacaaccagggcttttcatcgagacaatttaattgcttagtgatctccagaaaaacaggcaattcaatacctttttttttggatggaaagacaattcaattccttagatctccactctccaggagtttatccaccacaaatccacataatgcgtctctgcaattagatcaaagcagaaattgtgaatcatccaggcaaatcaatccctagtgatacaccttataacaataaagacattgcttgtgatatacattagccattgggaatatatgttgttggagacattggccgtaccgaacctatctgtacagtcgtcacaattagtttggtccaaattaagtcagatgtacatgttaatcaggtgaagctttttttgcatttctgatcagatagctttcaagacgctggattatattcccttttgtttcatattataagttgtctggtttttttttctaattaaactttattaagtttgactaagtttataaaaaaattagtaacattgaatatattttgataatatattttttggtggaaaatactactatatttttctataaatttggttaaacttaaagaaataggactaagacttataataaaagagatagagtattaaattagcaacgacagttcatgcgaattggaacatatctgattctttgagacggaacgagagcgatcgaagatatattccatgtattatgctatctagttgtacactctttaaatctagtactagcataattgtatttgtcaaagaaaaatagctattctaatttttgagaagataaatatctcattacttttcagaccttcgaaagcattgcacaatactaacttgcaatattcagtaaaaaaaaaggagaattggttggcagttttgattcaaatttttttgtatgattcacctggttttactttttctgccttgagagggtaagttattttttgtttcttttcataccattgcagtataaatataattttggtttggatctgttctcaagattagactcgcatgggattgcttgggggttaagccgaaatatcttatgccattcgagttttctgtcgtacacggaaactatgtatgtatctgtactatttaaaaaatataaatgtaataattgttagtgaatcatgatgtaggctataactttatagtaagagtcattggagggagaggcaagtcataatagctgttgcacaagtagttctaacaatgtacatatgtagggccaaggccataaaaaagggagaatgccccaaatctatctaccgatccatcgggctgctgattggtactagtgtactattgctctctcttttcctctaacaatacataatatagcaagctttaaaataacttttctcataaactatttatccaatctacgatcctattacaccattgtatttgttataattaaatctttataacaagatattgtatggttatattatgacgaaagaaaaatatatgtttcaatccattaacactctttgttttaaacgtgatagtgatatgtttcaatatgtgtcttcactatgtttaacaaaattccaaaactaactgccattactctctctccattctctccacctcatccatgcatgcatgcattttagcgcgcttcaaaacgatttttctcctaaaatagttatccaatcaatgacccgatcacaccgttgtattcgttttaattaaatctttacaacaagatatcacatggttatattttgataaaataaaatcatatatatcaatccgttaatattagttgtttcatatgtgatagcgacatgttttaacgtgtcatcatgtttcataaaatttttaaatgttacagttgttggttttttttgtttcaccatatataactttgatgcttcactcgttggtcaactgaaacatttgactgtcccatctttttagtggcatcgggtgcccgatgagaagattcttcccataaaaaggcaagcaaagatagagcatcgaaaggtagacaaaaatcttgactaaactcgaaaccctaactaaactcacaactcaatgatctcaaaagcgataccgggaagcctcacgctccctctctagttatacatgaggtagccagcctaaagccatgaatcaaactcatactagaagtcctaatccacctaggaaaccttctcgtacaagaaacaaactttacaaactccaatcataacaaatttggactcctttcaaattcgactccacatcccatacgcacataatacctccatcgtatgccatatggaatctgcaccaaccatgtgcattgaactctagcctaagtatcccgcatgatatctgactgtcacggacatctccttatccccaagttgactcccgatccatcaccggcaatactctcccgaggcatcaagtcacctacacatgaatcaaacaaagaaactatattccgagactaagctatctccaacttgactcattagtagcaaacaacagtattacatacgcatagtatccatctagaagccataaatataaaacaatcacagatatccaaacaaacaaccgaaaattgaaaccgacacagtgtcggccggtcagaccgcgggctgagccggtctgactgcttgatcaccgtcggtctgaccagcaaccacagcccagtctgaccggaccaaaactcagcagcagctcttgttcacttgcaaatccaattatctccaaaaaccacttcgccaataatctccaaatatcaaaaccaataatgtcagatgccaattgttcatcacagaataataatcaaaaacatctttgattttacatgggaggcatcggaagccacggatccctctgctgggtgatgctatgcttaacgagcatcccgcattgtgtatagcaggtaatctcagaggcagcatagcagatctgattgccattgtgtatttcccactgcccgcttgcatctctactccctagagttgatgcagctgccatctccagcttagttggattgctgaggttaagtaggtttttttttggccacagctaagcttaaggcttcattaaatatttcactataaatataattaggagaacttgtttgttggcagcaaagagattacatgcagtctggataagtttgtttggagttctagtcacaggatcttaatttagcctatacataatcacctttctaatttggaaaatttaatttactgatctgcttgagaagcaatcggtgtcaacttctttgattctcttttcttattttcttcttctggttgcgcaagctctctcttcttatagtcgccggcaccttgctaggtcaccacggtctctgggtctccactagcactgccctaaggcagcctcacgaaccacttccagtgtttagctgatcagcagcgtttagggttttaggttttagcgcaaagagattgagcatcctctgtcctttgctttatttctttatatatggtactggtggggcacgggagccatatctccaattaggattcaaaattgattttaccgatcacaaaaccaatctatctcttatttgttttcttgttagaatcaaactgtgggatcacccttttctaacttactggacttagccgataaatcaaccaacaatgacataaacatagaccatggtggaaatatgttttagatagttttctatgtggtgctactatatcaagcaagtaaattggaggccatctcaaaaaaggaatatatatcagaaaattaaaacagagaaataaaaggcaaataaatattacaaaccccacttcacattaaatatttcattccataccaaatcgcctgctttcatagtaatctccatgttgtgtccatttgcattgatagtttttaaaatgaaccaaatgttcagcaattctggctcattttctttcaacaagctctacggtcccatattttgtactgctattgacaacactagaagtctcgaacagtctatataaacgagcataagagaaagagagagaaaccaacgcaaggatgagaacgggagcagctcagacatagcagaagccaaggaataacctgccaagcatacgacaaaaatttgctcctaaaaaaacttacatgcatattaggtctaagaggcatcaggagctccattacaccctacctgttccatgtaccgtgaaataaaaaccaagggagtgccaggagaagcacaaatacaacctggcccttctagttcgatgagagctaagctgccacgtttttctccttcagccaactaaatggacttccttgatcaacaacatcgcaaattcaagcatatcaggtcgcatatgagttatgtcccaacttccaattgcgaaatggtatagtaggtgagatgatacctctagcaaaggatcgaggaatggcagcagattactttaggcttcaatatcttaatctctgtcccctgtaactggataagttttttcaaatttgcttttagcgatcaatctcttcctaaattttactcgtgtactaatggtcaagaggaggcaaaggcttagagcattgtaacaaatacgtaggtaagcaaaatatcagagcaccttgtagtcaagcatcggccatacgtccttcctcttttcaacttatttattgaaataatgtaatggattaattgctccacgcttcgcaaaatacatttttgaaaaaaaaaaacctttgtcaattgcattgcttagacaacttattttaagttattaatttattaaaatttgataacatatttaatccatccctataatcaagtaaataaccagtgaaaataatcttgacaacaatctaattcaagcagggctggtcatgtttacacgcttaccaagctcttaaataatgcatttgatgcaaatattttctatatataattttcctgatatactttttaaagtaacttttcataccaaacaaacatgtgatgtcgctcattcacctttatttgttaatttgatgacttaatgcactaaccatctggctcatgccattacatgtgcatagatgcattgtgtttgcatatagaatatatttaaaaagtgcctagatgttgacacaaaacaacaacaaaatacaaggcactgtgcctcagctgtttgactaatgcactattctcgctagagttttggttgcacacattttctgtaggttgatttccttcgtgatttccccatatctcttatgcaaataacataaacaagcataggagcaagtgaataagtagatctactgtcaccccattcgcatgttgtagtggcaagcacaaggaagttagaaagcaggcaacttttatcatacacacaagcatgcaacttcagtaatagccatcgctagccgtggtgggatggcacacttagatgatctgtggcgagaaagtggaaaatcctatggtggatgcggtgagccttagtgaaggtggaggaagtagggtgaagtcggcgagccacaaatctagtggggaaaggaggcgagtaagacgaaaaactacattggtgctagccatttcggcttccaactggcgaacacaagacaatactcgaccactactagacttaaagatttcaactacttggatccaactttttaatatgtgaatatgtttacataggcagatgtctttagaaaccgcatgtgagaacggtttacacatgtgcttgcctttgaaaatatgtgtaggtaaaggtgaggacctacttgtcccgtggatagttcaatataattacatagacgtacaacctaactaactgcatgtaaaaatgtttttcacaagcggctgtctgaagatgccatcagtgataacaattgttattctttttttgaaaattaatagaaaacctataggaacttgattgaaaggctccaattctcatgccggtcaaaagcgcctaataaagttatgttccattatgggaaatactaatagtaaaattattactaatgtgttctaattcctgtgcttctctattttttttcttgaacataatatagactcatctactaccaatttattatggggtaccccaacacttgttcatatcctttcactcttgatctacgtagaaccatacttatgactttcatcacaacaaccaatattagtgttctttttttttaaaacacatcaactttgttaagcaagagcagaattaggggataaaccccattacataaccaaggataaaagctgaaagcaaaagagccacccctgagaagggagggttaactgaactacgaaatcaatcttcctgaaataacctaatagcagaaaaaggagcaagtcgatagggatctccggcgaagccgcgacgactgctaccctgggcctcaaaaaatgtgcactccgcttgacaaaccgttaatccccatcagctgcctccacggaaccggcacaagaccgaggtttgttgctgagccgtagattttggtgtgtgcatcactggactcagcgaaggatccccacgaggctcatcattgaatctgaggagctctaacatcaaccctgtcaactgaaattgcgcagatggttcgagctcaacccgaatgacaaacccagcatggtttcttctgttagggaacaacaggaagggtgaatccgaagagcagccaaccttcaacgatggagcacttgaatggctgcaaatcaacttgtcttgctgagatgatggagatggttgaggaagagatggcctgcaccatgaaactggaagcaacgagaaagggtgagctgcaactggaagcaacgacgcaggagacggccctcgcgccgccaccgtcgtcgggggccgcgtccgcgccgcagccgccgctgaggactggatccgtgctgccgccgtcgccacgggccgcgtccgcgccgtcgccgtcacgtcgggccgcaaccacatcgtcgccgccgccgcggacctgatccgcgccgccgctgccaccgcggactggatccgcaccgccgccgtcacatcgggccgcaaccacgtcgtcgccgccgccgcggaactgatccgcgccgccgctgccgccacggactggatctgcgcggccgccgtcgcctcgggtcgtatccgcgtcgccatcgcagttgcgagcagtaacctcgtcgcctccaccgtcgctggtcacaatcgcgtcgccgccgccatctccaacttccatcgcctcactaacgagaagaaaacgggaagaacccgacctaacgagactagcccgactacgtaactactatgggggagggggcacgacccctctccctcccgccgccggcgacgaggtcgccggaatcgaggaggaagaggggtcgagggtggggaatttactgtagcaagaaagggttcgagaggttcggtctcgtgtagatctgagcttatattagtgttctacactttggtataactgatcgactagcaacaaccacactgtactgtatgcgtctgaactctctaatttcttggaagaaagttacaagcagtagaaatgggaggcaacaggatatgtactaccaccatctcaccagcacactgcactgggtcgagcactttgggagaaacatctgatgtggtcttcacgtgatagcagtgatgtcgaatgctttaacaagttatagcggatagcattccatcagactcaagcacaggaacataagtgcaaatcaagtagaaagctctttgttgaaaaaaaaactagtcacaacaaatcgatcataagttaaggaaggaactaagtttcagagattgtgtctgatacaatgaattcaatatttcttgatatgaccaataatatagaataaaatcaaggactgacgaagttttgtaaactcagtatatggactttttattaatttctgtctctgctatatgtatcaacttgatttgataaaaaaaaaagcaatgtttggaacttggaagttctaattgcctcaatgactatatcctagaaaatagttttgtgctctcaacattgaattgtgagtccttttatccatacctatatttcgaggtttgttgtagttaactgtttaatgtcatacacaaatccctatatatccaacattaacgtcgacttccatgtcaaacacataattgatcttttttaagaactattaagcagtcaactgcaaaacgtaactggtataaatgagatcaaaatcaaaatatatgggcatagaagtaagtgagaaaaactcagacacacaatggatcaactgaaaaattaccactagtggggaactggtcatttatgtcaggcgataaccctcaactgtgtcgacggagggcatggtcactggtgagtggtcattgatgagcagatatttgctcctctaaccctcccacccaaagtaggaacaatacgctgggttgtgataactatttcagttgacagtcagttaacaggactccgtaaaaatgactatagtcctctttgatgggcactatcctctttgatatcatccggtgtgcttgtggcccgtcacagatgacctgtgtcgggccacatatgtagcctgccacaggcgatgtgtacggcattgaggaccaatcttcaacgtggatttttttgttctctccggtgagcgcatctgtgatggcccgttcacggtgcaaagttcatatctaatgaactcatatgtatgcaaagttaaacaaattatccagattaactacaaatctattccattatcactagggaagtgctgacatatgttgatatatgttagatcatcattaagtctttgcagttaaactcatcagaaaatgaaaacgttaacggagataatagagtctgggccaaccctgggccaacataaacagaaagcctcgccttttatattcctgtaaactgcaagtgagcatgtagtagtaataacagagaatcaaagcagtggttgtatcaaaacttacggtttgccaccagaaacgacatcatcttttctcttatgcttatgcttatcagccaaaatttgaattttcagctttaaatttggagttgattttagggtttttttcatcgaagtttatttttcagcctttgcttttagatcactaagaatacgtatataaaagttttatttacaaattatttttcatttgtaaatatgttgttttgcttattccacgaataagcgaaacgatgggaccgtttttctccaccatatcgaatcgtaatgatgaccactcagggctgaggtactccctccgtcccataatagaaaagattttgggtggatgtgacacatcctagtataatgaatctggacacctgtcacatccacataaaattccttatattatggaacggagggagtacgtatgtccggatctattatactaggatgtgtcacatccacataaaatcccttatattatgggacggagggaatacatactagtaatagttattcactcgagatgaagtgatatctataaataaaaacactcgaatttgcattgcatgacacttttagagctgttagtgcacataaacctggtgctgtccttttgggaggcaaaaatcgatgtagtctcctactagatcgcttgtaggtatgggaggcactggaaaccattcagccgcctcggattcctctgttgggtgattctatgcttaacgaccatcgaactagcaatctccgaggcagtgcagcgagtccgattgccactgtttttcccatacgaagccggtgcatcaccctcgtgctcaagcatcgtgcaccagaggccctccgctgcaacacgcgatgcagcgttcaagcgatcaagcacacgctgcaatgccccaggagatgccctagcattggctcggcgcggcgttttctctcatgtgcccactgccctggattgtcgatcagcttagttggacttctcagcttaaggattgttttagccgccactgctgagctgaaggcttcaacaaaattttaatatgcttagtacaagtgtggttgttagcatcaaaagaaaccactgtttgggaacgacataaacttttagatagttttgatacaaagctattgaacctaacaaactgctttatacgtggttctactatatcaagtgagtaaattggaggccatctcaagaaacggaatagaaaattaaaattaaacagtgcagcagaaggcaaataaattactctaaatttgactaaccccacttcgtagctagcaaaggtttcatttcataccaaaccctctggttttatagtaatctctatgttatgtctaattgcattgacagtttttgaaatgaaccaaacgttcatcggttcaggcccattttcttttaaccaggtctacagtc

SEQ ID NO: 28509 - DNA, 20937 bp, Oryza sativa
cgcgcagcacaactacacaaggacgagaacgagagcagctcatgcatagcagaagccaaggaataacctggcaagcagacgccaacaatttggttctgaaactaacaatgcgtgttaggtttgagagccatcaggatctcccttacaccctgcctgttccatataccgtgatagaagaaccaagtgagttccaggagaggcacaaatacaaccagtgccttccaacttgcagagatctagacaaccaagtttttctccttcggccaaccaagtggccttctgttatatatgctcctcgatcaacaacatcacaaattcaagcttatcagatcgcatacgggttatgttccaacttcaccaatcgccaaatggtatagcaggtgagatgattcgtcacgtcttaggacataattgttctcagtaaatcttaaagtggtcaatcgacatgatttgtatggaagagataaaaatcataattcagggccatacaagggtgtgagaaaaaaacataaatacaaaaggtattggttcaaaattcaggagcatgaaaggaattttctctcaatgtaggcctgatatgcctaccatgttaaacaaattctagaataagattacaaatctagcggtgtcattatcaaatgggaaggtgctgacatatgttgatatctgttagatcatcattaagtacttgcagttaatctggttttgattcgtgcgatgtttccaacatacatatagagccttaccttttatattcctctaaactagaagtctacaagcagtagtaataaaattggtgtgggttctcaacacaagaattcttactcaatataatcatatagtcatagtactgcagttaaaaccaaattagtggtagtatcaacacactgtagaatcatgtgatgattaattctcaaagatgagtgtttattgaaaatactgtgaatagtgttttcggattatgaatggttttgtcagctttgtgaggccagtcatacctggcaggtgccgtcggtcagaccagtggtgctagagcggtttgaccgggtagccggacggtcagactgacataccccggtttggagtgatcggttttggcttgtttctgtggaatttctagattgcttcatgtttatgatttctagatgctttctattcgtatgtaatactattttgtgctgatgtgagtcaagttggtgcaaacttgtactcggatatacagtttcttggttgttcatatgcgggtgttgcttgagaccataggcatgtgtgcaaagggatagaaatatctacaaccagggcttttcttcgagacaattcaattgcttagagatctccagaacaacaggcaattcactaccttttttttggatgaaaagacaattcaattccttagatctctaggagtttatccaccacaattaatccacataatgcgtctctgcaattagatcgaagaagaaattgtgaatcatccaggcaaaatcaatccctagagatagaccttataacaataaagacattgcttgtgatatacattagtccccattgggaatatatgttgttggagacattggctgtcgcgaacctatctgtacagttcgtcacaattagtttggtcgcaaattaagtcagatgcacatgttaatcaggtgaagcttcatttgcattatttctgatcagattgctttcaagatgctggattataccccctttgtttcatattataagttgtttaactttttttctagtcaaacttaataaagtttggtcaaacttaataaagtttgactatgtttataaaaaaaattagtaacatctaaaatatcaattagtttcactaaatctaatagtgagtatattttgataatatattttttgttaaaaatattactatatttttctataaatttggtcaaacttaaagaagtatgattaagaaaaaaattgaaccacataatataaaacagagagagtattaaagtagcagcacagttcatacaaattggagaaggggacaattacacctatgcccccactttgaactctaattaatgttttactctcacattttaggctttgcatttttgctctctctttatgaaaacgaaccaattgtttgccctcacttttgacgtctagtttaacggtgttagttttaaaacaaaaggacattgatatccttagttgttgttgcttttttgctcaacttttagactagccgcaccggaagcccctgcagctcctgccttcgctgcgccggaagcctcctcatcgcctgcctcgctgcgttggaagccccatggccgccacctgccatcgccgtgcaagggagtgggaagcctgcgactacccacctgactcaccgtgcaagggagatcggggatccggttttaccagaacaacacaaagtcacaccgtgcaagggagatcggggatccggttttaccagaacaacacaaagtcacagagcatattgcatactgatcagaatatcatatcactcatctccgataccaaatgcgcccacataaatcttacaatgctatctacacaaatgaaggaacatagcatagacaactacggggagaaactatcctgcaagacacgcgacgggttaagcgaggatgagcagagcaactgctcgatcagggagggatcggaggggacgctatgtggacaccccgagtattataccatccagtgtccaacacgaccaccacatactgttggaggagtgggatccaaacacgcataaaaaagccactcgtcctcaatgtgtccatgatcacggttgacaccttctgctataataaccggaatgccgagtagtgatcgcaagagataaccataagataacttgccaggctactccgtcatatgcccgtcaaccacacgaaggcggcgaccagaaaacaaggcataccccagtgcctcgatccaaagcgctatctccaattatctcaagcgatcaaaacccgttactcgtgctcagctagtccccaggaatacgactaacctcacacattcattgcaagcaattggaacatcatcacaagtgcataaaaaggggttaagtatagcaagtatttggtacagaatagggtccgaggtcccatctaacagcaaacaagtagcagcggaagattcaaacaaaagccaaaagcacaaaacaaaagccggtggtgccacaacccacaagggcaaatcaaccgggcaagagccaagctgaaggtagcagaagatcaatccctgccctcgccgccccaacatcccggcctagggcttaataggattaatagaatattcatatcaacaagttgcaacttcttttccggaagccgatctccaaaaaaactccagggttaagcgtgcttggcctggagcaatttgggatgggtgaccgaccgggaaattcttcccgtcctcacgcatgtgtcttgccacgcaagtgaggacaaagtgtgcagaaaacacatgtgtcttgcccttgagcatgtcgaagaccttgcgacaggtgatgtcgaagaggtctttgatgtcgaggaagtgggtagtgaggacttgagcatgtcgaagaccttgcgacaggtgatgtcgaagaggtctttgatgtcgaggaagtgggcagtgaggaggtggtcatggacgggcttcacctagatgttgatgaacccttgccataagggagcgggaatcccgcggctgccacctgcctcaccgcgcaagggagggaagcacggccgtcgcgcacacaggagacctgtcgtcgactcgcgctcgactaccatcgccgcgcacacatcgccgcacttctcgatggaaccgtcgtgcacgccggatgtgccaccatcactgtgcttcctgccggaactgtcgccgtcgccgcgcatgtcagaaccgccgtcgtcgccgcacacgctgaaaccgtcgcccgtcgccgcctcaacatgactgagctcgtgttaatgaccaaatttggtaagatatgaaccagattcggcattggaatcagagtggattcggcaaagagttagattcgaagaacagagtatgcatcggctggagtctgcatcggctgagatggatcggatagaggacagccgatacagccgattctgatgagacagttgttaaattgtttctagaatcgatcaacgtgctacacgaggattgctgtgatggagataagctctcagataggcaatttgtacctattaattaggatattttaaatagtttccttagagatatgtttgggcaaaagtctgccgttaagacttatgtgtatcttagagtttgttagagataagagtcgtgtcctgcaaagacctatcatctatctcggctataaatataacacgaacccatgtaatttacaacaacagtttaataacgctttcggtgcatcgccacccttttctactttcgttctatttcgacgagttcttgccttcgggttgagctgcatcggtctcgatcttcaactagaggtaaacttgtcatggcggactgtgttctcaggattagtgcttccatcattatgatactctaatcttgcttatgtaattcgtcgagttatcatataagctctatagtcttcattagttgcgctatctgattaagcaattagctggtttctactattagggagtagccaacaaggttagatcttgttattagtctagattatatagcatatctaccatctcttagaggttttcatcatcttgcctagatcttatatttatctttatgcctaatgctgcatcggttgagttcaatctattaagtaatatccataactataatatttagcttgttagcttgttttatgattgtcgagagagatagcatcgtggtttcagccgatattatctggtttagctatcttattccttatatgcttgactgttatactaaatcgaccctttatattaagatcttattgcattagaatatactagtcttcttgtttgatatattttgcttgttttaatatcttagtataaagtggtatcggcgtattagccgatacatgctagatctatctgatcggctatgctataaacgcctatataatcattgctttaatgtatctttctacttaagtgatttatactgtctcggcacggcgaccgatctatcccaatcacttagtttaaacatacatcgaaggaaagattatatatcgttaatatctatagccgatcgagtagatttagtcgtatcttattcattcattactgccgatcgattccaacatgacatcggctcgaggacaaatgatatgtcatcggcaactagccgatcggctattatttatggatttaactttggtttagttgtattttattcttgttaattgccggatcaaatcaacttgcacgctctcgaacctaaaagcaagattttggacctacacaagagttaagcagatcttctaggccagtgtgtgtttttcgcttcaacagctcggtgaaggaatgggcttgggtccttatccattcactcaagggtacaacagtaaattgatatttcataaatcctttttctaattacttttcagaccttcgaaagcattgcacaatactaacttacaatattcagttaaaaaaaaggagaattggttggcagttttgattcaaatttttgtatgattcacctggttttaatttttctaccgataaattattttttgtttcttttcataccattgcagtataaaaagaatttcggtttggatctattctcaaggttagacacgcatgggatttcttggggtttaagccgaaatatcttatgccattcgagttttctgtggtacagggaaactatatgtaatataaagctaaacagaatttctggtagaaaaatattagtaaaattgtattgtccattttgtgaaaaatactgaatagtaaaattattgatcactttggcaacactatatatctgaaatgcatctagggtgactacaacaattttggtgtgatatcctaactcaattaggatgtggtctatgtaattcatgagagctgtgtacgtatatttagtaccacattgctagtttagcaacggtgtaaccaacttacaagggtttgtccttccaaccataacacctctaggttaacgattttacacgaaacatagacgaaagtgtaagtggggttggaatgtgtaagtaggcccgcccattcgctgtgctaggctgcatggttatggagggcgggccattactcatggtatgagagcggtccctcacagttgtgcgtacgggtcagtgtgtgggcatatgtcgcatggtgcgtgtgggctctgtgagagacacatggcatgatgacatatggcgtcagcactggatgtattgtcggcacccggggatggaattcctgaatacctggagcatacaccgtactagtcccatgatcagtggctagcacacgcatcctcaacattgctatcacatccatacatcatacttgacatataaatagataaagtggttatcataacttagcgattgttgatggtccttaaatcataatatctgaccgtcaatacctgcatataatgaaataaaacatggtatccaacttagtggtaggtattattactaatcacttccactagtgttggtgaaatatgtgtatgcaggtaatttgaggagaaaacacatccgtcatgcgacaaaatgcacctctgcacattcaggacacgtttacacggattggaggccccataagtcaatgaaaaccatttagaattgggccaaaacatagtgcaggttattgggggcccattaagcaacttaccggccaaaggagagaccgggaggcgagtttttgggttcggccgaaccattcctggcgcctcccgccatctacttccacgtggacggcttggattcctcccctatggcggttgtagggtgttttggtcatttccgatacccctaaccgtcatttggagcctatataaggaggtcttcatctcacttcaagaacacacaattttgagctgaattagaatagactctattgtatcttttgtacgttagaataaggtatagagagtgaggggaagctctggaggagttcccggaagtttcgcgttcatccgacttctacctcgacgagtgtagcttcctaggaggaattctagaggagtactggagctgtcggtacactttgctccaggttcggagaaccttcttctataaactaagcatcagtgttcttttcttatgttatttaattacttagtctgagtaagatagatttccatctctacgggttcattgtttagtatttatactaagcgctctagtactaggactctggatagagaaggaagttcctgtaagtataagagtagtaattaataacttagacgtggtgtctaggttagagattacctttgtttattgtgtatcccatagatttgtcagaggtaggtggcaggtggtgacagccttgaattccgttctagtaatcctccacgttcggatacatcataaagctatagccggaaccgtattggcagaccagcaggggtcggtgcccgaagcaacagataggaaattatcttttaacttagcttacataattaaaatacatagaaagtcctctctagcctagcctatctacctatagttgttgtccttggatagtcttagccttaggtagattacacacgttccatgagttcgatatccttttgggggtcacccgaaggtgaagtgctacagcggtattccgtgcgcttgcggatttatctgtagtcgtaagaaataccaatagcgatgcaaagttcttacataatagttaggtcgactggccaaataaaagagtttaaacgcagcggaaaagataaatatacataagttcttcggtatgcccatctaccaaaccacacaggcaaccgactaggaatcaccctagaaagaaccatctcggaaactctggtacccgatgcaaagtaatcgtcactaggcacctcatatcctgcatcctagtctaaaaacaacaacaaaaggtgggtcaatacactaggtattggaagtcctacccaaaccttaggaaacctaggtctattgcaagttgagatcgatcaaggatggctcgatttataggcgagggaggagcgagaggcagatgcggaggttgttgtgatgcattcggcgtctcttgcgcgcgcaggctgtggtccgcagggaacatggcgggcagcaggcgtcggctttgcgcagggattgcagagggggtgcacgggtagtcagagggagccaggggtggtcggcctcgccttgtcgcttcgggcgtcggctttggcagggggcggcggcttcgggttggcgaggcgcactgcgaggccgactttgcaggcgggagacatggaggcaggggcgtcggctttgcagacaacagacgtaggtcggaggccttgcagacgaaggaagcaacggttgagttcgtagcgtctcgtcgctccgggcagagggcggcgccggttgggcgcggtggctacgagggcagcgctgggcgcggcagggcatcaggcagaggcggggcagaggcgagcgtcagctttgcacagccttgcagcgagattcgcgggcagaggaagaatgggcggcttggaggcgacgactttcggctcgcatcctatgtgttcgatggaatgcctgcaaggaaagagaggggaaagaggaagagagagagatggggtgctgggccactggcaggtggggtccagggtgcttgggcccactgatcagagaggtacagggatagggggaggtgaggaaaatttcttcccagggattttaagagagggctgagggtttgacgaattttttttggaatggctacattgctcaaaagcatgcgccatttttactggaagttactgtagtggtgaactccatttggtgaacttttgagatttttctcatgtgcagttattttttgaaaattcaaacaagtttccttctcttattccaatttaaattaattttggttgccttcatctttttaattgagatgcaaaagctgagttataactaattaaatttgttgtttattattctcatcattaatcttattacctttttttctctaatttaatttatatatgcaaaatgaaatgatgcatagaagatccaaaaacatccaaaacaaattttcaccacaataataaatgaattttttttcattatattgaatttccaagtttctacaatttgggttagttacatgtatggacgtgcactaagagggccatgttcctagacatttgcctatatgcatgtgaggctatatgcgtaagttcgactgacagggttgttgggtcctttaaggtgaggggggtgtacgtaacatcatgggccaatttggatatcgtctagaagacattgcttatggagaggttctgatataaattctagtaacaaatccttggttctttgggatagagtttgtcagctgaagtcttaaggaggtttaggagtaattgatctcagatttcagaataatgctttgtggatgaaaaatctccatcagatttataataggcatactgttcgtttggtaagtttgatatggtctacttactataatggcaaagtcccacatgctttgtctttaaaagatccttttggtggagagatgttttacaatttgtggacaattttagaggtttatcaaagtgcgcagcgggtgatggtgggacctgactgttttggaatgataaacttagatcaacactctatcccagggcacattcttttgcaagaaatcataaggactcagttcatcagacttccacaaaggatctgtctcaaatctttttgctcccaatgacagagtaggcttatcaacaatttcttgcaatgcaagctgcagatcctttggatcagctctcagatgactgccatatggtcttatgctagggttaatgatagattctcctctcagaaagattaagccataatctttatgcatatacaatctctaattatttaaattggatctcgaagagcaaatgtactatgaaagtcaaggtttttggttggcttcttttgattgatcgattaaatactcgagataagcttgatagaaagcattgtgcccctgatggaagtgatcttacttgtgtgatttgttcatccggagctagggaaactctgcaacatttgttcttccattgcactttcagttcgcaatgctaggcgcaatttggtttagtttgggacttatatttattctttgaagatatgttacaacatgcaagaggttcttattgatcatctcattttgtggagaagattttatatgcggcttggaatatttggaagcagcgaagtaattggctatatttttgataatgtgccatcctcagtctcctcttggatgacattctttaagaatgatctgtcgcttcttgttttttttttaaatgcagatgagagatcaacatttatttcctggttaaaccagttgtaaaactttttattttattttcttaatatataattttactttgggggaggggggttccctcacagtgctttccctcaaaaattaggatatggtctgtgtggctcataagagctggtctgtgtggttcatgagagctgtgtatgcatgtttagtaccacattgctagtttagtaagagtgaaacaacttataaggtcttgtatctccaaccatatcactcgcgggctaacccttctacacgaagcgaggacgaaagtgcaatggggtggtatgtgtaagtgggcctactcatcggttgagttgggctgtgagtttgtagagggcgggccattacatttggcatgccttgacgaggcagtttcgtcaagaatcagtgaaatttcgtcacaaggacataatcgcagaagatctgttcctctgtgttttttttcactagatccacttgtttcactcttaggccgaggttagttccaaaatttttctttaaatttctaacttttccatcacattaaaactttcctacacacacaaacttccaactattccatcacattatttcaatttcaaccaaacttccaattttggcgtaaactaaacacacccttaaaaaaatgaggatccagtagtgctttgtttgactcttactccaccagataaggattccaaagtggagtcctggcaaacagattctttgctcaaaatgtacacttacctacaaccatttatacctagacacttgttgggggttaggagtacacccctggcgcataataccctccaccttcagaggggagtgcagcgccaggaaggctagggcagaggccatgtggtcaaccatggggcctactacaagggatgcccaaaaagggtttcctatgccagcctttggcttcgaaagataatgcacaaggatagactacaacaggaaaactaagaccatgtttagatgggactaaaacttttaagtccctatcatatcgaatgtttggatactaattgtaaatattaaatgtagactattataaaacccatccataatcttggaataattcgtgagacgaatccattgagcttaattaatccatgattagcctatgtgatgctacagtaaacattctctaattatggattaattaggcttaaaaaatttatctcgtaaattagctttcatttatgtaattagttttgtaagtagtctatatttaatactctaaattagtgtctaaatatagggactaaagttaagtccctggatccaaacaccacctaactatcagtgtagttcgggatggggacgagcggacgacacaactcctaccactaaaaagggaggggccatgggtgtgtgccatcctttcaggggtgggctcatcgactggggctgcccccctttagttaggttgaaaatatacgattctgctcctggagggacccacaagtccgtggcttaaatataaggatgttgtgtaactccattaggtcataattgtaattttatttttgtaatttggggcctatcgttaacgacaaaatttggtaagattctttagtggattgggttaaggaaagagcacaatcaaccgatggaaacttatccatgagaccaagtttatgaaagaatcgtgaagactatggcatggcagcataattctatatattggttaggcttaatttagtagtttccttttatctttaggaaagtgtgtttagtgtcagataaggactttatgtttttcttttgtctttaggaaagtttttaggaaagtttcgttcttgtccaataagcacttatatctacccataggtataaatatgtacacccggggtcattataaactatctcacagatcgtcattataaactatctcacagatcaatacaactactcttgacgcatcgttaccagctttattgaggtttttacttatcatctgacggaacttggcacctgacatggggctgcatcggcttttgatctccggtgaagggtaagtcctacgttccgtcggcctaggcaattgtatctgctacgttggtgttgttcaaggctgcatcgctttgatctcttgcatcgctctggtttggttgatatattttcctacctatttattatatatcttagttaatctagtttggtagatcgatttacttgtatcggctgggatctgctttagggtttttgccggtatcggctaaatcgctttactagattagatttgctaatgtatccaccaccgtgaaaattagtcaaatacttgattttttagacttcatgcttcttaaaatagtttgtaatgcatcatccttagtcgtgctattagaatcataatggctagcctgtctttgattataataagggtttcatcgggatttcagccgatgagttatctggacattgcatcggcttactaggattgtatacaagttagttttagccgattgaaacaaaggtttcactaatcatctaattgtgtggattttatgacatcgaacctccagccgatgtatacttttaaccttcggatcaatatttattctatcatactaattttagccgattagtttctactggattatattattgttctattacattatcatcagccgattgtctttatattgttatctacattggtcatataaccgacatctcaaaaccttacggcatcggctggaactactctatcggcttgtcagccgatcagttatttgatctgttgtttacatatcttgtcaattgcaggatcaaactgactggcacatccgcatctcatcaatttttggacctacactggagctaagcatatctctcatgccgttgtgttcattgatttagtttgcgccaacacagttccggcaccatcggccgaacgcgaatttttcgtcaacacctatataaataggacgcatcctctgtttgattggggattggtatttttatgtctagtaaactacacttcacaactcagttgtgtctccaatcaagatcttcacgtatagtttgttggtacataatttgttcccagaacactcgttccttgggcacttctacatatcaccatccttacttcgaccataaaaccaacacccattgtgttgtaggtttctaggactctacacagtgcatgtgaacacttcaatttcttggaataaaaaatatgcagtagaaatgagaggcaacaggagaagtagtactacttccttggtggtgggtgttcttcaggagccgcttgtgttgcggttctggagaagtatcaatatcgatttcaagtaattttacctttctaccaaatctttctggccaaggaactaagacggtgtttgattgtgaaggttgggaaccttccccacccgtcacggaaaacagagaagcttattagcgcatgattaattaagtattagctaaaaaacctttaaaatgaattagtatgattttttaaaataaatttcccatagtcttttttgttgcaaaaaatacaatttagcagtttgggaaacatatgcgtgtgaaacaagggagtggaggttgggaatataaagaaacaaactcagcctaagagtacatgtgtacaaaaaagtaggaggaaaaaaaagaaccatgaacgaagcaacttacaggagctgataagattgtattgagtaaggtcttatccgtgtgaacaagataacatatataacagaataataacctttgacgttatctcgtgcccgcatcgctgctgaattagtacctcactctgataagctacaaggtgttgtataattattttctttccaagctgatgtttgtaagtctaaataatgctaagtatattcatcttgacaggtggttgtatgatgcccctttccatgctgactaacaactttaatcaacattataagtacaaggtcctacgtcgctacacacctttttaccttgcatctggctgccaagtaagctgcatcctataattttccagttgaaaagtttctgattttgggtgaaaatgtttgcatattgaattgactgttgttaatttttagtttttttagtctctctttgaatttgtttgaaattccacctgtagaaagtttctatatgtgcaaagtttatatatccaaaagttcatatgtgcaaagtttgtacatgcaaagtttctatcagcaaaaagtttatacatgcaaagtttctccataaatattggattaaaaaagctttattagttctacaaatttgtgcttagtaaaacttacagagcgaaaaattatggtttaggctagttttcaaggttagtcgaaagttgagagaggagcactattcttacactttgttaacacaattagagttaatgaagtttatcaattttcagagagttctttgatttgtgtttttgccgatctcggcggttaaaccgggaagaacccatgacattgaggcgatcgcctgattcagggggttgcggtggtgagctgggcggtcagactgatgactagggagcagtcagaccagatagcacttggcggtcatgttacagaataacttttaattccgttaaaagttttgctttttgtatttgtttcttgtgtctcatatcttataagtggtattagagtcacgtttagtcttttcgagctgaaaaaatattctttcaacccttttgttttctcccttgatttttctatcaaacgttttctatcacacgtttgatatcaaatccataattcaaattcaaatcatttagactatgtgatagaaacgttccaccggtttggttgtgaggaaacattcaaattattttgtatatattatcaaactatttcatgggtatagtaaacagttagtcattcatgagtatgaaatagaaagcttttcagaggataggactcaaactttttgataggcctaaatctggctgaagaagaatgctcatgacaggcctaaatgacctgcgcaagccactcatctatccttccagctccattatctcaaccagccgagcagcagtccccttgttcccctattcccttgcatccccaagcagctgccagtatggctggtcgtgatggtgatgggaaggacggatgaatgcagcgacagctgaaaggagaggggggaggggggagtgactaacggtgtaggtcgtggccgccgctgttgctgctgacaatgatgaaggcgtgatcgtatatgggaattagcaccgggcgatcacgttgttgcgcacgagggcatcgaaggaagaccaatccatccactggatttccaatgttttagccaatttatcttgaagagtctcgtgttacatcggaatgtagcactggatattttcgacttcaattcttcacggttgtgttgatctttcaacaattaaattttgatatttcttgtgtgaggccgaaatgtttcaaccgtgaattctccaatgtttcctgatggcgaaatattttctcccagtggtgaaaaaatgctcaaatttgggggaaaatatcgggcactcgatttgtagttgtgccctaggctgaaagtaaggttctgttcaagatccctctagagcagattgtttgatagacaagtcatgctgccatggtcgcaaatagtattacgcgtgcagagaacagcacaacacacttgcacatcatgttgtggagaaaatttcttctatggccctaaaatttttagctgatcctttacatgcccctcaattttctttgctctcttgtgtataccagaattttgattttaatcccttccatattcttatcatcaattgcctgttaataggtgcaaaagaagttggttttacccttaaatgtgcaaggaatatatagaaatttgttgaatctattgttggaaacgtactaatttgtttcatgacactataatgttcatatgtctttcaaatgagaagtatgatgcatagaaattataatatatattaaaaagtatatgtaacattttttaaatggtaaacattgttttgtacagcattccttatataagatataaaacaaggggactgatccgttgaagtaccatcataaaactatgctacatataaataaataaaatgtatattaactacttttgtcattatgtaaaagtaaactatgccgtgaataataccttgtacagtgaagtcatgaatataatagtcttataaaattaacgtacaaatccaacaatatactctacaaaattccatgtttcttttatgctaagggcgaaatgaacctatttataggaattaactggtcaactaatggtcaactaacagaatgggtatgaaattgatcaaaaccaattttttcaagggcatataagagagtaaacaaaactcggggagcatataagggattgcctaaactttcatgggcattgaaagcatttcctccattttgtatggacatgagggtgagttttgttctccttcatatatatttgcagcaccaaactagttataagttctagtacagcaaaatattttggtaggttagagttgcctcaactttattgattttgtaaaataaagctggattcaaatcagaatcctgacaaacaatattcaaaatagggtagagttgccttaactttattgattttgtaaaagttaggattcaaatcagaatcctgaccagcagtattgaagctggtataaatagttcgccttttatgtagctatgtggttgtcaaaatggcgaattggaggcgaagacatcctggtcgaaccttagaggattacgaccggtgccacatccagcgccgcgatgacattgccacactttggttagacttcgaaatgactaatcgtcaagttgttatcgcttgacgtcagtgtgtatttcgcttccttcccccttagagtcgtgtacagtattgatgacgaatcgtgttcgcgggacttagtaggggcggggcaaaaatgttctgaaacggatgatgtaattttttgctcctttgtataacacgtatgtgcttttgcccgatggagcttgtgcgtgtttttatgtttcttttcgctatcattgcattttgtaacttgtacgttcggaagggcgaggcgtgtcggcccccttgcatgttagcgaaaggaattcacattgacttttcagccctcatcattcgctctcgacttttggcatgtgcgtccagaaacgcttcagtatttgcataagtcgagtgtagcgacgatcgatatgttttccgaaaacgagctgtcgcggtttcaacgttcggcgagctgtgcttcggccgattcgtatcgcccccctggcgttttcgtcgatcaaacgtttgccttggggtttttccacgaaatatcatacacaaaaaaggcgaagacacccatgaattttaaatgactgagcgtcagtttgccattgcccagcgtcgacgcagcataatccccgtttttccttctttaccgctaattttttttttgtattgatctaacaacaagcgatgaagaagatgctcaagggggtagtccttcgccatttgaggactgcttttgttaatgaatcggatgtaaagtccgaatgccttttggcgggcaatggaatttatcagtaacttgtgctttttggcaaataaatggagtgtggtgcgtgttacggctgttcggctcgtactttgccctttttgcctttggcactggtatttttaggtactttgatcgttttgaccgttgccggctttcggtctttttagcacttcgacctttttaactgttaccggctttcggtcatttctttagtgctactagggttttgtcgtttgtccctttcggctgccccgtttgtctgcgggtgtgcaaccgatgcgaacttgatttcaagatttagcccctcgcacattttcttggacttctcggagtcaaaccgcttgttattgccggtaatgaactctttcggcacaccgaatcggcagaaaatgtttttccgaacagatttttatactagtgccgaaggtactgccttagcccatcgaaggcggcttgacactcaggtgtccaattgagtttgccggcccctcggagcatcttgaaaaatgataaatctctttcggttgctcttgggagcaactccttaacacattttcgcccctagtccttatcgccgtaccttgctggtactgtggcgaaaggcatgggtgtggcgaaacctgtttgcccgcagcccttggcgccataccttattggtactatggcgaagggcatggcgtgtggcaaaagctgttcacccgcagcccttgacgctataccttattggtattgtggtgaagggcatgggtatggcgaaaggctccagaggctagggtggcctcatagcccccgagcttggaagcaacatattttcgtccccagctcttgtcgccgtaccttgcgggtactgtggcgaagggtgtgggtgtggcgaaaggctccagaggctagggtggcctcgtagccccccagcttggaaacaacttattttcgcccccagcccttgacgccataccttattggtactatggcgaagggcgtcgatgggcgaaaccagttcgcccgcagcccttgacgccgtacctcattggcactatggcaaagggtatggcgtgtggcgaaacctcttcgccgcagcccttgacgccgtgccatattggcactatggcgaagggcgtgggttggcgaaacctgttcgcccgtagcccttgacgccgtgccttattggttcgatggcgaagggtatggcgtgtggcaaaacctcttcgcccgcagcccttgacgctgtgccatattggcactatggcgacgggcgtcggttggcgaaacctgttcgcccgcagccctagacgccgtgccttattggcactatggcgaagggcgtgggtggacgaaacctcttcgcccgaaacccttgacgccgtacctcattggttcgatggcaaagggcgtgggtggacgaaacctcttcgcccgcaacccttgacgccgtacctcattggttcgatggcgaagggtatggcgggttggcgaaacctgttcgcccgcagcccttaacgccgtgccatattggcactatggctaaggtcgtgggttggcgaaacctgttcgcccgtagcccttgaggccgtaccatattggtactatggcgaagggcgtgggtgggcgaaaccttttcgcccgcaacccttgacgccgtacctcattcgtactatggcgtagggtatggcgtgtggcgaaacctctttgcctgcagcccttgacgccgtgccatattggcactatggtgaagggcgagggttggcgaaaccgtatcgcccgcaacccttgacgccgtgccttattggtactatggcgaacagcgtggcgtgtggcgaaaggtgtatagaggcttgggcggcttcatagccccccagcttggacttaactcattttcgccccagcccatgtcgccgtgtcgcgcgggtactgtggcgaagggtgagggtgggacgaaaggctctagaggctagggtggcctcgtaggcctcccgcttggaagcaacttattttcgcccccaacccttgaggccataccttattggtactatggcgaagggtgtggcgtgtggcgaaacctcttcgcccgcaagcccttgacgccgtaccttattggtactatggcgaaggacgtgggtgtggcgaaacctgttcgcccgcagcatttgacgccataccatattggtactatggtgaagggcgtgggtgggcgaaacctattcgcccgcaacccttgacgccgtacctcattggtactatggcatagggtattgcgtgtggcgaaacctcttcgcccacagcccttgacgccgtgccatattggcactatggcgaagggcgtgggttggcgaaacatgttcgcccgcagcccttgacgctgtgccttattggtactatggcgaagggcgtggcgtgtggcgaaaggtgtccagcggcttgggcggcttcatagccccccagcttggaagcaacatattttcgcccccaacccttgacgccataccttattggtactatggcgaagggtgtgggtgggcgaaacctgttcgcccgcaacccttgacgccgtacctcattggtactatggcgaagggtatggcgtgtggcgaagcctcttcgcccgcagcccttgacgccgtgccatattggcactatggcgaagggcgtgggttggcgaaacatgttcgcccgcagcccttgacgttgtgccttattggtactatggcgaagggcgttgcgtgtggcgaaaggtgtccagcggcttgggcggcttcatagccccccagcttggaagcaacatattttcgcccccaacccttgacgccataccttattggtactatggcgaagggtgtgggtgggcgaaacctattcgcccgcaaccctttacgccgtacctcattggtactatggcgaagggtatggcgtgtggcgaag

SEQ ID NO: 28510 - DNA, 1041 bp, Oryza sativa
gcccgcaacccttacgccgtacctcattggtattatggcgaagggtatggcgtgtgaaaagccttttcgcccgcagcccttgacgccgtgccatattggcactatggcgaagggcgtgggttggcgaaacatgttcgcccgcagcccttgacgttgtgccttattggtactatggcgaagggcgttgcgtgtggcgaaaggtgtccagcggcttgggcggcttcatagccccccagcttggaagcaacatattttcgcccccaacccttgacgccataccttattggtactatggcgaagggtgtaggtgggcgaaacatattcgcccgcaaccctttacgccgtacctcattggtactatggcgaagggtatggcgtgtggcgaaacctcttcgcccgcagcccttaacgccgtgccatattggcattatggcgaagggcgtgggttggggaaacctgttcgcccgcaacccttgatatcgtgcctcattggcgctatggcgaagggcgtgggtagacgaaacttattcgcccgcaacccttgatgccgtacctcattggtactatggcgaagggcgtgggtgggcgaaacctgttcacccgcaacccttgatgccgtacctcattggtactatggcgaagggtatggcgtgtggcgaaacctcttcgcccgcagcccttgacgccgtgccatattggcactatggcgaagggcgtgggttggcgaaacctgttggtccgcagcctttgatgccgtgccttattggtactatggcgaagggcgtggcgtgtggcgaaatgtgtcctgaggcttgggcggcttcgtagccccccagcttggacttaactcactttcgcccccagcccttgtcgccgtatcgcgcgggtactgtggcgaaggttgtgggtggggcgaaagtttatagaggctatggtggcctcgtatccccccagcttggaagcaacttatgttcgcccccaacccttgaggccataccttattggtactatggtgaagggtgtgacgtgtggcgaaacctc

SEQ ID NO: 28511 - DNA, 23826 bp, Oryza sativa
atgttcgcccccaacccttgaggccataccttattggtactatggcgaagggtgtgacgtgtggcgaaacctcttcgcccgcaagcccttgacgccgtaccttattggtactatggagaagggcgtgggtgtggcgaaacctgttcgcccgcagcccttgacgccgtaccatattggtactatggcgaagggcgtgggtgggcgaaacctgttcgcccgcacaccttgacgccgtacctcattggtactatggcgtagggtttggcgtgtggcgaaacctctttgcccgcagcccttgacgccgtgccatattggcactatggcgaagggcgtgggttggcgaaacctgttcgtccgcagcccttgacgccgtgccttattggtactatggggaagggcgtggcgtgtggcgaaaggtgtgcagaggcttgggtggcttcgtagccccctagcttagacttaaaccactttcatccccagcccttgtcgccgtaccacgcgggtactgtggcgaaggatgtgggtgtggcgaaaggctctagaggctagggtggtctcgtagcccccctgcttggaagcaacatattttcgcccccaacccttgacgccataccttattggtactatggcgaagggtgtgggtgggcgaaacctgttcgcccgcaaccctttacgccgtacctcattggtactatggcgaagggtatggcgtgtggcgaagcctcttcgcccgcagcccttaacgccgtgccatattggcattatggcgaagggcgtgggttggggaaacctgttcgcccgcagcccttgatgtcatgcctcattggcgctattgcgaagggcgtgggtagacgaaacttcttcgcccgcaacccttgatgccgtacctcattggtactatggcgaagggtatggcgtgtggcgaaacctctttgcccgcagcccttgacgccgtgccatattggcactatggcgaaggacgtgggttggcgaaatctgtgcgcccgcagcccttgatgccgtgccttattggcgctatggcgaagggcgagggtggacgaaacctcttcgcccgcatcccttgatgccgtacctcattggtcctatggcgaaaggcgtgggtgggcgaaacctgttcgcccgcaacccttgatgccgtacctcattggtattatggcgaagggtatggcgtatggcgaaacctcttcgcccgcagcacttgacgccgtgccatattggcactatggcgaagggcgtgggttggcgaaacctgttcgcccgtagcccttgacgccgtgccttattggtactatggcgaagggcgtggcgtgtggcgaaaggtgtacagaggcttgggtggctttgtagccccccagcttggacttaactcactttcgcccctagcccttgtcgccgtaccgcgcgggtactgtggcgaagggtgtgggtgtggcgaaaggctccagaggctagggtggcctcgtagccccccagcttggaagcaacttatttttgcccccaacccttgacgccataccttattggtactatggcgaagggtgtgggtgggcgaaacctgatcgcccgcaacccttgacgccgtacctcattggtactatggcgaagggtatggcgtgtggggaaacctctttgcccacagcccttgacgccatgccatattggcactatggcgaaggtcgtgggttggcgaaacctattcgctcgcagcccttgacgccgtgccttattggcactaaggcgaagggcgtgggtggacgaaacctcttagcccgcaacccttgacgccgtacctgattggtactatggcgaagggtatgggtgggcgaaacctgttcgcccgcaacccttgatgccgtgccatattggcactatggcgaagggtatggcgtgtggcgaaacctcttcgttcgcagcccttgacgccgtgccatattggcactatggcgaagggcgtgggttggcgaaacctgttggtccgcagcctttgatgccgtgccttattggtactatggcgaagggcgtggcgtgtggcgaaatgtgtcctgaggcttgggcggcttcgtagccccccagcttggacttaactcactttcgcccccagcccttgtcgccgtatcgcgcgggtactgtggcgaaggttgtgggtggggcgaaagtttatagaggctatggtggcctcgtatccccccagcttggaagcaacttatgttcgcccccaacccttgaggccataccttattggtactatggcgaagggtgtgacgtgtggcgaaacctcttcgcccgcaagcccttgacgccgtaccttattggtactatggagaagggcgtgggtgtggcgaaacctgttcccccgcagcccttgacgccgtaccatattggtactatggcgaagggtgtgggtgggcgaaacctgtttgcccgcaccccttgacgccgtacctcattggtactatggcgtagggtatggcgtgtggcgaaacctcttcgcccgcagcccttgacgccgtgccatattggcactatggcaaaggcgtgggttggcaaaacctgttcacccgcagcccttgacgccgtgccttattggtactatggcgaagggcgtggcgtgtggcgaaaggtgtccaaaggcttgggcggcttcgtagccccccagcttggacttaactcactttcgcccccagcccttgtcgccataccacgcgggtactgtggcgaagggtgtggtgaaaggggtcccatttcgccttttcggtctgggtcccccatggacggcgccagctgttgtcgaatggacaactatgccatgtcgaaaggcgtggttctctcaacagtagttggaatgtaaaagcaattgtattgattcgtgaaatattttttggggatcccccattacatggccctagaggtttatttatagccttagcacaagcttgcaccttctagggtttagggttacaggggattttagatggctgcccttatgaaagggacatttacatgggtatgcagtgtcatttgcacatatgggcctttaatgggctgataggctgggcctggtctatggcaaacgggcctaaaaggccgggggcggcctgttgggcctccttgatgccgaactcgtcatggcgaagtctttgtagttcacccgagataccttcgcccgagatgcctttactttcggaataccgacgcggctttccagccttcgccatcttcgcttatggctttcgccatagggcttcgcctgaatggccttgacgtctttggcttgaatccttgctggtactatagtttcggcaggtccgaccgaagggcttcatgacatgcctccaacaatatatattcttgtcagtaacattcgcatgtgcagtgtgttgtgttcatggatgtcatcgttacttccattcatttgggttgttaaggacatgcaatataatggtattagacgcatagtagattgtacgtactgatggtattacaagaaagcatgatagtggatgcgtgtgacaagcttgaaatggaaggcatcagggattcaggaagcacggtcatgttttgtgtgtcttcatcttactaaagctgcatgcatcctcagatagttagagcaacaagttactgttgtcagattgagtcggctgaattattgtggcatagcctatttgccttggagaaccaactggagcggatcttgtaatgaagggttcagttgtttgcttacttgagcacaactactgcaaaccaactattgtggtcattaatttttgctttacagtgaaaaccaataatttgcgttatgcacataacgtataaatggcatgcttgttttgtttctcatttcttttgtttaccttaaataaaacatgctgacataatgggttttgctagaatttgctctctagctacatcaattgtttctttcatctggagagataggcagaaactagaaacagagaaaatgaccaacaaacaacatactcccttcgtttctaaatatttgatgccggtgatttttttaaacaagtttgaccgttcatcttattcaaaaaaatttaaataactattaattcttttcctatcatttgattaattgttaaatatacttttatatatacatatagttttacatattttacaaaagtttttgaacaagacgaatggttaaatatgtgctaaaaagtcaatggtgccaaatatttagaaacggagggagtagtttttttccagctgcaacactatggatttttgtaattttcttcattgccatatagaggacaacaaaattgatttgtggccggtgagatctcatccgtgagcaacagaaatatacaagcaggtacttcaggaactataaaaaatttatctaagaatattcggagttatagaaagcgccaccacaaatcagatgagaaatcatggatacaaggaaaagtgcaaaacacgatggcactgatatgccatgcatctgtatgaacagcctcaattcgatccattggtcttgacgattggctaatgaaggctgatcgtaccaaactattctcaaattgaacccacataggtggggataatttacagtgcatcagaattcagaaatatcaggtcaataagtagcagtcaccttagctatccagtagccacactccaggcgcggaagttatagaggcagtggacatggtgctattagatcgagagagaataatgcacgcgagcacacatgcacaaacttggaatggaagacctcggggatttaactcacgcatcattagatcatgtattcacgccttgtaacgctcgagcagtgctcatccacaaaccattggattgagtcgccagctgtggagggctgttgagtgtgttcatcattgtcacgcccagaaattcactagtaatttccgaacttatttgtgcataaaatcctcgtccaggaatcagccgaggtacacaaactgacaatttaatatacaaatccatcataataataacgttacatacttacaaaagaaaagaaaacagcagcggaattacagtctagcgaagctccggctccactcccacaggcaccgattgggtaacttgctggatgttaacttcattgctttccttagtctctgatttgatctcaccaccgatgttcaactgttgcgactgtccttgacttgcagaagaagatccaccaatttggagtggcttgatacgctgcctctggctactactttgtgcctcctggaaaacagtcattcttctcttacggttgtccatcctgttcttcttgtcttcaagtcgaattgctttgtcaaccagctgctgaaaatcaacatagtcatgtgagatcaacgtaactgacagttcatccttcaggccttccaagaacttctcctgcctttcctcgtcagtacgcacatcttctggagcataacgggccagacgattgaactcatgaagatactctgccacggtatgatccttttgcttcaatggcctgaactcacgcttcttcaaagcaacaactcctgcaggtatatgtgtcttattgaatccttttgtaaactcttcccaagtgattggttgtcctcctgctctgttcatccggaaatgatcccaccattctgaagcagatccttgcaactgatgtgaagcgaacacgactttctcctgatctgtgcactggagcaattccaacctcttctcaatagtgtgcaaccaatcacctgcttccactgggttggtagtgctagaaaaggtaggcggcctcacacgaagaaaatcagctagcttgttctgaggcggtggagcattgttgttcccttggttgagctggttctgcatctgttgcatcatcatgttcattaactaagtctattgagctagaacttgagccagagttgggttcccttcattgttattgtttccacttccactggcgcgagtgttcaccatctgttgcatattggagaagatggaagcagagaggttacactaaagacaagaccttaaccaggttaacactgatctgatgtgtgtagaccattatattgttcaagttgattaagcaagcaacccagtatagttacacgctcatcactgaacaacaccaatgatgggaatgcaaccatacctacacacaagcaagcaacaaacgttctaccctactaactgtccttcaaggatagtttggcggcataggttctaaggtaggatccaaacttcattccatcttgaccacttggcacttcggttcatcctcgatccacttgactgacctccataggttgaccacatcaacgtcttctagtttaaacaactagtttcagaactactcaagttgaaagcaggaggggagaggatgataaaatgatttatagagaattctagagaaggaagaaaggaaaattttcacaaatcatgttttcggaaaattagtccttaaggtttgaccatttggctcatcctacagtcaagatggctctgataccaacttgtcacgcccagaaattcactagtaatttccgaacttatttgtgcataaaatcttcgtccaggaatcagccgaggtacacaaactgacaatttaatatacaaatccatcataataataacgttacatacttacaaaagaaaagaaaacagcagcggaattacggtctagcgaagctccggctccactcccacaggcagctcaactggggtataagccaaacgtcttctcctttgcaacttgtcttcaattgaggtttgattgattattgcaaggtgagcatatgacatactcagcaagccacacaacaaatatgcaagtacacatggataccaaaggatagcataatatagggctcatttgcaaaagcagcatttagcaaacatttgagaattataaaacaatagagtaattaatcatcaatattaatcaacactgaacagcacacccatgctgcacaggcccaaccatcctgaacaaccatacccggctgcacagatctatctccaaaccaggagctaaacaaattattaccaattatatcatcatttattatggtgagaagtgtgagactaatcacgaaagacattgctcaactcgcccataaccgcgggcacggctattcgaatagttttactctggccagaggtgtaccactgtacccacaagacacagcctcaacatcatgtctaccatgcgtcgcgatactggaaagtacccgaatagaggctgtgacaataccatctgcacaacacaactcaccacagtgcaccattcccggatcatagtcacccccttataaacaaggcatggactccccagcgaccctcgtgggcttatctccgccacttctcagtctggtgctccgcaatgaaccatgctatacaaaacgtaaagccgttgcccacgctggcttgtggttggcacggttaatgtttcacaaccgaaaatcgtgaaccggtccttaattgtcatgagcacgactctcaaaaccatgtgctcacaacccaccattatcaagttttagttggcaatttaattaattaaccaatcacgattgaccatcgtgaactatcattaagccatcattaaataatagtgaatcataagttatcccgattgtgtgctaatgtttctaagcatggctaagcaactatgtctaacatctagatgaaccaatatatataaagctcaactagtcaaattataatatcccaaggtatcaaggaatagaataatcaatgcaaacaggccataacaaaggaatagattcacaccacccagtaacattcgaaaataaatgcacagttgaaataaatagagaatttaaatataggatcaacatgctcaaaggaactgtgcttgggatctgtgtgacttgccttgcaataatcggtcttcaattaatcttcttgaacacttccggcgctctcacgaaccttcgaaacgacggaaacgacaagctaacacgcaaaacaaggaaaacagtaagaaactccaaataaacaatacatataaattcaacaaacatgtaaatcataattttagatgaattatgagacttgaacgacctcattctgacttcatatgaattaaatatgaattttacaagatttaatctaattaaagcccatttaaaaaggattaaataaatttaattctatttatggataattttaatatgtagatctttattttatacaactttagagacttgaaccaactaaatccgagctaagatgaattagttatgaattttcaaagattaaatcggattaaatcatttatatggatttttattgaattatgacgcaataatgaattatttttgaaaagaaaaagaggattattgcgtcagcggctcgggttcacggtggaccgggtgcacaggaacggtctacggaacggacggtctagatcaaccctatccacaacgaacggccgagatcgatccagaccacggcggtccacgagacacggcgacgatgacgtcggcgatgacgtcatcactggcgacggctcgggtggcacatgctcgccggcgaacgacggcgcggcggcgcgaacggagggcaccaacgggtagagggcgacgcggcgatccttaccgaggcatgaacggcggcggacggcgaccggacggtgatggctacgaggaagaagcggcgatgacggtcgggttgacgacgacggtggtctgccggcgatgacggaggggcggacgagattggtgacggcttggcgaccacggcggtaacctccccgagcggtgacgacgagcggagcgacggcggcgcacggctggacgaacggcggcgacggcggcgcacgggctcacgaggctagggtgctacaggcggcagcgggcaaaggcgagggtggcggcgagtagaggagacaccgggggtccttttataggggctagggggcggcggcgaaggcccacggcggtcggcggcgcgaaggaaagtctagggttcggggaagaaaatcgaatccggttcgatctcaaatccggcgatttccaaacgaaattagccgacgattccaaaagggaaaagatagagtggatcgcggggatcatttcccctctatcgattcggccggagatggaaaggagcgacggaatttggaagggcggcggcggcttgcgggtggctagggcacggctgcggcggcgtgaggttgacgacgaccctgacaggtggggccctcctgtcagcgggagagagagaggagagcggtggctcggttgcgggccggcttgggccggggaggaaagagagagggttttgggccgactttcagcccaaagccaaaagaggattttaaaacctttttcaattataattattcatgaaatgcaatttcatttattaaaaatacttccttggctcaaataaatcctagaaaaatctaggaactatagaaacaagagaagtatttaacaaaattttatctagcccacttttatattgagatttaacaaattaaaattagatcttctcttctaggcttttaagatcatttctaataattcccttttagacaacaatttataaattaaggattttaaacaagaaaagtacttaacataattataattagatcattaattgattactaattactgaactgttctttgtatcatttaggaattgagctctgagaaaaaatcagagaaaatttcagagagtataattaatcatggagaatttaataaaattaaatccaaccatgctttaaatttagaaaattttatttcccacatttaactttacttgaaaattaaagaacatttaatataaattctattattaatttattagataatttataaatcctgaaacgaaattcaggctgtgacatcatgcacatcctgccagcatggtactgcgaagaaggggttctagggcacacccctagttagtcatacgccctttgctatgtcttctaggtgcaccagctgtgaagcctacctacttattcgcttcctcggtgaatgaaacgttgtgtttgtagaaatgaattaatggtagccagctttcatcctctatgttatcaaaatattcatatgcaacaattagtgttataagcaacagtgttgttagtaatcacataaacccatgaatttcgagcagaggtattgccaaagaaaacatgctcccataacgctgtagttgaaatttgctcaccatttcatggattgattaggtttcaagtttcacctccacatacttgcgtgaattggcagcacaaaagatgaactaaaaaaccaccgatctttgtgttgaagcatttccggtttttcctattgccatttgaaaacaaaatcgatatggggccagtatgtcctaaattaatacacgccatagacaacaacgacatctatcgcacgtcgtgatcatggtgcacgacttgagttgtgacgcgcttggtcttgcttcttcacaaagtgctcagccagccagcaaaacggagggatgaacagaggaatctagatacccaaaggaactcatcacatgattacaacgaaatctaacaacagtttcgcaatacaatttcatttaacacaacattattagtttaacataagaactagacaactagttccttaaccagtcataagtaaatcagctagcaggtgaagaacacatggagaaatgccaacgcagacacgaatagactacagagcaacatgtgaaatccaaccatatgggcctcaactcctttcgcagatcaaccaagaatgtctcgcatttgaacctgacaatcagaaagagagcatacgctgcaccaaatctagactaaagacttaataatcaactagatataatgtatactttgttgattatgtgggcatgcatatgtttcacaaactcaacatgtaaggcatcgagatcagtcagcactggtgtttcccttaccactaggcctgcttttgctatatggtacctctcctccgacgagtcaggagaacgaatgggtggacccacaaatcgacttataggtcaattacctaattggcctataagtggagttgcgggtcaactcacctacagctatatgaaccattgtaaccataaattaatgatgtttagaaaatatgtggtaaagtctatacagaaaacttgaaattaagctaacatttttaattttaaattatttatttattgcttacaaaaactgcaaaaacatgatcacacaatgacacagatagcgtaaaaaccaagcttctattgcggttattataattggatacatgccattaaaaatttaccagttttgaaatatgccactagtattgatgtatttgaaaatataccattataatttcacacatattcaaaagataccactacttaccccttggatgcatttcccaaaaaattggaccaaaccgccccttttcccctcttcttccttcttccctttctccttcctcctctcctccttctcagcggcgacgtggcacgtcggtggtagcagtagcgtcagcgcggcgcgtcggcggcggcggtggccgcatcagcgacggcgcgacacggctcggtggcggcagctgtagcagcggcggcggcggctgtggtagcagcagcagcagcgcagcggcggcggcagcggcaacagcaacagcgcagcggcagcaagtggcggctgcagcaggagcggcgcggcggcagcgcgagcagcatcaggagtggtggggacagcggcggagtgagcggcacggtggcggagcaagctgcagcgcgcggcggcatggatagcagtggagcgagcggcgtagtggagaagagagagagggtagaagatcgggaagagagagatagaagatgagggcatttttgtccaatacatgcaaaatatgtgtctcagtggcaccactaagattaggaacaagtagcagtggcatcgttacaaatatacatattgtaatggtatattttaaaccggcaaaattttagtggcatggatctaatgaaccctatatttttagttgaatgaccagggtgtgctataaattaggagaaataattgttgcaggttaccaagaagagtgtgttttttttttgggcatttgcaaatttgccaccggttttttcaatattgcaaggatgccactcgaaggacagttctagtggtatttttgcaattttctagtggcagttttacaataacgattcaaagtagtggtaaatttgcaattgctcctttatttttctgtttattatggtggacaagagaaaagaaccttgtgaacgacaaggaattacatgttaaaatatagccattcgatcaataagtggttgctagggctattttagttgctagactgggcagtaaaccagagcaagcggcatacttacgagactttgagtataggagttaactagtagaactacacaaaacccaggatggaaatcacttcaatttcataaacgatggtattatgtatatacccaggcagctaacctatacctactctttgaaccgaagctgtcattaggcattaattcgatgcggctgttagtagctcacttttgccgattaacatctgtggggctgaacggaaccaccagtgaatatgctagccacacgctggagatggagggttcagtcactaattgcatactcaagatatggatattccgggccagacatgagttgatatggattagaggcaactggtaaacaataggaatgagagatggatcatttctttctgtctagttaattagttactacctactgtgatatattaactgctaaaaatatggatgacacatgagaccatactataccctaatcataccttaatcaatcttatgttagtcatctgatcatttgcatgagccataccctgcctccctcttaatggatatctattcttattatgcccatcgtagggtctgctagtccaagtaggtggttccaaaatgtaccctgattagccttacatttgtcgatgaccgtctattaaactaatagatgtgttagtattaattatctctttaacgagatctacatggttcttcattgatagatataaaacctccataatcataataatggattataagccccacatacctccatggcaggtgatctagacaagattaattcctaatgtacgtagaaattcttctctgcacgatacctcatgagtcatcacagctctgacagaacagtagcttgaggtatgtcacaacaggacccgacgtagcgcaccaagagatttttccaagctagttgaacccctaatgcattccattccgagttcatgagactctctactttttgtgttaggcattctatgtcctaagcttgtgttgggtgttccatccatggatgctaagccagttgcgtgcgtagcttggcacattggcatttatccaccaattatttatctaaaaccgacacatataaagtatttttcatcttttgttagtataaaattaaaatctggcacctataaccagtcataggtatgggcatcatatgagtccacaggtgccagtacagaactaagaaccggcacctgtaaccagtcattggtatgggctcctgtaaccagtcattggtaccggcacctataataacgtcgttcatatatgtgtttattgcgtacatcagttgtgaattgctcggcttccatcattgtgcaagcagggaagaaaggcagccctctttgatctatggctccaatgtgttgacgatgtggcttaatctattggcttctttaaaggagttaatatttataatgggtataccatctatatagaaagaaatgattgattaatttactggctttttaataatatctgttttatattagtgttaaggtaccagtaccgcaaaataaggacgaacctcctaattgctcatgaaaaacacactattttagcagtgtagaattgcctagattctattgacttatgttattggcttcaatgcatacacccaacaagtactattggcgcttctaaatagttggtaggaccagatttggcatcaacgagcataatttggcatcaacatattcatcctgcacgcaatacaagcataattaggagtttgctagctaaactatggccgagtttagatacaaagtttttcttcaaacttctaacttttccatcacatcaaaactttcctacacatgaaactttcaacttttccatcacatcatttcaatttcaacgaaacttccaattttatcgtaaactaaacacactctatgaaacaaccaccgtaaggtagttgaatagttgattctcatggcatagaacttcttctcttcacgattcctcatgagtcatcacaactgcgacagattctgccatgtatggctagccacagtagcttgagctatgtaacagctggaccggaggtagcaccgagagatttttccaacctcgttgaacccctaatgccttccattccgagttcatgagactctgtaccgtttcactatttgtgctaggcatgctatgtcctaagcttgtgttgggtgttccatctatggctgccaagccagttgcgtgcgtggcttggaacattgatatttatccaccaatggttccacttttgcgttgccgtggagttaagaggaggggcccggcagaaacattttaaaagtagtgtacccttgtgctaaatttctcgtggttcatctgaaattttgatcttctactactcgtggactcctgccaagatatcttcccgtaaaagcaaattatgtgaatttagaaaaaaaatgtttaaattccaaaatgtttttatttcaaaatttcattatgtcatagccaaaaatgtttttttatatctccatgcaataactagaatttggcaaaaagttatacaaattatattctttgtcaaccataagtatttttttaggaaaaatttgctataggacactcaaaaatcgtttaattggctgagggagaccacaagaacatgtatttgctgtaggacatcgcataagtgaaatcaaagtgtgttttgactatattcatatcacgaaacaaggtagtatatgtgaaatcaccgtgtgttttgattatattttgatgatgaacaattggctggtatatattttttttattaaagcacagtgagggaggcccccacggtatatgttaggcttgtatattattgattttgatattttgagattattggctgctgctgctgctgactaggttagcccggtcaaaccagacagtggtggccggtcagaacatcatggtttgtgcagttagactggccagcccgactgtctgactggccggctctaagttggttttcgttttgggttgtgttatgctcatggttagtttatgtttatggtttctacacgatttctacatatgtaatagtgttatgtgctaatgttgagtcaagtcggagagaatttgtgcttggatatgatttcttgttgtttgaatcatgtgtaggtgtcttgatggctcgggagagctttatcggtgatggatcaagagtcaacttggaagaaaatgatgtccacatgatcacgatatcatatgggatgcttagtctaaagaaccatgcacgtggttgatgtagattttatgtggcatatgatgggagattgtgtgcgtatggaataaggagtcaaatttggaaggagtccagacttaggaagaatgaaattcaaatcgtaaagttaggtttgtgacagcaggctgcctacctcggatataaatagaggggctgggttgagtcctcccagtatcgattatgtgtgagtggagtttagggaaaagttagcgtttcgagtttggtcaaattttctaagaggactattgttgttgcactttgtaaactttcatctacatagagaaatcattgatttatgttgactcgggtatcggtgactactgtctggtcagactgacgggctcagggcggtttaaccgaaggcagcgaagggggcgacaggtatcagcagggcagtcagaccggaacatcatcaccggttagaccggagatctaacaccggtccgaccaacttccggcagatttcgagggtaactcttagttctgcaaaaagttctcagttttagtgttggtaccatttaccccgtgtaggcttagttcttgttatttgatcctacagtttaatcgtattatatttatcaatttagaagataggcagcgtgaatgcatttctttgacttcactgtcttacaaacaaatttctccttgctgatactcaatgaacgaacaaaacaaaatcattctaaaaaaacatatttctcttttttttactacgtataattattgaacatcccttgaacatatataatatcaagaaaaaaacgcactaagcatctttggatcataccttggcagattcttgcagtaactagcttgaagagctaatatttcattattggtgaactgcatatacaatgttgaatggaagagaaattaatcatctctgattcattttgttcatataattccagatgcaatgaattcttcttgcatccaacttagctacagaggctgcaaaaaatatctcaccagcagataaatatggaagcaaatagaacgaaaccttgatcatctggagattggtgtataccaaattaagattacttaggaaattagatgatcaaatggattgcaccacttcgatgatttcctcatgtagagaccggtacacaatcaacacttttcttcacactagaacccaggctataaaaggtaaacaattgtgtggagttgtggacatgtgtacgccagcgttgccgtagtagctgcagaggcacaaaaacgttgcagccacgctgccgtgatgaatcgatgttctgcacttctgatgaaggctatgaaagcagcccaggatcttttatccatgccagacaattcggatgctaagcttatttggtgattctggagcaaatatataaggcgataaggcttggaaattgctttttgcgtatttatcttcctttatgcatatttattgcgtacatcagttgagaattgctcggcttccattagttgtgaaggcagggaagaaaggcagctctaatgaagggtgatcgaagggtcattctgttatgaaaatagatgcacaaccggcaatgatcactatagaggagatgactacaaacataggaaaatcacaatgggaacatcaccccttcccgtacggcttacaagagtatatataggggataaaagaaagacacctaataggtctcctaagaggaaactaatccgaatatattgtgggcccaaaattcggatcacatatttaacaatctccaccttgagacgaatttcctcttgtagcataaaaaacatcaatcaccaaaaaatacctcatgtaggtaaaatcaccgcgcgccaaatagtctctaggactatactttaacaccaaccaagcttgagcaaagctcaaacttagtagcaggaactgcctttatcatcatatcagctgggttatcatgagtacttatcttgcataccttgacatcaccttcggcaatcacacctcgaataaagtgatatctcacatcaatgtgctttgttctctcatggaacatctgatcctctgtaaggtatattgcactttgactatcacaaaatatattaatgcaagacgtaactccacaaagctcagtgtacaaacctctaagccaaagagcttctttacaagcttcagaaatagccatatactctgcttcagtagtagataaggcaacagttgcttgtaaacttgccttccaactaacagcacatcctccaatagtgaaaacataacctgtgagcgatcttctcctatccaaatctccaggaaaatctgaatccacataaccaataagtccatctctagatctcccaaactgcaaacaagcactagatgtaccacgtaggtatctgaaaatccattgaacaactttccaatgctctttgccaggattagccatgtatttactgacaacactcaatgcatgtgataagtcaggacgagaacataccatggcatacataagtgaaccaactgcacttgaataaggaactctagacatgtactcaatatcataatctgactgtggacataaatctgaagataatctgaaatgtgcagctaaaggagtactcactggttttgcatcatgcatattgaaacgacgaagaactttttcaatataacctttctgactaagatataacttgccagaatgtctttctctagtaatttccatactgagaattttcttcgctgcacccaaatccttcatctcaaattcactactcaattgtgccttcaacttttctatctctgatttatcttttgcagcaatcaacatatcatcgacataaagaagcaaatatatagctgaaccatcaacaactttaagataaacacagctattataattggatcttctaaacttctgagaaagcatgaaagagtcaaatctcttataccactgtctaggtgactacttcaacccataaagagcgaattgaactatgcttcacaacaggggaaaagacatcattgaaatcaatacctggaatctggctataacctttagcaactaaccttgctttgtatcttgcctcatcactgggaaacataccttcctttcttttaaagatccacttgcaacggataggtttcttctcctttggcaacttcaccaattcccaagtatgattcttttcaagtgactccatctcatcatgcatagtagttatccatctattgcaatcatcagaaacaatagcctcagaatatgtagaaggttcggcattaccttcaatttcttctgttacactcaaagcataagcaactatgttcgcttcttcaatatatctttgaggaggtttagtatttcttttgggcttatcttttgcaatagaacgttttggaaactgctaaacaatagaagaatctgaatcttcaataacaggtgcatcttggttaatagcaacatcttctttttctggtgcatgccctgaactgatcaagtgctccacctgcacacttgctttttcctgactctcaacaggaacattagtagaaggtttgtcatgtaacataaccgattcatgaaagacaacatttctactaatcacaacctttttggtttcaggacaccataacttatagcctttcacaccagacgaataaccaagaaaaatgcacttaatagctctaggctccaatttaccattatcaacatgagcataagcagtacaaccaaatactcttaagtctgaataatttgctggaaaaccagaccataccttaattggagtcttcttatcaatggcataactgggtgatcgattgataagataacaagtagtggaaacagctgccgcccaaaactgtttaggtaaacctgcattagacaacatacaacgggcctttgatataattgtcctgttcatacgctcagctacgccgttttgttgaggtgtgtagtgacgcacaatgccttcagacttgcaatatgatttaaatatcttagaacagaactccatcccattgtcagtacgaaggattttcaccttcctttcagtttgtctttccaccatagttttccactctttaaacacatcaaaagcttgatatttgtgcttcaagaaataaggccaaacttttcgcgaataatcatcaacgatagtcataatgtaacgagcacctccaaaagatgtcttacgagcaggcccccataaatcagaatgcacataatcaagaataccttcagtagtatgtgtagatgtgttgaacttcaccctcttatgcttgccaaagatgcaatgctcacaaaatttgagcttcccgatgctttgtccatctagcaatcctcgcttgctcaattctgccaaaccaatttcactcatatgcccaagacgcatatgccaaagattagtagcatcggaattagataatgaatcagaaactgctgcaacattacctaatatagttgtacctcgcagatggtacaggttggcagatttaatatcagctttcatcacaacaagagagcctttagttaccttcaaaattccgtctccaccggaatatttgtaccctttgcgatcaagagtacataaagagatgagacttctcttcaaatttggaatatgccgcacatctgacaatgtgctgatacaaccatcaaacatcttgatctgaacaattccaatacctgcaacctcgcatggtgtatcatcacccatcaaaacagtaccaccttgcacagcttcataggtggcaaaccaatccctattcgggcacatgtgataggtgcatgcagtatcaagaatccactggtcactagtttgtgcacaaccagcataagcaacaagcaattctgcatcagacttctcatcagtaacaactgcggctttaccttcctcttctttcttaccttttggtacatattttccggttctcttgtctttatcctatagcttccaacactcagagatatcatgtccatctctcttgcagtatttgcatgacttatacctgcctctggactttgatctcccacggtagctacttgaacttttatctcttgatttgttgtttgtgttcttctcctgttgcctgccccaaacaaccaagtcttatgcttgtgaatttgaaccttcagagggtaccatcttcttcatcttttctttggcatgcaaagcatcataaacttctttcaaagttagagtatcacgactataaagaatagtattcctgaagtttgcatatgagctaggcaatgaacacaataaaataaggcctaaatcctcttcatcatactttacctccatagactcaaggtcagcaacaatttccttgaaagcggagagatggtccatgacagacccatcatcttgcaacttgtgcaaaaataacttttgcttcaggtgcatcttactggtcagatccttagacatgcatatttgttccagcttcaaccacagcccagcggctgtctcctccttaagcacctcctgcaaaatattatttgatagatgaagatgaatttatgacatagccttacgatcccttttcttctcatcgttggaccaatcctgtgtcctcttgtcaaatccagaaagcgcatcatcgaggtcttgctatgcaagaacggctcgcatcttcacttgccaaagtgagaatcttgtgtctcggtccaagagcggtagatcatacttcaaactcgccatgggaattaatcctgaatttgctagaaagaaattagggtaaacctagcaaaacgcgaaacctggtacacttctcctgtgcacgtagcggtagatctgaaacttcctggtacacaagcttgtgtgcgcgtagcaattccacgtgaatagaaaatcacgtgaacaggaacctgatcgcttccctcgttgacttccttttcagactcgggaaccgtgcgatttagtggatgtattcacgccggctgctactcctggacgtgcgcgtagacggcttgctgctgctgcttgccaatctcctgacgcgtgtgccgtttccaggacgtgggctactgctgccctaatttcgcgcaggcggtagggatgacgccgatcagatcgatccggcgactcgatgatccggcgcctcgacgaatcggcggcggctgcgtgacgtgtagatcgatctccaaagctctgataccacttgttatgaaaatagatgcacaacggagacacgaattttacgtagaaaacccttgcgggaaaaaaccacgggcgccgaccggcaatgatcactatagaggagatgattacaaacgtaggggaatcacaatgggaacgtcaccccttcccgtacggcttataagagtatatatataggggataaaagaaagacacctaataagactcctactaggaaactaatccgaatatattgtgggcccaaaattcggatcacatatttaacacattcgaacaaagatgatcttttgatccaatggctctaatgtgttgatgatgtggcttaacctgttagcattttttaggagttaatataccgaaagaaataattgattactagaggtactggtattccgacttctgagtaccaaacatgtatcaacccagacccgcctcactccacgtcctgtcattctgctcccaaccggtctcgcccccacttcattctttccttttttttccaaatatgaatcaatccaccatcgcagcctagaaatcggtgacgcgccatggaggaggacgacggcaccgtggcggttgacgccgatggctagcggttgaatcgaaggcgctgcttcggaccttgcggcaagacatcgggcaacaccttaaccagcaaggaggtgttcacttgggccaagagcaacaaccgtcggctgctccatgtcggtggcattgacagaagaagcaagtaagcaaatgatactcctatttgcatatatatactctccgtcaccttcatgcatgcaaccccaatttctttttgcaaatcaaattaatgtgcaatctcgaatattacctgatcagaattgatgggctacaaaagttctacatttgtagatcgtactccatgtggctagctgtaaaggatagggtagagtccgccgatcatggaggttgtttgctatttttcttttgctcgtcgtctctatgacatgaacaagaatgtttttgcatatttttgtgcttgctagatgatggatggttgctactgtgtaacgccgagctcatctctataccacaacattacatccttccttgattccatcgtcaactaacgctcgccacccggttgtcctctccactacgagtcacaagacacagactagcctctccatccatatagcaagatctaacaatcctaccaggatctcagcttcacgatggatttttggctgaatcattttttcttttctagtttgattcacctatgagtaattttatcactcgtgtgtaattgagcctgtaaattttttcatttgtactgctattttgtgatacaaattaataattctcttatattgtgtattgaacacatcggttaacataatactacatggtggcacgagatcatgggctatatcgagagtaatgtggtaattgttttactcgcagaccacaaactctagaaaatatttataacttgtaaaagaattactagcattgtaagctggtagtaattcttttacgaccatctatgaatagtgccatacgatgtgggggcattcatgcaagtacatttgttacatttgaaggatacattcgtgcgagtaaatttgttacttttgaatgagtagatctgggaggctgggagtaaacggaaaacatcacagagtaaattcattacttttaaaacatgggaatacactaaaaaataagaaaacgtcgaaagaaaagaactacatgataaatactttactaaaacaaaaaaatagaaaaactcgagagtagaaatgaaaaacggaaaaatctagctggttcattttttaccaggccgtttgataaagcgtggatgagatggaaaagagaaaaaaaagaaacacaaaaggtgaggtggtaaaaaaaaagaccaagaaaatttgggatacgaaggaaaggtggagtggtaaaaaagggaaaactggaaggagggatctttgtgtgaaggtcgaactaatattcagtgcgcagtgccatatttgcgccaccgttaattgatctactggctttttaataataccgtgttgagctaccattaccacaaattaggatgagcatcgttaggctaattactcatgaaaaacacattatttcagcagggtagaattaccttgattctattg

SEQ ID NO: 28512 - DNA, 3455 bp, Oryza sativa
taattactcatgaaaaacacattatttcagcagggtagaattaccttgattctattgacttctgttaattttggcttcaatgcaaacacccaacaaatagttggtaggacatgatttggcatcaacgtgccttctgccagaattggtcagctatatatgcgccgagaacttgttcaccatgcacctgatgctagtataataaatagtttgctagccaaactacgaaacaaccacctgcattgcgaggtgaatatatatatatactcaggataggaggcatatacgggagtcgatccgcatggcgttagatcgttactctatgcccgttgatgcagaggcgggctttcctcctggaactatgagagccgcaagcaatgcaggccacaatttagtggggaatatgttgcagcgtgcatggatgcataccgagtaatctcctggagattggagatgaatcgcaagcactctcgtatctctaggagtgaaaagtgaaacttgaaaaggttctagaataagccacgtcactcagtcaataatagccattggatatagctggagtctataggatcgaatcacaataactaagccaactagagggggtgaatagttggtatacccaaaaaccgaaaacttttagcggaaataaaaattacactcgaattcaacggaagtcggtctggccatagtgaatgcgccggtctgaccgcctgatgaatgtcggtctgaccgatgtagatcgatcggtcgaaccgccgagatcgcctgctgccgactcctgtcgccgccggtctgaccgccgtgtgcccgctggtcggaccgccgaaacccggtgaaacacaaatcgaagaactcttaaagtagatgacaactttattgattctctctatgtttacaaagtgcaccaacagcactccttacaaagtttcgactaaactcgaaaccctaactcaaaactcaactcaattgctctcaaaagcgataccgggaagcctcacgctccacctctatttatacccgaggtaggcagcctaaagccacgaaccaaactcatactaggagtcctaaacaccttaggaaaccctctagttcaagacacaaactttacataaccaatcataccaaatttggactccttccaaatttgactgcgcatcccatacgcacaatatacctccatcgtatgccacatggaatctccatcaaccacgtgcatcaactctagcctaagtatcccgcatgatctctgaccaccacgaacgtcgtcttatccccaagccgactcccggtccatcaccgcaaatactctcccgaggcatcgagtcacctacacatgaaataaacaaagaaacgatattccgagaccaagctatctccaccttgactcattagtagcaaacaacagtattacatacgtatagtatcgacctagaagccataatcatgaaataatcacggatatccaaacaaacaacccgaaaccgaaacagacacagcgtcggtcggtcagaccgcgggctggccggtctgaccgcgcgtataccgccagtctgaccggcacacagtgcccggtctaaccggtccacataaaataacagaacctgcatattcacctgtaaatccaatcatctccaaaaccacttcgtgaataaattccaaataacaaaaccaataatctccaatgacaattgttcacagaataataatcaaaaacacctttgattttacaatctcccccttgatgaacacattggcaaacccatcaaaaatgtttttgtatttggaaaaataaaaacaaaagtggtaaaaagcacacttcgtacaaatgtacacatcgtgctaaaaaatccaaaagaaaacttctccccctttttaaaagaaagaaattccatcatgaactaaaaaatatgctcttctcaacaactccaaaaatcttcttccaaaactcatctcttctcccccttttgacagggtaccgagctcatcaagcataggacctatgttcattaatgtttaagagcttagcatacatatagcatatcatgtcatgtattgcaataaaaagaaaatgaacccatctccagtataacaagcatgcataaaagtataagcatgacccaaagattttataattaagcttgaatcaacagtcaaaattcatgatttcatacgatttataatgcaacatcttaacaagcacataggttgaagaataaacactaaacacatatacctattgcatttattactctttctacacatatacctattgcatttattactctttctcaaattagcttttgcacaaaacaaccaagagaagtttttaactttttgttttctttagcctttttgctcatatttttctcttttattctgggtacgtccctgtcgtcaacactgtttccagggattcggcacccattattttgctcacatcgaatacgtccttgtcgtcaagactgtttccaaggattcggtattcattttttttcatatttttattctctttttcacaatgagcaattaaagatctttgagcaataacaattcaataaagcatatatataaagcatttatagatcaaaccatatgctagcatcaacattgcatatttgcttaattcaagtatagaatttaagtgtcatgcatcatctcccttaaaagcaacatgtaaatctcatgaaaagactagaatacatgcaagctatgcgagacaaataaaccttcaaagtattgctagcatgcacaagaaaataccacatgtataaagaaagctctctttttctcaatttttctcattgtcatattattgcttgataaaaccatgaggtacaaactcccccttaaaccatgccaaaaggatgaattatgcccaattcaccacgaagaaaagcaaatcgattagaatccaaaggtttagtgaaaatatcagcaagttgcaactttgtgtccaaaaactgcaattcaacatctcccttctcaacatgatctctcaaaaagtgaaagcgaatatcaatgtgccttgtgcgtgagtgttgaacagtattcttagcaatgttaatagcacttgtattatcacgaaagagaggtactttctaaaaagtaagaccataatctttcaaagtaaataaaagtcaaaaaatctgtgaacaacatctagcagcagcaacatattcagattcagcagttgattgagcaacactagattgtttcctagaagaccatgcaattaatgatgtaccaagaaaatgacatgttccactagtacttttcctatcaattctacaaccaccaaaatcagcatcggaatattcacttaagtatatagaaaatgaagtagaataccaaattttaaactcaagtgtttgattcaaatacctcattattcgcttgaccgcttgacgatgtgaaacacgaggagaagcttgaaaacatgcacacaaacacacagcaaa

SEQ ID NO: 28513 - DNA, 581 bp, Oryza sativa
caaatgtgaaactttgggttgatgtccaaatcgaagttcataagaagtttttccaagtttagatctcaagaaaacccaatttgaaatataacatgcagtgttaattgcctcagcccaaaattttctaggagttttatactcatccaacatcgttctagccatctcaaccaaaacacggtttttcctttcaacaacaccgttttgttgaggaacacgaggagaagaaaattcatgttcaagacctcttttattgcgaaattgttcaaaagaagcatttttaaactcaccaccattatcacttcgaattcttttcaaagaaccaggaaattcaagatctaatcgaagaaacaaatcatgaaagtgttgaaaagcttcatccttagttgccataaagaaaacccaagaatatcgagaaaaatcgtcaacaataaccaacacataccactttcctccaacagatttcactctagctggaccaatagtgtccatgtgtaataactgtcccagtgcatccgtcatcacagaaacaatatgagcatgtgaagaagcaaccatctcagcatgatgacacggtgtacaaa

SEQ ID NO: 28514 - DNA, 1836 bp, Oryza sativa
cgacaatatcgcctcatgctcaatccagagaagtgcacgttcggagtaccgtcgggcaagctgctcggtttccttgtctctgtcagaggaatagaagcaaatctcgagaagatcaaggcaatcgagaacatgaagtcacccacaagactcaaggaagtacaaaagctaaccggatgcatggcagcactgagcagattcgtcgctaagatgggagaacgagggcaacccttcttcgctctactgaagaagcaagacaaatttgtatggacacaggaagccaaagaggcattcgttgcactcaagcgctacctatcaaacccccctgtacttgttgctccccaacctaatgaagaaatattcctctatattgctgccacgccatattccgttagcactgtcattgttgtcgagagagagaaaatacaacgaccagtctattacgtcagcaaagctctccacgacgcaaagacaagatattcctcagatccaaaagaggatttacgcggtaatcatgacatcaaggaagctacgccactactttcaagcccacagagtcacagttgtctcctccttccctctcggtgaagttgtgagaaacaaagacgttgtcagccgcattgcgaaatgggtagtcgagctgagccagtttgatgtccactttgtgccacaaaaagccatcaagtcccaggtacttgccaacttcgtagccgattggactatgcctgataacaaatcagacaaccaagtcgacaacgaaacgtggacaatggcgttcgatggtgcactcaacagccaaggagcatgggcaggattcatcttgacgtctccttccggagatcaattcaagcacgcaatccacctcaacttcagggcgaccaataacacagccgaatacgagggactactcgccgggataagagctgcagccgcacttggggtcaagcgactgatcgtgaaaggggactccgagctagtcgcgaactaggtgcacaaagattataaatgctctaaccccgagttatccaagtatctcgcagaagtcaggaagctggagaaaaggttcgatgggatcgaggtccgacacgtataccgtaaggacaacatcgagccagatgacctagcacgacgtgcgtccagacgagaaccgctcgagcccggcacttttctggacatcctgacaaagccatcagtaaaagaggttagcggcgaagttagcccggccgcccccgacattagctcggaggccacagaggcagaacgcgccgttgccgatatcgagaccacatacgactggcgcatcccactaatcaaattcatcgacagtgaagagttgcccgaggacgatacagaggccgagaaaataacccgtaaagcaaaaatctactgcatggtcggcaatgatctatacaagaaagcgccaaactaggtacttctcaaatgcgtctcgtccgacaacggcagacacctcctccttgatatacatgaaggcatctgtgggtcacacgccaccggtcggacattggtcgggaaagcttttcgacaagggtttttctggccaaccgccctcaaagacgcatgcgacatggtccagcgatacgaagcctgtcaattccacagtaaacacacaaagctacccgtgcaagcgctccagactatccctcctacttggccgttctcgtgctgggggctagatatactcggaccattcccacgaggacagggcggctacaggttcctattcgtggcgatcgacaaattcattaagtggatcgaggcagtacccacgggggaaatcaaggccgataacgccattaaattcatgaaggggatattttg

SEQ ID NO: 28515 - DNA, 1290 bp, Oryza sativa
taacgccattaaattcatgaaggggatattttgcagatacggactaccgcaccgcatcataaccgacaacggcccccagttcatcagcgccgacttccaggattactgcatcgggctgggagtcaagatatgcttcgcctcggtctctcatcctcaaagcaacggacaagtcgagagggcaaacggcatagtactacaagggatcaagacccacgtctacgataggctcatgtcacatgacaaaaaatgggtcgaagaacttccatcagtactatgggccgtacgcaccacaccgacaacatccaagaaggaaatacccttcttcctcgtgtacggctccgaggccatgctccccagcgagctacgacatcagagcacacgagtacaaaagtattccgaagaggatcaggaggagcaacaaaacatcgatgtgaatctactcgaagaacatcgcgaatgagctgccattagagcagccagttacaaacaagttgtaacgccccgattttcgttcgggattaaaaatcaattaataatgcatttttagaaattatattaaaagttaaatcaatttaatcaagtgaaattatagaggaaattaaaaatttcctttaaaaaagtctttggccgggaatattttgtaatattctttgtgccctaatgtactctccggaattttccgtgaattttcggagctcgagaaatagttttaatagcacaaagatcattgcatcaattaaaataaaaagaaaaaaaaaatcctccttcctctctttgggcccctttcggcccaatccctcctttctctcccgcggcccgtgcgccccttatctctccctctcgggccggcctcctccctcggcccgctcggctctctctcttcctcaagtctgctttacctccctcgcccgttttcccctctctctcctcgacaggtgggacccgaggccccacctgtcatcttcttctcctacctccagctccatccccaaccgccgccatggccgccaaatcctcccacgtcgccgcctctcccgcgcgactccctctcccgcgcgtgcgtggacgcggtcgtcgcccacgtccgcgccgtttccccccactctccccgcaaaatccggccacgtcgccgcctcccgcatctctctctcctcccacgttgccggccggtttctacttctctcgggctcgatcccgcctctcctcccctataaaaacattaaccacacctccctctccattttcccctctctcccaagcccttccgtgcacgaaaaccaccccgccacc

SEQ ID NO: 28516 - DNA, 11694 bp, Oryza sativa
cgccgaatcgccgccgtcgtcttcgccccgtggagcgccgccgcctccctccgcgggcgctccctccgtcgccgcgcctctcggtgagccgcctccctcctccttttcctcttcgccggccgcccgccgccgttccacgtcgccggctgctgccgccggtggccgcatgccgccgctgcgccttggcttggccgggccggcttcgtgccgcgcctgtgcccctggctgccgctcccctcggccgcccgatcggctcaggccgatctgggccgtccacgtggtggacgcgcacccgaggccacgtgtggaccatgtccaccgtgcgccctccccctttgactcgctgacatgtggggcccgcgtgtcggcgccggccgccccttgctgacgtcagcgaggtccatttcctttgtaaaaataaataataattgcgcaataaatcgagtttaattctagaaattcatttaaatggctcaaaacttctaaaattcatatctaattcatacgaactccaaattgggccattcaacttgcaaaattcatctaaaattgagctctacatgtttgtttactttttatgtactgtttccttggtttttattagagtttttcctcgttttgcgtgccagcgtgtagaatccgtcgtttcggaagtccgcgatcgcgaggaaaagagttcggaagatcaaagtgaagaagcaaggcaagtcacacattccccttgagcatgttgatcccaatttataaatgttttaccatttgcaaataaatatgcatgttttgctaattacatgggatccgagtattacctatctgctcgcttgtgccatgtttacttgatatctgtcctttgtcaaacgggggtaataaatcgactagctcatgttacttatgtgacctagctagaactatatgcttagccatgcttaattaccactagctcagttgatgggataattacagtattagacctttttagtatcagagtgagctgcgtgctcgagacatctggccatgcttcatggtcgtaattacccaactaaaatgcgactacatggtgggctgtgggtgcatggttttgtgagtcgcacccatggcaattaaggaccggttcacgggaaaccctggaagacttacagcgcttgccacaagcgggagtaggtaactgcttgatctgaagtatagctcgaccctttcctaggcaccggtggcgagggtgggcgtgatggagttgggtcggccggggtgtccggttgtccagctgccggattcaccgtggcgcaagaggggaccgcccactgccttttgaggggtgggggtgaaaccttagcgtggtgtggatggttaggggagggttatgtgaagggtctcgtcacaatcactcgacatggtgacgtgtgcatcatgggcacatgatgacgcggtgacatgtcggtgggttgtgtcttgtgggtacagttgtgcacctctggccagagtaaaactatttgaatagccgtgcccgcggttatgggcggtcgaccagattcaccgtgattagtcccaccttaataaatcgactcaatgcactgtagtccaggtgggttggttggttgggcctgttcaacgtggtgtagcgttgatcagtggagattcaatattactttaattactcaaccgttttactgttttcctcaataaaatgttttacaactgcctttatgcaaatagccacaaacccctccttgtatccccttgcacgtctgcatcattggtgtggcttgctgagtacggtggttgtactcagccttgctattattcccccttttcagaagtgtagtgcttctgagctgaagacgaagttagaggaccaaggctcagaccccagttgagttttgcctgtggagtggagctgaagccccgctaggatcgcctttttccgctactgctgcttttgtttcggtgtgaggactaagtgcctcttctgtaagtattttgcgctttatttacgtttggaactgtttattacttgtcgttttgtgtaccctggctggtcctggacagggatttaatacacaaaatagtctggaaatttgggctaaatttctgggcgtgacacaagtcctccgccgttaccacgagaagcgcattcgagcacgcatactttcgatcagcgactacgtcctccgacgggttcaaagccaagcagggcgaaacaagctctcacccaaatgggaaggaccttacacgatcacacaagtcttgtggccaggcgcattcaaaattgcagacggtgatggtcgcgagttggcaaattcttggaacattgaccaactacgtaaattctatgaatgagtcaatatcatccatacttataagacaccttacagcatcaagaaagcctatttttaggcgcatattacaatcaaagtgttcctgcccgatgatcccttacccagatgacacctagcgttgaaacctatcctcatgtccctttacgccgtcttgacaaggcctccgaggaacctaagggatcttcggctggggacgcccagagccgataaggccttgtcagatcctgtagagacgaaagaccaggtaagacctggtcgtgtaagagttatcgccgtgcgtattaaccaagacgcgtaatcggaaattaactttccaacttcacggctgggagctaggattagtgcttattcaaccaaggcaggtcaaaggtccaagagccttgtcctctgagaaaaatcctctgacgataaggctgggggctagggagagtgtacgactcaaacgactgactaaagtcgtgaactgagaacatactcttacacatgatatctagagtaagaaggatttgttaagatagattccttttctattttacaaaatactccttacaatttttacacaagtccaaagctatattacacttttccctaagatttctatcacagggtacaaagactaccaagaaggccaacgccagtccatagactggaagactttctccgccaacggcgccatcgacttcgccaggtggtctatctccgccggagtcctccgagaacgagcgaaaccttcatgaataaactcgaggtctaatccgggcggtgatctcgtaggcaagccaacacgtgccctccggcatatcggctcgatcgacgacattcctgcttcaaggcttcgtcaatgcgtttgccgacgccttcgagctgagtacaggccccattcagccacgaaatgtatccggccgccgactcctcaagatctccacggggtactcggagctctctacaaaccttggccatggacgtgcagcaactctttaagtacgagttgaaccacacctcacgacctcggagcgtttccacagcttgctctttctttacttccaacatagttctctcgagttccgctacttcaaatttcgtcttccaatattggatacgatgatctttgccagcaagagcactctcgagatctgttcaatatgggaacaactaagtcaagctgcacttctcttttgagaacacggctgatcaagtcggaggagcaaaaagggataaagggaccactaacctaaggaagtcgtcgccgtccccgtcctcgtggctaaactctgatctacatcgtccggcgacgcgtgtggctcaaacgcaagggtcgggatgatcgccagcgactcaggctgcccacgctgctggacattctcgtcatcaacatctctacaaggaacaaaaaaaggtactagagatcaaaatgctaaagaaaactaaggtgatggctgcacgtgcaaaggcggttagaacccattggagttttatacaagatgtctaaggagtacaagcgagtcaaaatcctactcttcaaaaagggggaggacagattcccccagatcgccaacttcttccatcacctccttacgcgtgtcgctagctgccccccgatccaagatctcgcgcagatcgagttctgggtgagccagcctcacacacgcaaggacgtggcacgccccggtgtagatcccgttggacgtctcctctccgatcctggccgcatgcttggagggaatctcctccatcgccaccgccagctccgcaagagaagacgtcagcgagaactcatcgggattcaccgggatggtagacttgataccgcattccccggcgagctggtgcagaccagtataggtgacccgcaacgagccatggatttccgacaaattgttcccgagctccaacatgcgatgcccgagtccctgccgttgtcgctcattgccggccaccaactccctcatcttcttgaggtcctcatgagcctccacctagtcgtgcgctagccggtcggcgcgctcgttcgccgacgccgccactgacctcgcctccgcaatttcacgaccaatgccgcggccaccagcctcgaggaggcgccccatttcaacctggagctcttcccaggtgaggacggcagccggcggaccacgaccagccacgggatcgctagccgggccgcttggtgtcacctcacggctcccgggcacgaccacaacactcgtcgaggctacagcgggagacgcgccggaagtccctccagactcgtcctgcgccgccttcgcccgcgccgccctacgagaaggctgtggttcagacaaagtttgacggaatcatgagaactcaaagtcattcacttacttctcgccgagcgtcacaagccgctgccatcgtggaggcgggggagacgcgtccgaggcctggagcacgatcgatatggagtgaggtggaagtattctgactacgtgatcaaatgacaggagagcttaccgagggagtagatgcctttcgacgatgtccggttacagaggagaatttcctcccctttgttggaacgtcgccaccacttgttgtggcagcgacagcggcagcatcggacgcctccttggcgaccttctctttcagtgacactgccacctgatagtccgcaagcggcccgatgatatcagtcagaggaagagcctacgctttatgaagtcaaatggcgatctcggaagaaaaacgcagaaggcccacggagaacacttacattgatggcatcgtcgcgttcggccgcccccttctcacaaaggggaacggggacattgctcgtcgtcgtcggaccactgatcatcacttggccgacacgatgtcccacggcttcactgctcagacctatgaatcgagaaccaaaattcgataagtcaggaggaacgcgcacacaagcatgtcagggtaaatgcaagaaagataccccgaggagaaacccgggttgtgtcctccggtccagaatagtcaaaggctggatggtctcgagcctggagcggctggatccatctaccaatgaagtcagcagcgacttcatatcccgacaaacctcgtactcggagatcgtcgacaacatcgatgaaggactgaagagaaggggtcaagaggggttttgcggtccaagacgaaatcttgtccggttgttcctaaggaacaacgaagacaggatccgaatcttctatctgaagatagaaccacctcgtccgccatttgctgcgagaggaagggcactggaaggggatataacgcgacttcaggccatcccgaagtcggaatccgacacatccaaacacgctatctgactccatccaacgcagctcgtagtagaagcgcaagagatcaagaaagggctctaccccaatgtgggcctcacaaagatgcgaaaaaatactaagaaaggcaatagaattggggttcagatggagcaaagaaagaccatagaagttcaaaatcaagagaagaatttcggaaggtggagggagaaaaccgcaaagaatgtagtcctcaatcgcaaccatgcgacctaggacaggctggggttcagtacatcctgcttccctctccatggtcccacgaccgggaagggcaccgtcctcctgaagcttcttcagcgacgcgctggtggaggaagattttccaagatccatcgccgactgcagatcgctggagaaagggttgagattgacgagctagggttttttgtgggaacggagaagacgaaaaacgcttacaggctggaggttttcttcacaacaggcagacttcaaaatggatccccaaaattcccttaaatagacacacttccgatggtgcgaattccaaggaaaggagggacatagccgccgaaaatttctgggtccgttatgcgcggcagttttttagacttcagtttaaattcactcatgaccgttgggcttcacagggtattctcgactatgtcctgtctctacggttcttacaccgggaacgacaacagcctcgacacctgaagtcactaatggttacacgagttcatttaagcagaagtcgggggccactgtcagggttacgggttaggtataccctttacccttcgatatacgctaaatatcggtatggcataactacgcgtatacggacactttctgcatatactaaggaaatccttcacggagtttgtagatggaaagagtcctactcggacaagactgggtcgtcaatgtatcgtgtaaggtccgatgtctccgagtcctacttagaaaccacctgacctgcgatataaaagggacccactgggaggacctaaggcatcgaatctcagaaccaacacaactcccacagcctacgaagtcggagcctgcaggagccaaatcgctggagatctagtcgaaccaactcaattacgatctcgccggatccatcgagttcaatctttccctttgtaacctgtgttttccatcatataatcccacatcaactggattagggctattacctatcaatgggcctgaaccagtataatcttcgtcttctgtttgcttgatgtcgtattacgtagatccttgtaccaacgtatcccaataccctctatatccggtctacgggtatcactcgtcgacaaccgtagtcgagttggttcgactagatcaccctagcgacttggctactgaagactccgacttcgtaagctgtggtggttgtgttggcggtgagattcgatgccttaggtcctcccggggtcccctttataccgcgggtcagttggtctcccagtagaactcgaagacatcggaccccacacgattcagttacgacccagttttgtccgagtaggactccttccatctatggactccatgatgaatttccttaacgtgtacagaaaacatccatatacgcgcaggtataccatatcatatcagtatacgacgtatatccaagggtagagggtataccttatccgtaaccctgacataatgcgtcttgtttcatatgctacatgtttgatcttttttggtgagttgtcatgtataagattggactccgataccaatgcctgtcgctctagttttttttaaaagtgcagattgacttacttttttgtctctccattttgatttttttttacttgctcaaatattttctatcctgctcaaatattttctatcaacattctatattgtttagattttcattttcgcagttatacatgttcctgatagaagtttcatagtcttgccattgtagcagacaacttttcgcagctttaggaggggattttttatgagctgtagttgcaaattttagctaaaatagaatgtttatattggcaaatttttattgtaagcactagttcatactacttcaatgtatcattcttgaggagatatgtgtattttcatgttgtggtggaaacacgtgtcaacaaattttattcccggtatgattatttatagatgtatcaagaaaagatgtacgacacatgaaaaactcactcgacgtacataatggaagcatctaaatttattgactaggctaaggcacatgctttgaggtaaaattttgggccacttagtggagcatggattttatgaagaattacaaggtttggacctatcacaaggaaattgtcactcttgaaggtgacggtaatgcagaagtgaagaggttttcaaatgtctgaggtagagaattttacaattgagttggtagtgataatttcgaggttgattttgatcaggaggatacgctacggcacgctgaatcagaggtgctagctagtcggtacagcacgaggattagacaattggaaggtgctaaagaagtcagcgaaggatctttttttacgatgaatccaagggatgtaataagaattttatggtgttgcgtttggcatttaaacttctcagattgaagggtaggcacggatggtccgatggtagtttcaatgatttgatggatcttagagtttgcttcctaagcctaatttcttgtaatccaacacatgtcaagctaagaaacacatatgtccattatcactaggtgttgaaaaaattcacgtgtgtgtaaatcactgtgtacagtgtcgtaaggaatatgtagacttggacagttgcccctaatgggacatgcaagttggtacaaaacgggtaacaggtgctttgataatgaggttatcgacctagatttatcggtgcatacaaagaaaaaggatccgactatggtgatattacatcagtaacatgggctatatgaccacttaaaatttgtgttactgaaaaccacaacactacatttttgaggctatagtagcacattgttgttttactaaagccttgacatgatgtagttgtaagagaatgtgaaaataaatatagagtaatgtgtataggcagtccttaaacttgtagaggtgtgtcatctaggtccctaaactttcaaaatgcaaattcaagtcccggaacttgtcatagtgtgtcatctaggtcccaaatcgccacaccccttctggatcctacgtggtgttgatgtggcctgccacatggaatgacgtagcatcattttgactgacaaatgggtcccatttaaaatttttcctttttcctttctattctcttttttccctttcttctcatttctatgtgtctcgagcagcagaagaaaggggcaaaagaagagtgagaagaaaccgaagaaaaagaaaaagaaaagaagaaaaaaaaggaaaagaacacatcacatccatgtggcatgccatatcagcgccacgtaggattctagaggggatgtgtcgatttaggacctagatgatatactttgacaaattctgggatctggatatgcattttgagaatttaggagctatatgacacaactctaaaagttaggaccgttaatgcactttactcataaatatatgtataggtgccacaactcagctagtgcgtgtattttgattagaagatcagtattccacacgatatatactttttaggccatgtaaaaaagcagcaactctgaccatctcgataaggatctatacatgtattgtttttcttggttataataataaaataacctgccgatttgaaactgaaaaatataatgattagcaaaaagtaagcgcatgcaaactaacataatttccagactatttgagtaatcatacatatcattgtctccggtgatgaaaactgtacacaaacaaaatcgaatccaggagccaactatctagttgttaagcttataatacaaataacaaagtaggattaatcaaaaggtgcataacagtgtttttaaccaatatacacacgactgctaggtgatgtcacgcattttagactgcattcagcagctgtggtcgggaacaaaccggccgctactgcacgtagaacggagcagttcattagcatatgattaattaagtattagtttttttaaaaaatggatcaatatgattttctaaagcaactttcatatagaattttttttttaaaaaacacacgtttactaatttgaaaagcatatgtgcagaaaatgaggggagtgagttggaaaactcaagtgccgaactcagcctgtttatgaaatgatttggtactgtctattcattcatggttctacttatttgtcacacggatagtacaagtactaccacgtacttctttctttcacattataagatcttttgggttttgagtagatttataaatggattatgcatgtgtttcatatgtgtgtctaaattcatttaaaatgtaaacataagaacaacgaaagtaataattagcaatatatagacagtaaacgacgattaggcagtgatatcatttcagcagtcagtttgaacaaaaattaaaatcatccaacgaaaaggacctatattcgggagcgtatcctatacacacagaccctcgcgtgtacacatcgtgtacaccaactaaaaattatcacaaaaaaatgtacgaaaattcatacatgtactttcaatagtattacatatacgtgcaaagtcgcatcttcaaattcattctacatagagaataacaaaaaagataaaattctgagaaaattgcaaccttaaaactgtcagattttttggtttttttgttacggctaaaatataatgaatttgaggttaagattttaaccctaggtgtaatacaattgaaagtacgtgtatgaatttttctagattttttggtaatattttttagttggtgtgcatgtgtgtacatttgaggacctgtgtacatagaatatgttgcccctatattctctctaacagcaagacaaggaaaaccaatgcagcagcggagtgtttgcagcccttctcctaccaacatctgcaagagagctgaggctcgattgtttacaggtttggctacatgagaaaatcacctattgtgttggcctgtatacctatctcgataggaatcaccttccatgcaaaactagttgcagagctggacatttcagatgcgtggtgcgtctcaaatcccacatgctttccattccgaccagctgcaaaaaccagcatgcaatggatcgatcatgaaaaaaattaaaggctcaggtaaactggccagcattccggtaaacccctgatgccttcagatttcagttccgattagtccccatcttctgtctagccaggtcaagcaattttctgatgagttgcatgctctgccgtgtagctgctaggccgaacgagctcaaataggtgtctgctacttatataaacagcagtttctctctaaaaaaaagaaagaaagaaaagaagaagaagaagaagaagaagaagaagaagaagatatgttcattaattaaccgaactctctctgagccaatgtctcacacaataccatgaaatgaaaaataggtccaacgtagcgaaaggaagtaatgttcatgagcgtctttatggtccagcaaattgtatcgctcggtactggtatcgctcggtactagtacgtatctaaccgttcattccggcatgggtaggatcggaagaaaaaaacgtgtggactgctaaagtcgtcctgctgtggcgtcgatgtcgtggttcccggcggcggcggcggcggcctcgaactcgttgttcccagcggtggcggagtccttcccgacggcagcgttgaagcaggcgcggcggcgtcaaactcgtcgttcccggcggcggcggcgtcaatgtcgtcgttcccggctgcagcggcgtcgatgtcgtcgttcccggtggcggcgatggcgtcgatgtcgtctttcccggcagcggcggcggcggctgagttcacctccaatagtcggcggagaagatccaggaggcggtggaggcatcgatccagggttcgattcctcccaatccatctattgc

SEQ ID NO: 28517 - DNA, 13268 bp, Oryza sativa
agttcacctccaatagtcgccgaaaagatccagaagccgttgaaggcatcgatccagggttcgatccctcccaatccatctattgcacgcgaagtaacgtttttatccttctaactctgttttccaaaaggtcccgcatcaagaataattttggtaactcgctgtaccaaacaatactagccgttagattgggctagatccaacaaccagcattcggtaccgtacggtaccgtttgaccataaaaaatctcaaagtttatacacagcaattagacacaaatatattgatgtgaaaagaatcagtgcacaacataaagcttgttatttctttgcttccctacccatggcatcagcaacatacatatatgaatatttatttagaaatacataaagtaaactaacattgtgacaaagtaatagtaatgacattccctactacagagagaaacaaagaagatggtattataggtgtcaggatagctaaaaccagcacctatagtgctttttctgcccacacatgcaccctcgataaaaatcggcacctatagtattactatcagtcagaagagccgacacctataatatattataggtcccagtttttacgaacctacacatacactcatattataggtattagtttatttaaaaatgaacacctactaaaaaaaccagaaggtgccgaccgaaccaaccaaccttatctgctcccagtcagcattatccccacagttctcctccacactgatgccgcactcacccccttctcctccgtcctccacatcctagacacactcccacccgccccctaccgcggcctctccccacctgcctccaccgtgcctcctccccaccgtggcggcaacagagatgactactctgctctcctagccgacggatccaggcgatggcgatgaccctctctgatccgccagatctggctggaggggaagtggcaggctccccatatagaggcaacggcggcgcccttccctctgcaatgatgtagcaattatggtttgtcccccatctaactttttctcattgtctgtagaatacctgccattgtctgtagaaaacagagaacaacataatagtattatccctattaactacaaaatatggattgtaatggaggctaacaaatagaaatatcttatcaagctcttacaagtatcttaccagcaatgctaaggacggtacaaccggtggctggctcgtgatccaactattgcaagggtcaaaactatactgataaaactatctcatactcgcagaaaactactagttcagagaacaactgctttttatgctcggtgcctttcttcatgcaaccaaccaaatcgaccatggaaaactcagtcatactccatccattgaccactgagagaaacctgtgagaaaatttcatccatgccacgacgagttcaattctttttggacattcatttttgttcagttctattctccaaaccattcgatgtcaaactggttctctatatatactagttatcgtgcacgtgcaaggcacgttttagtattatgtgtgtgtacagagagaacaatagtgacctagaaaggcagtacactccaacaaaatctcgagataaaaatagagtttcatacaccatagtaacatgtcaatttggatgattcctataaaatcctttcgggtgaatcacactaccttcgatacgcattacaaatttacaatagtgtgaactggcgtatcgaagctgctagttcatttgagacaatgattgaaaaaaaacacaaaagtgcgtacattatcaattataaggcatggtactgcgtcaacctggctcaatgaggcgccagcccattttccacgggcttttctcttttgcccctcccctctatcttctttgtcctgtaaacccaaacagctgcactcaatgctggcattgataagagttcatatccttgacaagctagaatagtagcaaaatatgtgcacaactatgtatgggtagttcatacaaaaattgcttaaaaacaaaaaaaaaaggaaagaataatgaggtagtttgaatctttcccttgatgaaaataaaaatgtgaatagaaggaaatcaacccttttcaggatgccatggagcagtttgttaccatattgtacagaaccaacaattaaactatccatttttttaagaactgacacataatgaagggagggaaaggaatataggttttgtatgtctaaaatgttgattgttccacgaaggctatatctatgctggtacaatcacgaaatatttttggatgtaagaatcctctacccaacacaaacatctatttgtatcaaaagattaggaaatggatacactgccttattacagtaataagatattttcccataagaaattggttggcagaaaaaagaaaccggagttaagaaataaagtgctcacatgggccagaaatcaccagataagagcgatatgacgctgaaacatacaactgggcagcacaaagacctactttggaatacaacctgccctgaaaatgcattccaccatgtaacatgagtactatcaataaagaataagggctccttgatattcaatagagaaagccaaatagaagtcacaaataggtataaatatacatgaactcaaatttgacataggcattcgattacccctaagaaaaaaaagtcagataaaatggagtgagctactctattaatatcaattatttgccaatttgtcaatcacttaatccgatttagtcactccaagcaatactaaacatcacagtaatcttataattttttcatgcctaactccatatcacacatgccatgagcatctgccactgacatgaaggatgcaaatatcagcagagaaaataatgatattcgcaatttacaaatcattagtgtcattaagtgtgttgagagaaaataattaatataaacagcaggtacacttaaatgtatcgccaagggaacaactttgaaaaagcttccaaaagcatataactaaacaatacaacaaacccatgtactgcacattttctacctagagaaaattactctcaatcattcatattgcgtaggtgctaatatgggtgattaggcacctatccttgtcctttgtttcaaggcacctttacatatgtttcatgctacaagctgacttgaattttgctgcacacactaaacgatatggattgaacccaatcctcgaaattacatgcaagtgcagcaaaatcatggaagagaaattagtgacaactaaccttgccaaagctcttgtttacatttttactatgggataagccccaacaacgaatggcatccatggtccttgcagtcttccaaaacacttatatttttttattagaactcagcataggcagcaatagtcaggcctcaggaccagagcagaagcattataccgtgtcatctggagcttgggcaacacattgatcatgtcaaggaacaaatcatgtccaacgaaccatctattagctacaaaacagaaacaaagtaaaagtgtgctaaaaatcgattgaagaaaaaaatagtgcatatagcatacccactttgcaaactgaaatatgcttggggaataatattgactaaccagcatttcatcgaacaccttttggacatgagaatcaatgatccttttgtccctaataatcctgaaaatagactgggaggcactcagacatgtaaaatgatcagcacataactcaatatctagcttttgttgtagatcaagatgaaacgactaaactaaaagggaaaacacagatcaaacatcattttcattgtagattcagaatttgacttcacaaaatataggaagagtaaaatgattttgtaccttcactgatgggggaggggataagatcagctggccacatcgggcttgagggccggatcacgtgggtgacatctgagtggcaggagtgcaggaggcagcgccgtggttgaggtcgaatcgtgtcgtgacagcgcggtgattggacggcgatgcgggcggagtggaggaggcagcggcgggtattaccggtggaagatggacagcgacggcggagaccgcgaggaggaccggtgcccggcgccgtgttggagtgaggaggatatacaaaggggaggggaagaatgggagatgcgatagctccggcgaaacctccggtgccgatggatggatggatgcgcggtggcggggagaggcgcgttcgttttgaggatttgtcgttgctgtgcggatgcacggtggattgaatgcggcagaggcggggtgcgcggcagagatggcgcgggtggaggggaggaatcgcgcgtggacggcggtggagaggataaggtagctaatcggtggagcgaggaggatagcgaaacaaattgatggttgagatgagatgagatgagatggcagatggacggatgagatgaaaggggttgatttcacctgtaggattgtcaggcacaactcctccttttgggaccacctatatatttgtcgacaaattttttcctaaaaatttgacagatgtaattatagtataatcgtagtgtaattacactgtaacttctatgtaactacagtgtaacttgtatgtaagtttcacgtaatttttaatcgttagatctattacaagatttgttttggtaaggaagaaaaaaaatcacagcacacatatatgtgaaaggatttgttcccacgacctctattttaccgaaataacatgttaacgagagattcttgaaagttatatacaagttacactatagttacagtgtaattacatgcaagttacagtgtaattacactatgattgtactgtaattacatctgacaaatttttggaggaaaatttgtcgacaaatatatagcaaattcgtctcctttttatattagtatatatatttttgtcagacccatgaacgaaataatttgatcagtgccaacaaccaatcctcataccatttcaattattacgatattacatactcgatcgtgagtattcaaattcagttggaagaactttaatttaaattaacacactaattaaaattaacacacatagtagttgtttttttgggagaacactctacataaaaaaaggtcaaaattactatttcgaaggaatcaagaacaaattcagatgaagcagtaatattggcaccgcagctccacagagacaggcgcctgctaaatggaaagtttgaagttttttctgaactaatagtggattccttcaaccgagttaaatggacaagcacaaagagatacgaagaagaaaaggaaggaccatgccgtgtgggtatggggtacccataatctccacagtagcccctgagaccttcacagtcgaaaagataatcttgtctcgaaccaaatttctccaaagccgagtgcttcaatcatcttcgatatggtctcccgagtacttttaacaaagataatcttgtctcgaaccaaatttctccaaagccgagtgcttcaatcatcttcgatatggtctcccgagtacttttaacaaatctgaagattgtggaaggctgaaaaataaagtcagctgcatcaactagatgcacctaataggtgtagcccccgactatatgtggttagttgaacaaactaagcatatagtcaaggaataaataatccaactaaccgaatggttttgataattatagtcaaccaagtgacttgatatcaatatatagcatatgtggtgtgaatcccccaaataacatgatctaagtgatataccgactactttgtaaaaattgatgcgaacaacctaaagttgactacatcattaaaaattcacataacaaaacagctataaaaaagcttgtatgctttaaataaagaaatttccaaagtattgggcatacaccatgcgcacactgctttaacaaatgtgcttaagtctctaaaacacacatggtttcaccacacctggaaatatatagcatatatggtgtaaaatccgagtaaataaactcataaaggatttaccaaccgcttggaaaatgaccacaatatataatcagcctaagccataatattagtcaataaaaatgcacacttacgtggcaaaaagcaataatatagtatccgatcaattgcttgataaacccaaatagcgccttgactatataaaaaagccagtgaggcagctatataaagctttactgtgaggcaccttttaaaatgcattgtaccaactccaaaaaagttgagtaactacggtataaaaggattttaaggtattgggcacataatcacgcgcacttttgcctaagcaaaaagatgcctaagtccctaaaagaacgtgacaggccacacctgaaaatatgggatgcagacgtattaggcctagacctaaagtatatctaccgatacccttaaaatatgatgtatagaacacgccaattaatatgctcccgagtgacaaatctcccaagtgatgtagatcaactgctctcatctgagtggcttctgatccgagtaattatccctcatggagaataccaaagtagatatgataattaaaatcccgactggcgcaagtactcagctgatggccctcacggggaataatgagtggtacagtcattgagcatgagaaatcaactcatgaccatgaatccatgttgaatatatccagaacaagtctaaattgaagatataatccccgcgtttgcgttgatgagcccccaagcttgtagattatccctctgtagtagtcacaattgtccattgatgatagctgatgcagtcggcatggagacgaaatgaccaacatgaagatgatatcacccatcaaagctaacgaaaatgttggtggtggtaaagacaatgacaccaatcaaaggtgatgaagtcacacagccgtggaagcgaagaaaccagtcgacagaagacaagtcagccagcaatgaagatgaaggcatccagcaacaacgacacaattatgcagccatggtggtgagataatcagtctgtgaccgacgagccagcaatcggtgacgacgagaacaagccgacaatgaagacgtagacgcacaccaacagcaatggcgaaatccgtcaaacatgaagatgaagaaaatagtcagcgacgacaaacgcaaccgacggtaatgacgattaacagcaacagagatgatcaaatatgatgttgaagttgcccaccaatagcagtagagttggctatgttaaataagcttgacaggatgttgatgatgatgacgatgtcggtgacctagtcaatagaagtgtagcagccaatgataatgacgaagacgctcatcagcatttgcgtagtaggtcaaccatgaaggcgaaataactagtcggcaatgacagaagcagccggaggtgaaaacgtagccatacattagcaatggcggagacgtcagggccgacgaagtagaggtgctggtgatgatgtcagtgacaataatccatcaaactgtcgagaagatatcaaagctcgagtagtttccttgatgcgagcgtgtgtataaagaagactgatgcaacgcttcttgatttatgaagacttaatgttgtagctgttggagatgcttcacttggaggaaagtagatgatgctgtctaactcgttgaatctgtgttaattggttgataactccacaaacgcccagacatgtagataaaatctcaaacttgatacttgaaaaatttggagaagccaaaatttctagtgaaataattggagttactcaagtagaacgccagctctaaagcgaagacaaaactgataactcctggagttgactcgttggctgattaattgattgcttcagcttgtcgaattttgagagtcttgtatttgtgtagcccccgacactttggttagttgggaaacaactgaacatagagtcgagaactgtagttttttgtcgtcaagtagtcattgcttgagtgaagatacgtgttaaagatgtccaagtagaaatattgaatattgaaataccacttgttgtagtaaaataacacggcatcatatttggtgacgcatgccaagatgtcagagctcttgccgacgttgtggttggtgaagtagcaaatcttgcaaagtggaggcaatagagtttgccaatgaagaaaacaataaagatgaagtcgctccaccatggtgacaaagtgcatagccgtgatgaagtgaacacgagtcagcggcaacagaagcaaaccaatagcgaagatgcgtagtcgtgaagataaaaacactagtcggcgatggcgtaaccagacggcgacggaagaagctgaatgatgatggaaacgaagacgtccttgaacggtggcaaaataggccagctgtgaaagtgaagacaccatgggcagcagcgaaggcaaactggcgatgacgatgttgccagtcaatgatgacgaagacgcgcagccatggaggtgaacaaaccagtcggcgtcagacaagacggccagcaatgaagacgatgacgcccatcagtagtgctagcggtatataccagctgtagaggcgaggacaccagtcaacagcagacgagacgaccggcggtgaagacgataaagccaatgaacactggcagaaccatgcagccatggaagtgaagaaaccagtcggcagcagacgtaggcacccaacaatggcggcataataggccagccatgtaggcgaagacaccagtcgacagcggtgaaggcaagccggtcggtgaagacgtagacgcgcaacaacgacagcataataggctagccgtgcaggcagtgacaccagtcggcggcggtgaaggcaagccggcggtgaatatgtagacgcctaacgacggtggtgtgaccaaccaaccgtataggcgaagacaccagtcggtggcgacgacggcaagccggtggtgatgttctgactgatccattcctggagtgtaagagataagcttaaagccatgaatcccttttatgcgtatttggatctggatcctgcagaacaaacatataggatgagtagtatctgatgtacatataatactaaaaaaaattcaagtattttaaaatgtttataaatatgtatttctcctcttgtcaatcttgatttctcctattttacgtttaaatactctgcccgactagtcatagccccaaagcaccgggagtcggcctaggcacttcccaaacatgcatatgggtggcatgagttcgtcattactggaaccaagtttcacggatcccgtttactactcaggtacttttgcaattgttaagagtagaaaataaattatcttatctctatgcttttgatttcttccgagtaatacttagcaccttgcgttactcggtccatccaacgagcccccatgtgctaggaatcggcccaaaagcaactatccattgacaaaccaaatggaaagcataggaagatagaactccataacttgataggcactttattgttactcggattatttcgcaagcaatcaagataaatattatgaaaattgttgaaaaatatgatataacatctgtagcccccgactcactagtctacagcgaacctgttgacatagtgaggcagaggagaaggaaaatatcatataaagaaaaaaaataatgaattagctttgtaatattcctcttgatgacggcagaggtgcctgatgtgggaacaaagtcgtccatcaatgataatgaaaacaccagccggcgcggtgcaagcaagccagtggtgtagatgacgaggcccatcaacggcggcggagtccgccaactgtataggcgaggacaccagtcagcggcgacgaaggcgggccggcggtgaagtcatagatgcccaacaacggtggcataataggccagccgtgtaggcggagacaccagtcggcggcggtgaaggcaagccggtcggtgaagatgtggacgcccatggacggtggtgtgaccgaccaaccgtataggcgacgacaccagtcggcaacgacggagacaggccagcggtgaagtcgtagacgcccaacaacagcggcataataggccagttgtgaaggcgagagcaccagtcggcgtgacggacgaggtagccggtcggtgaagacgtagacgcccaacaacggtgatgtgaccgtcaaaccgtataggcaaaagcaccagttggcggcgatgaggcagccagtcagtgatagagtacaggcgatgatacatgcaaagacaagaaattgcacatcaacctgtggttagatatttgtaaaaagaaaataatttatataataactaatagatccaaacacatggtttgatttgtgcttgacgaagaggcttgcatgaccataaacattaaagcatgtgctcggttgcaatggcttctccatctgttcagcagccgtccctgtataggacttgtagagccatcaactgcatggtcaaaaggactcggccgaaccgacgacagaaaaagtatacgcagataatagattaatctgggaaaaaaataaaatcaaagattaattttaataatctgcagattgaaacagctaacccgatccctaaatagtttgatcggtgtgtaattcgctgatcagcctgttggtctagtcccatataggcaccgctctgcctgtacgcgtgtacagagacaaccgagtgatctaggcaatagcagtccggaggatagaccaaaccatggttgcatgcaaaataaaagctcaatatattagtcagattaatcagtagcggcatttatagcacagcatatatatcgatgcatgcatgcaacatgcacgcgtgctaatttgcatgtccgtgcgtctggcaatactccatgcataaatctgcccgtggaggccgcagggcaagatgggacgcaggagctctcctcaggcgccgagtcatcggtgatacgtccatgtggaggcgatcaatggatctcatcagccgccagtgcatgcacgcaaacaaagcatctcacagaagatcgattcatgattagaaatcaatctgataataatatattgaaacgacaaaccggttgatgtttggagtcatcgaattcgttgagattaatctcaacgcctattttagaattgattccatcgcactcgtcgacggaaaactcgatgcatccccaacctagcacgccaactgtcgaaacatgaattcggcaataataaaaaagggtagcgcactagacctaaaattggatggatgcggagacaaaagatttagacaggttcaggccctctcaatgagaagtaataccctactcctgtttagggatttgaatccgccgagtgtattatggatctgacgatctggttgtgtgtcatatgccctctagagggcctcctgcccaccttatataggacggggggcaagattacaagatagaaaccttaaccaatacggtatcggtttcctaaatctactttacaatattatcaaaccagtactttaggccgttccgtaatatacaagaaaacgtaatacccaagttatgatctgttacatattccatagatataagctatcccctataactagtcggataaccatgccgtgtgggtatggggtacccataatctccacaattattataatggaaataattaaggaggtaactctggctcggacgtccgatgtttggggaaaaatcgggcgctgacgtcagcgtccgatttacgtgtaaaaactactttaaactgatttttctcttaaattacttatccaaatcatgattcgattgcaccattaaattcgttgcaattaaatctttaaaacaagaccacacatggatatattccgacgaaattttttttagcttattattgaattatttttaaatgttgcacgatgttccaccaggtatatcagaattgtttcactaaatagatcgaaaatgtttcactcatttaaatcgggtgttgtttcaccttatataaaaataatgttttagcaaatagagaaagaatatttcagttcactgcaacatttgatccatacatagtgaaacattataagtacactaggtgaaacatttttcggtggaacaaaaaatgaaacgaattcccttgatagggggtttctaaaatatatgggttttttttgttgcaatggaatatttcagttcactgcaacattagatctatacatagtgaaacattgtgagtacactaggtgaaacattttctgtggaataaaaaataaaccaaattcccttaatagggggtttccaaaatatgtgggtgatttgttgcaacgacgcgttccataatatcaaaatccactgcaacatttgattcgtacatattgaaaaatcgcaagtacactagctgaaacatcataaacctactggttgaaacatcaaacgagatcatatgcaacattcaaaaaaatatcaatatagaagctaaaatatttttttatcaaaatataatcatgtgtagtcttgtcgtaaagatttaattgcaatgaatacaacaatatgattggatcgtagattggataattagtttaagagaaaaattgttttaaaactagagcaacaggaggcgcgggcgccaaggcgtccgatttttttttctgacgtcggacgcgcggcacggggtattctccaataattaaccatgattacgtcaaacttgtaaaatgtatcacaaagcttatatatatatacttatgtcaaagcaaatttatttagagaatttactacgtgcatgtcattatatcaaatttactatgcatgtattgtattaagtacaagtttactgtatatttattcattcagtaaatagtcccactgcttcacggatatcgattccacgagctggcaactggtaactcttcctattgacttgcatcagtagttacttttgaaatctgaaaatacaaaattttaatggttttctaagtaaatactactatgtatcttatgtatctttatcgtaaaatgaccagaacttaggtagaaatattatttatttagaggaccctaaaataaaaaatttttgtaggggtgcttgtgtaaaactagcaggagaatttaaaaaacacaattggattttcaatgtgaagaagtcacgtgaacactctccataatcccttttttacaggaaccttttttacttctgcttgtgtgtaggctttggtggcaaggaaggagaacgtgtggatcgtggattccggttgttcacggcacatgaccggtgataaaaattagttctcctctcttaaaagggcatccaaaactgaatcgattatctttggtgatgcttctaca

SEQ ID NO: 28518 - DNA, 868 bp, Oryza sativa
cagcatggcatggcgcatgccggtgcgggaaaggcactgtagggcggtgcgacagacggtgggcgcgggcgatcggcgcggaacggcacgtacaggcagaagacggcggagaggcggggacaaatggggatggccggtagactcgtcgccggagtagacgagtggctgacgagtccgtcggcggcggactcgtcagcaccttcagcaggatgttgcggtcgagcaggatgttggccggcttgaggtctcggcgcacgagcgactccggcttggtctgatggaggaacagcagcgccgtggttatctccgccgagatcctgaaccgctggctcctcgggatcgacgggcgacggcgtgccggaatcttttttctttttatttttgtctctgcccgcttctgaattttctgatctgatttggcgccgcgttttggactttgggaatgtggttatgtgctgcatatgtagtatattggtttctctttggaatgttgggtaaagaattttgtcgagagctaacttgcacacttgtatatatgcatggccttaatttgcagtcgatggcttgcatcatcagtgattttgcagccgtccaccgaggcgcggcggtaccagcagccgccgccggcgtagctagacacgtacgtggtgcagatgcccaaggtcaaggtgttccgcgtcccgccgccggagaacgcgcacctcttccagcactacacccgccgcgcgcgccaggcgccacgcccgctgctcctgcgtccgcgtctgctcctggctcctcctcatgctcgtcttgctcatcgtcgcgctcacggccttcgcccccgtcgtctacctagtgtttaagcccaggcagttggactacacgc

SEQ ID NO: 28519 - DNA, 697 bp, Oryza sativa
cccaaaatcaatctagaaagattgaacgaagaattaggtgaattgtactcttttctcttagataagttttcccagcagtttcttatcaaggtttttaacgaggcgattcgtgtgacattgcaagcgtatgctatgtactctttctctaaatttttcccactggatttttctgaagttttgatgaggcatagacatcacgcggtgagtgccaagggggagtgttaggaaacctatggggttgggtccatgaaggcccaacccatatacactaattgggcccacacctaaacattccatatatgcaatatggctatataaagaggaggctgctcactttgtacacttgtgcttaatcaatgaaaagagtgcctcaccctatatcttgtgtctccacttttgtagaactatgcaatcccttttggactacctcagtagcaggaggggttgcataatactttcttttttaaaaggaaaaagtacgaattaccccccgaactatcgcggtcgaccgaattaccccctttgacccgaaaaccagagattactcaccctgaactttcaatactggacgaattacccccctcttctaatctagagcggttttgtcctatgtggcatacgcatggcaatcctgtcagcatttcttttaaaaaaaattggtgggacacacctatatttctctctctaccatccaaga

SEQ ID NO: 28520 - DNA, 663 bp, Oryza sativa
cttatcaaggtttttaacgaggcgattcgtgtgacattgcaagcgtatgctatgtactctttctctaaatttttcccactggatttttctgaagttttgatgaggcatagacatcacgcggtgagtgccaagggggagtgttaggaaacctatggggttgggtccatgaaggcccaacccatatacactaattgggcccacacctaaacattccatatatgcaatatggctatataaagaggaggctgctcactttgtacacttgtgcttaatcaatgaaaagagtgcctcaccctatatcttgtgtctccacttttgtagaactatgcaatcccttttggactacctcagtagcaggaggggttgcataatactttcttttttaaaaggaaaaagtacgaattaccccccgaactatcgcggtcgaccgaattacccccttgaacccgaaaaccagagattactcaccctgaactttcaatactggacgaattacccccctctcctaatctagagcgggtttgtcctatgtggcatacgcatggcaatcctgtcagcattttttttaaaaaaattggtgggacacacctatattttctctctacaattcaagatcacacacattctctctcttctcatcatcaatgtcggcctcactcactc

SEQ ID NO: 28521 - DNA, 948 bp, Oryza sativa
aaccaaggataatttagcaagacggaattggaatgggtgtttacgatattgtttttgcatgaaaaatgagtctattcaacacctgtttttggattgtcattatgcaaagtttatatggagagcggtttagttctctttttgcttatacctccctagaagtatatctcatatgtttgacagttggcttcagggtgtggacaagaaaaagagtaaactgatacttgttggtgcctcagctttatgttgggctctgtggttgtgtagaaatgatagggtttttgacaaatcactatctgtttcctatatgcaagtaattttcagggcaacatattggcttcgactgtgggctcaactacaaaagtgtgaggaagatggagaatttctgtctgatggagattcaccaataaactggaataatgttttccttgtcatattaggatttcttttatttttggttggtgtgcttgttttattttggactgcgtctttttagtgtgctacttcttgtaataattggctatagctctcctaaacaaaggccggaatgttttattccattatctaaaaaaaaatctaacaatgacagtatgtgttgcaccctgcattgtcatgaccgatgcttcaaagaacctctttgctattcaactgttgtgatcttgtgattggtatcctattcatttcgatggaatatgattatttccctttcttataccatgtttagcattgccaccttttcacacttcttttcttagcatttagctaataatcgcgtaatagagtatatgcatccttaccaaggatttaaatctccggttatagctaccactatagccggagatagttgttaggaaaggaatcatctaagatatgctgattttgccgctacacattctcagccgctaatagctggtattagcgggagatggctggtaaatagacctcgaatta

SEQ ID NO: 28522 - DNA, 15299 bp, Oryza sativa
agtgtgctacttcttgtaataattggctatagctctcctaaacaaaggccggaatgttttattccattatctaaaaaaaaatctaacaatgacagtatgtgttgcaccctgcattgtcatgaccgatgcttcaaagaacctctttgctattcaactgttgtgatcttgtgattggtatcctattcatttcgatggaatatgattatttccctttcttataccatgtttagcattgccaccttttcacacttcttttcttagcatttagctaataatcgcgtaatagagtatatgcatccttaccaaggatttaaatctccggttatagctaccactatagccggagatagttgttaggaaaggaatcatctaagatatgctgattttgccgctacacattctcagccgctaatagctggtattagcgggagatggctgctaaatagaccttgaattagcggcagctaagttgttggtgggccaaaattggcaacgggctatagcccatatccctctcctatgtgactaaagtactaaccctaactctctcctatgcaatgcgtactccatctctttgcagcgaccggcggcggctgcgcctggaggcggcgcgacggcggtgctcgcgcggctacgtgcaacgacggtggccacaacgcccggaggcagtggcgacggtggcagcggccgccgctgcgcccaatccctccctccccattcttctttgttcttcgtttcttctccaagcggcagctgcatccagaggtctaatcttctcccctaagtgtgttcagtatacttatcatgtgacataatatttattttgttctagtgatgtactatttatctttaattcatgtcaattttttggaaaaccgctaaatagcttagctgcagctatagccatctatagccggctatagccgatgaaaaccatagccgctaaaaggcttagccggagatttacttgaggtagagactaggatattacacttcttatctagtattctaaactggcagattgtcctgccagctgattggtcgagacggtgtctaatagtatacgacacgtggaaaaaatataacagcgtatggtcggatttcacggttggactttctcgattaatcgcgtatctgtgcacgtccgtctggccgaacgacttcgcgcgacggcgcaagcagcccactccgctcctgcgtgcagccgcgtgggccgaagcgcagagcaaacctcgccgcgccggtcgtgtgggcctgacacctagctggaccgtgcatgcatgatccccgaatttttttttatttttaattttttttattaaaagttttacaaaaataattttctattttgaaaattgacggaagtggtcgcctaccgccctctgggagggcgatttttaaaaatcgtcatcccagagggcggcgaaagtgacgtggcagacggccgttcgctctcgggcgacggccgccaacgaaatttgcaggcggcccccttgccgccctccgctagggcgattttgtactgtgcggggggccgcctgcaaatgggcggcgagggggcatggaattttgcaggcggcccccttgccgccctgggggagggcgattttttcctcccccctataaagcccagtcccccctctctgaaatttcattatattcactaaaaatccaaaaaaaacgaaagagagagagggagggcagcagaaggggagcggcgaagccctgctggttcgctcacttcatcacaggtttgctcccatacatcttttgcatttgtactaatatgttatgtttgagtatatatgttgcgttttagttttagttccatatattttagcatatctgtagcacacagcacatatgtgtagatccagagcatagaatataatagtatgaattgagacatagacagtagtgttaattgtaagatgtagtttagtttgatctggagaatgtaacctacttttagaattttggagaacaatattgtagagaatgtaatttagggcatagtacagaaatgcgaggttaacgcagttattgttttcatcaggcacaatgtcaaataaggtcacatttcagatagttcacggtgaaggaaatattagatttggtccagatggtgttgatctgtcagattttgtaatgacatctaagggtatcgataggcctgcggagagaacatttcagtcaatttatagttggttgttgagaggatttagaatagaccaagaagtctacacaatgtcagtatcagttgtagtgagtcgtgcaacagaaggttatttttgggaactaatgccgatggacagcactgctgcttggagacggtatgtggaaatggcttttgaacggtcatggcccctcgttatatttgtgtcggtacaagagaaagatataaatgtttcaatgcaaaccgaagatgtaaagggtcctatcaatgcaggggatgttgttggaccatcgatgcaaaatgagaaaaatcaaccaagggaggagcaggccatgggcatggcggatgagggggagagagtcggtataattgttgatgaaatggagagggaagattcggataatgaggaagcggacgacgacgcatcatccgatgaggaaggtgatgtaatggccactgattgggcaaatgaggacttctctggacttgttatatcagagggtgatcatgtaccctgggagtataaggagaacgaggtaattgacggtgcaaggtatgctcataaggatgagatgaaggaggcggtgaagcattgggcagtttccttgcagagagagtttagggtggtcaagtcaacaaattatgtgtatgaagtgaggtgcatgaaggaagattgtccgtggcgtgtccatgcatataagggtaaatggaatgattattggaaagttagcattgtgaccgagcacaagtgctacttacaaggggtggagaagtatcaccgaaacatcacttcagcttttgtggcaagtgagatgtacagcagtgttgttggtaacattggctttgaaccaaaatcaattattaggcacatcgagaacaaattcaagtacaccataagctatgcaaaagcctggagagccaaacaaaagattattgagatgaggtatggcacatttgaagcttcttatgataatttgcctcgtttgttagccaccattgcccagaggaataataatacttactatgacctacatacatttacatcggttgatgatcgaacaaagagtgtgctgcaaagagcctttttctcattgggtgcttgcatcaatgcttttgtgcattgtcgacctgttctatgcatagatggaacttttatgacaggtaaataccgaggtcagatattgacagcaattgggtgtgatgggaacaaccaggttctacctatggcttttgcatttgtagagagtgagaacactgaaagctagtactggttcctagagagagtgcacattgcagtggtgcgtatgaggcccaacatttgccttatacatgatcgttatgcgggtatgttgcgggctattgactacttgcagaacggttgggatgagaagggacttccagctaagtggcctgatgttcggagtcggtggtgcatgagtcacatgggtgcaaatttctacaagcaattcaagaacaagcattttgtggagctctttaagaggctctgtgcacagaaccaagagaagaaatttaatgagttgtgggacaagttggatgagttgacaacgaagcaaacagatgagcaatctcgcagaccacaagttgaaggtgacgagcctcccatacctcttggtgcattacatgatgacccaccaacaatgagaaggaggtcagggtcgtccatcagaaatttcactcagtggattgagaatgagcctaaggagaagtggtctctattgttcgacaccgatggatctcggtatggcataatgacaaccaatttggcagaggtgtacaactgggtaatgcgaggagttcggatacttccattggttgctattgttgaattcatccttcacggcacacaagcgtactttagggattgatacaagaaaattggtccgtccatggccgataacaacatagtgtttggcaacgtagtgacaaagtacgtggaagataaaatcaaaaaggcacggagacatagagttgttgctcaaggcacacaagtgcatcggtatgaaataatgtgtgttgataggagcaggcgtggtatctatcgcaagcaagccgtacaggaatgtgtcttgaaggcggatggtggatgtacctgcagttgtatgaagccgaagcttcatcacctcccttgctcacacgttcttgctgctgccggtgattgtggcatatctcccaatgtgtacgtctcaaattatttcaggaaagaagcaatctttcatacatggagtgaggagatatatgggttcgggatctcaggatcttacacaacgctgagtgcccaagttttttacattccagatccatctaagttaagggtgaaaaagggtcgacgccaaactagacgcatcagaaatgatatggatgagtcagaagcaggtgggaggactttacgctgcagcaagtgtgatctgcgcggccatacttacaagaaatgcccgaagaatgcagaagttccaagcggcgcagatgctagtccatctggacaggcaagtgatggtaggcgaccacctggtgaaggaacaataagcagccgcgcaaggccaaggcgtcgtcgcacagcaggcgattccatggtgtaacaatgctatcgatttaggaaataaaatgctgttgtgatgtgatgagtgttcggactaaatacttgtatcgtgtaatttcaattgaatgttgttgtaatgagtacctccgactattgttgtactagtagtattgcgaactattcggtgttgtatcataatgttatcgtgatgagtgttcggactaagtactcatatcgtgtaactgcagttattgttgtaatcagaaatattccgtatggtgacacttttgtttgtttgtactcttgtttaatatgtgttagtaattcgcttatgaacatttattacttatgttgaactaattatttatatgtttctgatcaatctatttgatgcaggtatggcgtacgacacaccggcgctgttgaaccgtgggattgacaggaaccaccgctcgttcctgtcagcactcgagggtgcacagctcggcaccttccgtccacgcacgtcgcgcgagtggttgcgtgtcgacccccgtcacgttccttggtacgcgtatgttcacatttcaactcaactttgctttgtgttgtacttatgtttgaagtttgctctatacaggttgcgtgcggcaggccttctaccactttgtaggcttgttgaggcggcggcggacgaccgtgacccagcgaagcggtgggatgcagaccggtcactccttgccgctctggtagactgctggagacctgagacgcacacgttccaccttccctgtggggagatggctccgacactgcaggacgtgtcgtacctgctcgggctaccgctggcgggagcacgagttggtcccgtggacggtgtttttgggtggaaggaggatatcactgcgcgcttcgagcaggtgatgcgccttccacacctaggaccggccaacacccttcctccgtactctacagtcgggcctagcaaggatcccctggttgctccagttcactgtaagtaaataagttgttattatcatacatgcttatttgcgatcaacagagtgttttgtactaacatttcattcttaattgtaggcggaccttctgcaccctgacgctgatgataactcggtccgacgctcccttgaggcgtacctgttgtggttgttcgggtgggtgatgttcactagcacccacgggcacgctgtggacttccggctggtccactacgcacggtccatcgcggatgctcagccacaggacgtgccgcagtgcagctggggttctgccgtgctagcagccacgtaccgtgccctctgtgaggcgtgcacgaagactgacgcgggagcgatcatcgctggctgccctatgttgcttcagctttgggcagccgagaggtttgccataggtcgaccagtggtggacagcgcaccctacggggttggtcgcagcgcgcagtggccagaggacggtcccacgatggggacttactggtgtcgacgtggggttagtgcaacttcgctgcgttataagtttatcagtcgtcttcttttttttcttcacatgacatgtctaattccgatcatgtttattgcagcgtcgttacgctcacgtccaggtgagacgaggttacccggactacgtgttcgagtttgaccgtctccagccgagcgacgtcatctgggagccgtacacagaagaggccgtcgctgcgagagcaccgctaggactttcgtcgttgtgcacacgcgaccaggcttactggctcaccatcctgccgatggtgttcgacattttcgttgagcctcactgcccgcagcgtgtgatgagacagttcggacttaggcaggtgtttccgggcaacgtgcagccgaccgtcctccctgccgaccactcgtgagtttggattgttcatttctaaatttttatgataattacttcatcgagccatataatttacctctcttcacaggttgactcgacggggacagctagcaggcgcactggctccacgtgtacagcagtacgttgacgactgggtgttagctacagaggaggtgatcaacgagctctttccacacacggaggagaactaccgtgactaccttcactggtaccttcctcgcactcgtgcgcgtgtgaccttcactccagacgccccagagccgcacgttgccgctgtgacggacgcgtatcccacgcaccgtgaccgagactacttcgtgggggtacgtcgaatttgtattagttcttacaattatttcatttatcttgcataatataggacaactactgaattttttatttccatcttgcataggctgatgctgcacgggatatcagtgccgatatcaccgcagtccaagtgaggttgaacagaggtttgcacttgactgacgttgagcagagggtgaccttcgaccggatgcaggagaagatgcgtgcggtcatgcgcgtcttctcctgtcgcagcgccgtggacgtcgtacctccagctggtccggtacaaccacggcctcgcgcgcctatcgtcggaacaggacctcgacctacggtacctgtttcacacggtactgctcagcccagaggtttcttaagttttgtttctgtttttgtacgaaaacatcaccccgtcgtaactagatgttccatcctcgcaggacctcgtttgccttcgagcgcccctagcttcggagcagtgcgacctacagcaccggtttcgcacggtacagttcagcccaaagattagttcatttttgtttcagcttttgcacgaatatgtcaccatgttttaacggcacgtttcctcatcgcaggacctcgtctgccttcgagcgcgttcgcaggcacgaccggcgcttccgcgagctccgcaggggcgttcgccacctcttcgggcgcgttcgccagctcttcctctcacggagcgtcgatccctcgcccacacggtactttactttttattaatactattaaatacctgtatgaaactgatggtccttgtccagcaggatttgcagccgggatcttcggtactggggcctcttcgtctcacgccggtaggactggtcctactagccagttctacgacgacgacttgcacggtgcacaccaccacgacgtactaggctcctctcagcttggaggagctccagaggcgcacactcaggagcagccagaggtcacacctgtacaggcaggacgggttggccgtgccatacccccggaccgactcacgtactcccaggggcacattagggcgcagggtaggagggacaggggtaagaggcctcgtcagtagtgttctacctcttcagtccttatgtgaccgtttcttttggcttacaaacttgtaaagcagtactacttttgctattactactgcagtactacttgtgtttgtctcgtctacatagttcttttcattcatatgatgctagaacaacttatgctcacgacaacacactttcggcgcttcacggtagtgttagatccagtagcgcgcacagtccacaacagcacacatgaaaagcggcagctcgagttgtcactatcaactttcggcgctgcctgttgacataaagtgaatcacgcccacgcgtgatcgtcttgtcacatctaatgaataatgtatctcattgagttcacatatattgcagtgaaaacgacgctatataattgacaatctgaaggcaacctcttcatatcttctttcccactagcacacaacacatgaaaatggaagcgccattccttgagcgtctcaactggcgaagcgatccttttgctggttggtttccaccatggtgtgaccatcctttgtgcgattgtggggatggatgcatactcaagtcttccctcatgatacaaactcggggcaggagattcttccaatgcgcgaactttgatcaggtatgcttcatctattcgaagttcaaatggataaaaaaactaacttcttcgtacacaattgtaacatcttacgcagacatatcgtccaatgtgcaacttcatcgagtgggtagacatggagaacccacaaaacgatggaacccgtgcttacccacgtagtgaaacaagatcggactacctaaggtggaaggatgagcatgaacgtcgaattgctgctgaggctttagaatggcacgtaaatcccctaggactccccacgtggcgtgagcgtccggagtgtcgttgtggtgaccgttgtcaggtcataaggtccgtaaggcaccgaactcgaggacaaaggtgtttcgtgtgtccaaacattgtcgacgatgatttcgtggtaattacaactattcttttcatcactcctcagtactatcattaacttaactatcccaaaatgaatgtacataggaggatgtaaggaaatgttaattcgtacaatggattgacacagtcagagttacttcaagtggcgggccgataacgcaacctaaaccgaccatacagttcattcatgcttggatggagtacgaacgtcgggtggaaattgcaagcttagactggaggaacaatccattagggttacctaaatggtccgagcgtccaaagtgtgggtgcagagatcgctggcaggtggctacatcctttgctgaacaaacatttcgaaggagatattttgtctgccccaatgtagacaacgatttcgttgtatgtctaaccatttacaaaatccgctatgatttgcacaaaattactacccaaactgaataacattactatttttacagggcaatccaaggatgggtggatttactcaatggatcgacaatgtcactccatcatatcatggccagaagataacagagtcagcaacacaagtagagtatcaacgattgaaggaccacgagaatgcaatgcattctgaccgacctagaaggggccgataggttaccgcatgcttgattcgtcgggattgacaaatttgtaccgtgtatcgatggcacttcttatctatcttatcattacaatgtttaattatggtggtgattttttgtatgcgtaagactaagggcctatttggattgctaccaaaaacatgccctaccaatattttggtaatttgaatagtacttgtgtttgatttcgattgaagcctattcattggtaatacgtaatctagatttgagattatgtagaacattcttcactacaattttacattttggcagcaaaccaaatatgatcaaatgcaattttaccttaccaaatatttggtagtgccaaaacttgcttatattttggcactaacaaaatatttgtacggtaacattccaaataggccctaaaaaataataaaattgtattttaccagtcttggagattttaatcttgtatagttttcaatataaaaagatttgataactattgatattaatacaaaaatataaagcacagtataaaatcgccctcccccagggcggcaagggggccgcctgcaaaattccaggcctcccgccgcccatttgcaggcagccccccgcacagtacaaaatcgccctagcggagggcggcaagggggccgcctgcaaatttcgttgacggccgtcgcccgagagcgaacggccgtctgccacgtcactttcgccgccctctgggatggcgatttttaaaaatcgccctcccagagggcggtaggcgaccacttctgtcaattttcaaaatgaaaaattatttttgtaaaacttttaataaaaaaaattccatgatccccaacgtcccgagcctaacatccctatgtgattgaaaaaaatctttgtataaaaatacactatactacatgtcaattaaaaaaattagcaaacatctaaatttacctaaaatgaaaataataaataggaaactagctgatgtacagaagtaagttgcagcaagaattttgttaagatggttgaaaatattttaataaattaaatcattacatgatttttttcatgtatttttcattgcaacatgatggatacaaattaccacaaaacacatttattagagtatatatttcctgctatatattttgtttgtagaactatctactctctccatcccataataagcgtagttgtgggtttcaatgcccatctttgaccatccgtcttatttgaaatatttttatgattagtatttttattgttgttagatgataaaatatgaataatactttatgcgtgatttaacttttcaaatttttcatacatttttcaaataagacggatagtcaaatgttgggcacgaaaacttatggctacacttataatgggacggtggagtatatatttatggaacaacatattgtttttaagaataacgagcttttgtttttaacgtaatatcatcttcaggaagttaaatagtatgcctagcataatacactcaccgatcaggatagtatatactattattgtaccttgatttgttcatcggccatctttttttttcccgaaacacataaacccattaaaaattcatgcaagatttctatatgtattagccacaaactagcctgcgcgtcaatagacgtgctctttttctagtgtttttctaaagagcagttttcccgtccttaaaaagatgaggatttttacagtccatcagggagaggaggtcctaaatcctgtatgtcaatatagttagatctgatggctgatgatcctcagtaccgtgaggtattggagtacccatgcggtggtacccccgcccgcccgcatgtggtgagcaagtggaagggcaaaaatggattttcgcatcgtttccagatgcgctaagtcgctcgttcctttcctgatcccctccttggaatggcgcatcctttcctcccaagatcgccggctgcatccaagaagtcaacgacctcagccactaccacctatcgcagccgccgccccctttttctccttctcctccccctccacccttctcgtcccagtcctagatccagaggtcactagttcgattccccatcccattcttctctcttttttctcttctcccacggtggacgcttgatttttccatggtgatggaggagcatcaactctggtccatcgtacatggtgctggagatcgatccacctgaattttggcttctcttttcctcacccgatgatgctcctgtgcccaatttttttctcacacggtggtccatggcaacggaggagcaaatgctatctagttcatggcgatggagatccggtgtagattagcccacggaggagtttaggagctcgtccatggcgaaggagattcccggcctggattggcatttactcctgtgctgcacttcgcccaagctctccggtgacccccgcttccgaccgaacgagcatggtggatgagcagaggatgcgcggtttctgcctcacggggaggggaaggacctctcaaccgttgttcccatcgtacccttttagattgaagggttggattttacttggtacctggaagtaccagtacttagaggtcccagctgttggaccgtagcaaagctctaaaaagataccaggcaccaccatatctaatcaggtaccaaattaaataatatttgtccatgaagaacgatcgcgcggtcgaaaaaatttggtacctcctctcgtcaagcatggctcctactatacgcggtaatctttctgcacgtaagttgcaggggcaaaattgttttttcgcgttggttggattatttctctcacgaaggagccggccggtcccgttcctcccttttctcgcaccggatggcggccatcgccgccccatccaagatgttgccccacgccgctctccactccaccctcaccacgatgtgcaacggcccttgacggtcaatatctaccagatgttcattcccctttctcatggattatgctctggtgtttgaattctcctaaagatgaagatgaagatgaaaattaagtgttttacgcaaaacgagatgataataacgtgtgattatttgagttttaattattacaacttaaaaaagattaatctgacattttagaacaactttcatataaaaagttttcgcacgaaacacaccgtttagtagtttgaaaagcgtgccacgaaaatccaaaagtttatccgaggattcgaacggggaggcagaggtcgccgtaggccactgaggcaacggcagcctcgacgcccgaggagcatgaggcttgatctagcgtgcgctaatttgagtaggaggtcgtagcctcgacgttggacagccatcgctaggcaacagccgattgcatgttcagtggttatacatgccggttcttaattttatcttgttaaaaaatggaaaacgtctctcacatatatatatatatatacacatatatatatatatatatacacatatatatatatatacacatatatatatatatatacacatatatatatatatatatatatatatatatacacatatatatacatatatacacatatatacatatatatatatatatacatacatatatatatatatatatatatatagagagagagagtattaggaggtggagtaatgtggaccattcatcaagaggggcatggtacagaatgaaaattattataaccactggttgtggagtaattaactagtaaaatattagtattttaagtggatggattactcggctggactgaaccggtattgatcggtaggtaaaacgtaaatcgggcattgatttacgcatcgaatagatcttcacagaaaaaaggatcagaacgtcttctttcttcttctgcattggtttgttcttgttctagggtttgacctaaactcactaaaaagaaacaaagggagaaccgttggaatcattgaggattcaatataagacgagatagaccggtcaatggttaggtgaagcccatcttgtaagatctccttcacgcagttgattagttatttatgtagttcacaaattccttcgtataaggggctgaaataagatctctgttctaatagggtttgaataggtggacacaaaagaacactagtacagatcctctcatctgtgacggcccatcacatacctaggcaacgtgggtcgtcagaacgaagtcatctcaatcgggcctaaatttttgccattgtagatgtactcgtcggggtgcatattcctatagcctgtcaccgatgacactcatctgtgacgggctcgaagttaggtctgattgagatgacccccactatctcaatcgggcccaaatactgagcccgtcacagatgagtgtcatcggtgacgggctccaaagaaggcccgattgagatggccttaatgcccgtcaccgatgactcttatcagtgtcgggcttctatttatgcccgttagagattagtgtgcgcccgttagagatgatattttttttgcccgattgtgatatactttgcacactatatatattccagcagtccgttgtctgtagttatcccactgttcactatgttggtgggaggttgaagggggcaaatttttgtaatttttttgcaaacaaaaactggaaaatcataaaagtaagcaaaagggtactaatcatttcctattaatttagtagtacttatgttatgagatgttaactaatattttgttcattgtttagcgatggatcgaagttggatgtacacgactggcctgatgcgtcagtacaaggagtttagagatggcgtattaagttttatgaaagccacagtggaggataggataagaagaaacgacaagtacatgtgttgtccatgtagcgattgcaggaatgagatttggttggatgatgaaaaggaagtacacgctcacttgatacgccgaagaattgttcccgatcaagcttcctacgcgcaggctcatttcacagtgctgcaacatatggctgaagtaacccagtgaacttcagcctattatagatgagaagacaggaagagtgtacctcccaccagcttgccacacattgtcgaaggatgagaagatcgcaatgctatcatgtctggcagatattaaagttccttcgggctattgcgcaagaataagtaagtacgttaaattggaggatctaaagctggttgaaatgaagtctcacgattgccacgtgctaatcacacatatcttgctagttgctatcagaggcattctaccaccacaagtccgtcacacaatccaacggctttgtgccttcttcaatgcaatcggtcagaagattatagatccagaagacctagatgggttgcaggcagatattgtcagtaccctgtgtcacttggagatgtattttccactgttcacctagtgaagcaaacaaaaatatgtgggctagcttttatgagagaaatgtgaccattcgagaggtacatgggaattctgaagtcctacgttcggaacagagcaaaaccagaggggagcatcattgaaggttacacgaccgaggaagtcattcagttctgtatcgattacatggccgagactgatcctataagagttcttgcgtctcgccacgaaggaaggttggcaggtgtcggcacaactagcaaaccgtcattccttctctctgtggcatgccaacgtactaactttgcttcattggggttgg

SEQ ID NO: 28523 - DNA, 3401 bp, Oryza sativa
  unsure (1)..(3401): unsure at all n locations
ccctcccccgcactcttcttttgcttgtatcgagaagccttgcagacaggacaagcatctaagtctgcgtattgcttgtggtacaatatgcaattgtttggacatgcgtgaattctccggacctctaaccctaggggacatagaacctattttgcttcatatgtcgtcttggccaatgtgttctcctgaggaagcatgtccttcagtattcccaaaagttctgtaaaactcgtctgaccatccactactagccttcaacttcattaggtctaatgttgctgataatttggtggcttgcatcttgtgtatagaggagtctccgagtcattgaccaacctactgaacttcatggaatctctctcgttcatagctaggtcatcaacgtcacgcaacatgtcttgcagcatatcagggtccacatcaaccattttaccgcccaatggagatgggacaaacatgtcatgctcttcttcatctccttcttcatgattgtttgcaccacttccatctgcagctgcaccatcagtacccagatcttgctctccatgcttcacccaacatgtgtatctctccatgaatcctcctgtagaacgagacgcgcattcaacccgtcctttgttttgccaggcatattcagcaatagccccagcaagctatcgcacacattcttctctacgtgcatcagatcaatgcaatgacggacctcaagatcttgccagtaaggtagccgccaaaatatggatttttttcttccacatcctcttcttgtcctccttgctatgttttcttttcttcccaaactcattagtaatgtccttcaccatgttgtgtacctgatctccggacaaatccgcaggggcagacccaagttttttcttaccattgaaaattttcttctttcttctaaaggcgtgccgtagggggagccatctcctatgacccatgtaaaccatctttcttgatttcttcagccacctactgcgtgtatgttccatacagtcagagcatgccttccttcctttcacggtttgtccagaaagattacccagcgcaggataatcattaatggtacagaacaatagaactcgtagcgtgaagttctcctgaccatatgcatcctaagtttccacaccctctttccacagaatctcaaggtcatcgtaataggctccaagaacacatcgatatcattgccgggttgtctcggaccttggattaacaagcacaacataatatatttccttttgaagcacaaccatggtgggaggttatagttcgcaataagaactggccaagtgctgtgagaactgctcatgtctccgaaaggattcatgccatccgtacacaaacatatcctcatgtttctggggtcggcagcaaagtctttatgctttcgatcgatattcctccattgaatcgaatccgcagggtgaggagcatttagcgaaggtccgacaggacaatattggtcgatcaaatatttggatcaacagagaacatggtgctcgcttcaacaaatggttcaaggatcatgtagcacggtcgaccgatggcccaagtgagatattacaaaggttggcatggggtccatcttgggatgttaacacatggcaagggtacgatatcaatggatacatattttacaccgtcacacaagatgagaaaagcacagtgcaaaacagtggagtccgtatagttgcatatcaggatcaggctggatcaagcacatactacggccgcatatagcaaatatgggagctgaactatctgaacttcaaagtccctttgtttcgttgcagttgggtgaatatctgcacaggtgtcaaggtcgacatggaaggcttcacattagtggacctggacaacgttggatatgcagacgaaccattcgtactagcgaagcaggtcgaacatattttctacataaaagaccccgcaaacaagaagatgcatgtcgttagggatggcaagcgaagaattgtgggggtggacaacgtcgtcgatgaagaggaatacaacaagaatcttcatgtcagaccttagatcgaccttgacgatgatcccaaagacgaagtggcttacgttcattcagaccattcggaaggcatatcactgtgaatgatatatttaatttgtattggagccttaatgaatgaattgcatatgtttcatgccattccagttaaaactctttgaagaaatggatttgttaattatgtggttttaaaaaattatacttgttatttaaaactacatgtgagaaagcaaattgttaattgtatgaatttaaaaaaagtaatatgaattttaaactatatgtgagaaaggcatttgtcaattagatgattttaaaaaattaataggagttttaaactatatgtgagaaaggcatttgtcaattagatgattttaaaaaattaataggaattttaaactatatatgagaaaggcaattgtcaattatatgattttaaaaaattaataggaattttaaactatgtaaataagacatttgttaattatatgtgataaatcaaatgtaatagcaattttaaatcgggtagaagttaattataaatgatttttataacttaaaaatattttaataagtcatctatgatgggctttagtactatgcccgatagagattattccatctctatcgggcttagtgctaatgcccgtcatagatgactttcatccgtatcgggcagagtactaacgccatcacggatgagtgtcatacgcattgggcatagtagtctacccgatagagatgaggattgactagggtttacttagtgaatcctcatcccgacgccgcctctcactctctcacactctcactctctcagatccaccgccatcggcgccttcctccacacctctcagttctagatccaccaccgccttcttcttctcgacgccgccaccgccttccagttcaacatccaccgctgcctcctccctcgtcgtggatccggcatccctgaccaccgccgccgccttccggttcaagatccggccttcccgaccgccagcgccttcttcgcgcccaagaccgccggcggcgccgaccttcttttcaagtctgtgtccttcacccccaagaccgccgccgccggcttcctctccggctagtcctcaagaccgatgccgcggccatttcaccgaccgccgctggctcctcgtcctcaacgctgccgcctcgtcctccctcgaagatccggccttactgaccacggnccgctcacatcctcctctccagatctacgcccgacgggcgtcgacctcatcctagccgccgcgtcgacctcctccacgccgctggcttcctctaccgattgtcgaccaccgccgttgcggaagaccgccgtccttgaggccggggccgctcaaga

SEQ ID NO: 28524 - DNA, 2634 bp, Oryza sativa
ccgtccttgaggccggggccgctcaagatccagcctccccgacggccaccgcctccctccacgccgtccccgagcccggccccgcccaagaccggcgtccccgagccaggtgcctcccttcatgccgtccccgagcccggcgccgcccaagaccgccgtccccgagcccggcgccgcccaaaaccgccgtccccgagcccatgtcaacctcatcactgagcccgccactgtgtgaggtaggtactcctcaccgatgatgatgcataatgtgatgatttgctgtgtacatgttatatgtgatgatttgatgattcgatgataatgtttaaattcgacaatgtgatagtgcgattatttgttgattcaatgtttagatgctaatgtctacatatgatgacttgtgctagcgatgaatttttgtatggctgtgatgacttgtgcatttttatatgtgttaactagtgatgaatttttatatggctgtgatgacttgtgcatttttatatgtgttagctagtgatgaatttttatatggctgtgatgacttgtacatttttatatgtgttagctagtggtgaatttttatatggctgtgataacttgtgcatttctatatgtgttagctactgatgaatttttatatggctgtgatggatgaatttgtgaatttgggggagaatgggatgttgggaaaaatgtttagatgtgggctgtgatgatgaaatattataagctatgatggatgaatggccagtgatgattgctcaagaacatactatttttgggatgaattgttgtgggctgcttttctatggcagtttttttactgcataaggacatacacttgttcttatatagttgtttgcaaaatttttagggtattttgggtccaatgggatggatgaattgatgtgggctgtgatggttgaattattttgggggaaatgtgagttttggtatgtgacctgttgtcacacccagaaattctcgaaccagaatttttaagctgaatgtgcattaaatccctgtccaggaccagccagggtacacaaacgacaattgttgacatacagacccacgtcttacaaaaatataaaagattacaaatgcagcgggaaagataaaagcgagctaaaccgggaagcttgacttcagcagcgggcgactccactccacaagcaaaccttgacggcagtgacgaaaccaacctctctgagatagctccaactgagaagaacttcaactctggtgtgggggaaaagagagcaagactgagtactacccactgtactcagcaagtcatatcggaagaggaggtatgatgcaggatataaccaaaggaagctaggggttcttttgcataaagcaggcatttcaaagcagtagttgaaagcagtaaaactgctgtagtaattaatcaatattaaccaatcactgtccaacgctacaccacgtttcaaaaggcatgcggcggcgctagtggcgagcggcgcgtgaccggtaggaggcacaggagagcgcggtgaaaaggggaaaagggagagggagatgcggggaagctttataggggctcgagaggggcggacatggccgggaaaccccccgatttggccggcgacgtggggggagagagagagagtgggggggattcaaatcgaatcccgcccatttgcgggcgcgcgtgcgggcgggaatggcggggagggcggcgacgtgggaacgcgaagtgggggcgcggcgtggagcgaagaaggcggcggcgcggacggtttcggcgacggttgccgtcgtggggcgggtggctggaggaaggggacgacctgacaggtgggccccacctgtcagcgtcccggagagaggggaaaagggaacgggccggcccaaagaaaggaggccgagcgcgggagggtgtgggccgacggcccaatagagaaaaaaaagaaggaaaagaaaaagaaaaggaagaaaagatttttcctgggatttaaaattgcactttggtgatttttaattggttaaaattatttccaaggctctgaaaattccactaaaaatcttgttaatgcattggagcatggggaactcaagaaaaattccaccacgctatttccgattattaattgcatttattaactagggatttagctctaggttaattaagataatttcttcgggcaatttatttaaccaatttttaaagcaagaaaaaggggaaacttctgggcgtgacaaacctaccccccttaaacggaatctcgacctcgagattcggaagagctggcgaagaggtgcgggtgggtggcctcttcttctgagtgatgactccactgaactttgcagaatctgattactttgtttctggtccttctctcactggtttcgaggatacgagtcggcttctccacatacgtcagatcttcctgaatttcgatgtgatccggacttgcctgttcctcaggaactctcaaacatttcttcaactgagagacgtggaacacgttgtggatgccaagcatgtttgagggaaagctcaagctggtaagcaacttcacctctacgttccaagatcctgtattgtcccacaaagcgtggtgccaacttttctttgttttggaaaccgatgtactcccctga

SEQ ID NO: 28525 - DNA, 7064 bp, Oryza sativa
tatttattaactagggatttagctctaggttaattaagataatttcttcgggcaatttatttaaccaatttttaaagcaagaaaaaggggaaacttctgggcgtgacaaacctaccccccttaaacggaatctcgacctcgagattcggaagagctggcgaagaggtgcgggtgggtggcctcttcttctgagtgatgactccactgaactttgcagaatctgattactttgtttctggtccttctctcactggtttcgaggatacgagtcggcttctccacatacgtcagatcttcctgaatttcgatgtgatccggacttgcctgttcctcaggaactctcaaacatttcttcaactgagagacgtggaacacgttgtggatgccaagcatgttggagggaagctcaagctggtaagcaacttcacctctacgttccaagatcctgtatggtcccacaaagcgtggtgccaactttcctttggtttggaagcgatgtactcccctgagcggagtgacacggagatacacataatcccctgtttcgaaagcgagctcccttcggcggttgtctgcatagcttttctgccgagattgcgcaattctcaatctttccctaacagctctgactttttcttctgcctcatttaaaacttctgtaccaaacaattggcgttcccctgtctgatcccagaagagcggagtacgacaccttcgtccatacagtgcttcaaacggtgccatctgcagactagcttggtaactgttgttgtaagagaactcagcatacggcaagcttttgtcccatgctccaccaaagtcaagcgcacaggctctcaacatatcctctagtatttgattgactcgctcggtctggccatctgtttgtggatggtaagcagtactgaaattcaaccgggttcccaattcttcttgtaatttctgccagaactttgaagtgaattggcttcctcgatcagacacgatcttcttaggtacaccatgtaaacacataattcttgccagatagagttctgctaatttcttccctgagtaggtagtgtgcactggaatgaagtgagccactttggtgagtcggtcaacgactacccaaatagaatcatgccccgatgacgtcctgggcaaaccggtgatgaaatccattccgatttcttcccacttccattctggaatctgaagtggctgtagcaaacctgctggcctttggtgttctgcctttactcgttgacagacgtcacagagtgctacgaattcagctatttcccttctcatgctaacccaccagaacttctctttgaggtcttggtacatcttagtactaccggaaagaatggaatactgagtttgatgagcctcggttagtatcaggtcttttaattccttgttttcgggtacacacaatctttctcccatccagattgttccttgttcatcctcaacaaaacctcgggcttttccaactctcatgttctttttgagctctgctacttcaggatcacttgcttgagctatgcgaacctgctccaccagtgtgggctgtgcctctagggcaaccacgaatccgtgctcaactataccaaggttcagatgttccaaatcgcgttgaacctcacaacatagttgctctacccatgcaacattgcagtagctcttcctgctcaaggcatctgcaaccacattagccttgccgggatgataatgtattcccatatcataatccttgatcagctccaaccatcttcgctgtctgagattcaaatcaggttgagtgaagatgtattttaacttttgtgatctgtatatacctcacaacggtaaccgatgagatagtgccgccaaatctttaaagcatgaacaactgcggccaattccagatcatgcgtcgggtagttgccttcatgaggacgcaactgccgtgaagcataagaaaccactttgccatcctgcatcaacacacatcctagcccctggcgagatgcatcacaatagacctggaaatctttcgtctgatcaggcaggattaagactggtgcagacaccaaccgtcgtttgagttcttcaaaactcctattgcatttagcagaccagataaacttttcttccttcttcaatagctgtgtcattggcttagcaattttagagaagttctcaatgaaccggcggtaatagcccgcaagtcctaagaaactccgaacctgagtgactgtccttggtggggtccatttggtaactgactccacatttgctggatccatagctactccttgagcattcacgatgtgaccgagaaactgaacttccttaagccagaagtcgcacttgctgaacttggcatatagctggtgctcttttaacttttcaagtaccagccgaagatgctgctcatgttcttcctcggacttggagtagataagtatgtcatcgatgaaaaccacgacaaacttgtctagaaatttcataaacaccttgttcatcaaattcatgaagaaggcaggtgtattagtgagtccgaaagacataactgtgcattcgaacaacccgtaccgagtgatgaatgctgtctttggaatatcctcttcgtggatcctcaactggtgatagcctgatcgcaggtctatcttagagaacacagtagctcctttcaactgatcaaacagatcatcaatccttggcaaaggatacttgttcttgatggtgacctcattgaatgcgcggtagtcaacgcacatcctcttggttttgtctttcttctccacaaagataaccggagcaccccaaggcgacgtgctcgggtggatgtatcccttctgtaactgttcatcgacttgcttcttgacttccgccaactcgttggctcccattctgtaaggcctcttgtggatcggtgcagttccaggtaccaagtcaatccggaactcgatatccctttttggtggcattgttgtcagatcgtccggaaaaacctttggatactctctaactatgggaatatcctccagcttcttagtggttttctccactgctacctcttgttcttcaccagcagcctggtttaaactgatccctggcttctgcggcactagagactggaaggttaccacctctccttttgcattggtcaacttgatggtgcggctggcgcaatcaatcactcctctgtgccttgtcaaccaatccattccaagtatgacatctaggtccttggattcgagaagaatgaggttggctggaaaaatcaacccttgaatttcaactgtcacagatgggcagtagtgagttgtggtcatgccacctccaggagtatgaactcgcattggtatcttaagcttcactaaagataacccatgtgcaccagcaaaacgcttggaaatgaaggaatgggttgcaccagaatcaaacaatattactgccggtgtcgagttgacggggaatgtgcccaatataacctctggggctgactgcgcctcctctgcagatgcatgagtaacacgggcctgaacgaacttgggtccagcacgtcttggcttcgggcactttccaaccgtgtgtccgggtttgttacaattgaagcagagttcgggtttttctcccaacctcttgggctgttctggcagagctggctgaactgattgggctggaatctttagtgaactcggagtagggttgaggctgtgctgctcactgttgttgtgactgccactatggtggttcttgttgaagctacccgggtggtagggacggtgctgccggataatcatggtggaaggtccaccgtgatgtcccatcgtgaaacgaggcttctgactcttccctggggagtcctgaactgagctgtcttcctcttacggtttattttgttacagtgctcctcctgacggatagccttatccaccagcttctcaaagtcctcataatctctagagatcaactggttagtcaattcatcatcaagaccagacagaaacttctcacgcctcccgtcatcggtacgcacgtcctcaggggcgtagcgtgcgaggcggttgaactcatgcaaatactctataactgttctggttccttgttgcagggaacggaactctctcttcttttgtgccacaattccctcgggaacctgtgctttattgaaactatgacaaaactctgtccaagtaacttctgccccagttggacgggtcaccatgtagttgtcccaccaaacagaagcgggaccttgcagctggtgtgtagcaaaagcaaccttctcttgctcgttgcattgcaaaagattcagcttcttctcaatggcatgaagccagtcgtgggcctcgattgggttggtggtgcttgagaaagtgggcggcttgacacgaagaaattctaacagtttggactgaggaggtggaggaccaaactgcaggttctgctgctgctgctgtgcttgctgctgcacctgttgcaacacctgatggtactgttgctgcatctgttgcatcatcactgtcatcatctgagtctgattgtccaacacctgagcaattgttgggttctcgggcggtggggacggactgttgtcagatgcactgttggcacatgctccattgatcagctcttcgctgccactggcgttgttcgagtcgcgtgaaccattccttatctccatctgaaggggataggtagaaatatgagaaaaggaagaaaaacagggggctcagaaactaatctttcttatgaatttaagtgcaattatcttaatcttgattaaaacactgaaaaagaggcacgcaactcctaattgaggcagtcataccactgacacatgatatcgaccgccgactaacccacaagcaacaaacctaaacacgaaaactagcaagcaaacagactaagaaggcgataaagctaagggcggcgactctgaagctcggggcggcgcttgcaatcgagggataggactgacatctaaagtagacaagggataggaaccaattcatgctcaaatccaaattaaacaaagcaaaagaagactcaaataaataaccgagcatgatgatttttatgcatagaacaacatttttcacgaaccgagacaaaagacactaatgcaactgactaaacaataacttaatgcatgaaatagatgcatagtcatactgatacgcataaacttaccccaccgaacataggcacgacctaatgcatatcacccgacaattcccgaccgactgccgaataaattccgaataaacttttactaaatccctagaatgtccctagtcgagaaatccaattaaataagcgaccaagatttttcccacaaatcgaaagaacaaaccccaaaattttcccgaaacaaattccaagtgcaaaagggcatatgtatatgaaaaaaaaaagggttcagagggctcttatgtttccagttggcttgtcctacggtcaaggtcggctctgataccaacttgtcacacccagaaattctcgaaccagaatttctaagctgaatgtgcattaaatccctgtccagggccagccagggtacacaaacgacaattgttgatatacagacccacgtcttacaaaaatataaaagattacaaatgcagtgggaaagataaaagcgagctaaaccgggaagcttgacttcagcagcgggcgactccactccacaggcaaaccttgacggcagcgaggaaaccaacctctctgagacagctccaactgagaagaacttcaactctggtgtgggggaaaagagagcaagactgagtactacccactgtactcagcaagtcataccggaagaggaggtatgatgcaggatataaccaaaggaagctaggggttcttttgcataaagcaggcatttcaaagcagtagttgaaagcagtaaaactgctgtagtaattattcaatattaaccaatcactgtccaacgctacaccacgttgcaaaaggcccaaccaaccacctgaactacaccagttcattaagctaaactaggggtgagactaatcacggtgaatctggttgatcgcccataaccgcgggcacggctattcgaatagttttactctggccagaggtgtacaactgtacccacaagacacgattccacacatgtcgccatgccccgaagtatcaccatgatactgaaaagggggaaatcgtgacaagaccctccacataaccctcccctaaccatccacaccacgctaaggtttcacccccacccctcaaaaggcagtgggcggtcccctcttgcgccgcggtgaatccggcagctggacaaccgaagacctcggccgacccaactccatcacgcccaccctcgccaccggtgcctaggaaagggtcgagctatacttcagatcaagcagttacccactcccgcttgtggtaagcacggtaagtctcccagggtttcccgtgaaccggtccttaactgctatgggtgcgaccagcaaaaccatgcactcacagcccgccattcagaatattttaataaactgacacccttgcggtggcaccaatctaaagctatgccaatagacaaagtctatgtaataatgtgatccctttttgtgtactagttgagctaagcatggctaagcatttcctaaaccaacatctaatcattttgatacccaggttatcaatggcatatggtaaacaataaatggctaagtaataggacccatcccacatgacattgtaaaagaatgcaacatttaatagaaatgcagggtgtttgtaaattgggtacaatatgatcaaatctaaagcatgacttgccttgctctcgaactgatgagacctcagcaacgtcttcgagaaactgcggatcgacgaaacggccgaaacctacgcgacaaacaaagcacacaagcaaaacatgctataagactactgaaacaggaaacaaaaccatttttaatggattctttgcatttctcttgatttactgagacttgaatggacttaaacggagctcagatgaattacttatgaattttagaagataaactgtgtttttactaataaagaaaaagtccttaattaat

SEQ ID NO: 28526 - DNA, 24818 bp, Oryza sativa
  unsure (1)..(24818): unsure at all n locations
gttggccggagacgaaggagaatggatagctcaccggtgtgcgaggagaaccgggctccggtggggtttagcggaaaccgagcggcggccgaggtggctcacgcggcggcaatgctaatggcggcggcggctctagcggctgcggcgcacgaccggaggtggcggcatgcggcggcgctagtggcgagcggcgcgtgaccggtaggaggcacgggagagcgcggcgaaaaggggaaaagggagagggagatgcggggaagctttataggggctcgagaggggcggacatggtcgggaaaccccccgatttggccggcgacgtggggggagaggaagagagagagagagagtgggggggattcaaatcgaatcccgcccatttgcgagcgcgcgtgcgggcgggaatggtgggaagggcgacaatgtgggtacgcgaagtgggggcccggcgtggagcgaaaaagccgccggcgcgcacggtttcgncggcggttcccgtcgttgggcgggtggctgaaggaaggggacgacctgacaggtgggccccccctgtcagcgtcccggagagaggggaaaagggaacgggccggcccaaaggaaggaggccgagcgcgggagggtgtgggccgacggcccaatagagaaaaaaaaagaaggaaaagaaaaagaaaaagaagaaaggatttttcctgggatttaaaattgcactttggtgatttttaattggttaaaattatttccaaggctctgaaaattccactaaaaatcttgttaatgcattggagcatggggaactcaagaaaaattccaccatgctatttccgattattaattgcatttattaactagggatttaactctaggttaattaagataatttcttcgggcaatttatttaaccaatttttaaagcaagaaaatggggaaacttctgggcgtgacacctgtgttttttatggctgtttttttttccataaggacagaccctctacacttgttcttatggatgaattattatggctgtatcgtttttgcgtaaggacagaccctctacacttgttcttaatttcttttgggggtgggggcagttgcaaatgatggtaattgatgcataatttctgagcaaaactgagaccaaacttattttatgtcatgacttgtgtttttttaggtacaaaaataatatatatatgacttgtgtagtatgggctattttgggtgattttgagggaaatgggatggatatgcatagaaatctgttattaaatgaagttactgaaattatggcatttaggagaatacgaagtgtcccggttgccaaatctggtttggtcgggttactgcctgcacggtaccgaccaagacaaattggtaaacagaacattttgttcaaatacaacatttctagaaatctgttatcgttaccaatatcctagattgcttttaaggtcatttctttagggaaccccattcccataaattcagtatccaaagatggttgttgtatgtatgggaataagggttccctaacgaaataatcttggacgcaatctaggagtttgctgatgataacgttagggatcttggataggaagggttttggttgcctgtgtgttctatctgcgttcgccttgtcggcagatatgtagcatccatgttccttaggcggagcaaacgggatctcgacctcgacatccatatcgcacaagaacttgctaccgttgccactatcttatggtagtgacattgatagcaagttcgagtgggatattgatgtcgaggtcgagttcccggctgctccggccgtaatgaacatggatgctatggttctgtcgacgaggcaaacgcaggtaggagatagaggtatatcaaaccatcagagaatgtgtgtagatgcaattttgtgtttaaaaagtactttctccccgtacaacagtgacataggacatgtcatagcaaggcgaaccaatgtcgacgaccactactgggactacttcgagccggaatcctaggacccagaataagattcctagggaagtctacaccataaaagaggtggacgatgttggatatccgacggctccgatgaaagatgtcaaaaagttccctacgatatgcggagtcttagggaggcggaacttcactattctgaaggaccacattgatctggtccctcaagaagaaaaagaagaggcctggaggcagttcaaggaaagcttctgataccctacagaggccgaggcagggctcaagcggcaagctatccgcaagatggagaattgttggaaaaatttcaagacaacgctggtcacggagtacgtcctcaaccccgcctagccagaaccatttgggaaatacccattcatcacctgacccgtgtgggatgagttccatgcctccaaatcaacgaaagagtctcagaaaaaaaagccaggcctaccgtgatctgcaggcaaggaaccttcacccgcaccggcttggcacaagaggctacgcggggaaacaagcagaatgggacaaggaggatgaagctgcagcagaatctaacaccccacaagtgcttgctgatatcccggtccagagggcaaggaactgggcaagggcaagggtgaaaaagaatagtgacggaactctttcgttcccaattcccgaagatcaagcggtgtaccagaaaatcgtaagttgaacaaatagaataagtttcattatgttgtatcgtattctttgtctaacgcgtcctaactttaccccaggtcgaactgaatgctgagagacaggcctcccaagaggtctgctcacaaaaacgggaggatgacatcctcatgaaagcgttgggaaacgaagaacaccgtggacgaacaaggggcattggctccaatgttccatggaagtttgggtttccccaatatgcgtggcagtacaagaagcacaagctttccaaggcgcagaaagctgcacgcattaaggcccaactttgggaggagcttaaagaagagctcactgccgagctgttaggtatggaggctcggatggaggcacgcatcagggataggtcgaccgatgccactcccggtcccatagtacaagtgagccccacacagaggcgtagcagctgcgcattcaactgaggctccggcagaatagtctaaaggccccgccgcggtggaccacataacggtaaaaacaacttaataacgcatatattgtattagcaccacaatacattgcaacatatactaaggacactaatgaatctatcgcaggaacgcacatcgtgtaccctagtcgttagggtgacaccaggatttgcaattcctgtcgcagagggtcaagcattcaagcctaccccggagacccaagtgcatggggcgcagctgctagtcggcaatgccaaagttcaagtggacttagtgaagcccgattgtgttggctacactatcccacacccacctaatgacgagattctgacccttggggctgcacatgggacctttattcaatggcccaagcacatcattgagatcaatataactccaaggccagcgccaagttctcgtccgccgccgacgcgtccccatccaactgttgtatctctccattcctgccgttgaacaaagagatgaagatctccaattacagtatgatactgattttggggacgacggtatgaaggtcgacagtaggccgcacctctcccctcttgccaaaagtagcaagagggcgaaatcttctccacccaagcttgacacacgcagaaaagctgctggaacggggagaggaaaagtaaaggtgccattagccccaaagaagcttgatcttggcaaggcgccagtagctcctccaaagcttccagccgaattcacattcggcatgccattggtcggagacgatgccttattcaagatgggccctgcatgcaaggagttgcacgggtactacatggagaagtccaatgcaaggaggaagaatagagagacctacatgttgggccagcatgatggtcagccgtttctcgggcctactgccttcatcgccatagacttcaaagatctatgggacctctacagggtgcgagcgatcgacaccaacctccttaagtgctactccttgtaagtatttcttggtacacgaaatggtaatgactgtccataaattacgcttaccctgactcttgtcttgctcgtagattaacctggaagcatgtccatcataaagcaccccatattgccttacttgatccaactgtcgtcaacgagacaacgctgaaaaatgattgagcaaacatggtgggctatatcaaggactgcttatttgcccgtcaagacaaggacttcattatgtgtgcctacaatcaacagtaagcgtgtactatacttatactcaaatactcgacgcgtacaactgtagtatgtaactggcaatttaataatttcgcaggcaacattggattcttttggtaataacactgaagtggagttcagtacactaccttaactccaatatcaagccagaaatatacgattggtcggccatcgaatctgccttgaacgaggcatgggaccaatacgtggcaagaggcgggaggcataaggatgggcatcccaaactcggtcacaagaaagacttcccaatacgtcaacaagttggcgaccagtgcaggttccatgtctgtcataacatgaggagcttcgcagacaaggtgacattgctcgaccttgaggtgtgtaattcagttgtttatacacacataggacgacaaatttacaagtatgtagactaacttggcaccgaacatgcaggaatttatttcaaggattccggaaatcaacttcgaaatcattagagaggagatagcacaattcatactagatgatatcttgtcaccgaaagggatgtttagagtgaagtcctaggtagctcgtctcggaatggcagaacatttgcaatgcatatgcgacaaacatttgatttttgtaaatattctttgtaatacaattatattctttagagtaaagtcctaggtagctcgtctctgtatatacttgcatttctagttacatataaaattgttccaatttattacttagttttgcaggttttgatgcatgtcggcggtttggagagaaaaaaaggatgtgaatgacatatatatgtgaatgggttgtggatgtgaatgtatatgtgtttgattttgtgaattggctgtgctatgatggaatatgaatgtgaattggctgatgtaatgctgggaatgggtctatatgaattggctgtgatggtatatgtgaattgacgctgggaatgggactatgtatatatatatatatacatatatatatatatacatatatatatatatacatatatatatatatgcttctgtcatttttgcagcgggcatggctagcaaagtcctgaggctagccaaaaagacaaattttattttttttggttctaaactcatccctgacgggcatttagctaatgcccgaaagagataactcatccgtgacgggctatagagtcaagcccgttagagattagtcatcagtgacgggcttttagaatacacccgatagagataagtcatccgaaccgggactagtttgattcaacacgtggggtcaaacctatcggtgacgggctctggctgaatgcccgatggagatgactactcatccgtgatgggcttagtggtgtgcccgattgagattagtcattcgtgacgggctcctaactacggtggtttgactggtcatactcatctgtgacgggcttggttgtcggcccgattgagatagcatccatccgtgacgggctttagcccgattgagatattttctcacatcagtgacctttgcccactgacggggccttacccgatagtgatgaggctttcagcccgttaaagataagcgatcctgttctagtggaagtcacgtgcggtggacccgcaaggagaaaccgcaaggagaaacaggcaagagggagaagctctagcatggtcatgtgtttcggacaaaacataaatctatagaaaaccatgcaaatgaaaacttttacgctagtataacatgttctttggaataaaacataaatttagagtaacgtgtgtgttcttggaacaaatcgtaaatctagaggaaatcacacaaataagaacctcaaagaacacaacctaaatctagagaaaatcatgcaaatgagaacctaaacgtacgctagtatcaggcaaatgacttaagtggtacctatacagtaccgatttaaatttggagacaattttgccattttctctctagtagcaaatttatgttttacccttggtacctaagtacgtacactaatactaatacttaaatactgtttacatggtaccatgttactgataattaagcgttggatttttactctttggaatgcaaaaactataaaagctctcatatatatactcccttcgtttctatatatttaacgccgttgatttttttaaatatgtatatacactagaaaaaatagtacctgtgcgttacaatgggtgaagtctattttaatcttattattgttatatggtttagttaagataaaattcactatggaagttcgcttggatatatatttttttagaaaatcatgagctgcagttagctaggagtccgatcgtcccaagttagcatgtgagtttttttaaaacagatttcttatatgattccttctgtaccaaaagtgaacgatcttaaaaaccgactcaaatacagatatatatttccaaaagcaaacaaacttaaaaaccgactcatacacggatgacgtaccaaaatatcggtaaaaacaacttaaatttttgtgatagtagagatatatagaagtcattactaactcaaataaaaatatactgctatatgaattatattgttgaaaagctcccctagagcaccaaacgaagtttaatccaatcgaacgtgattgcaagcttcagtgggatcgatcgatcatgcatgacatctcgcgacatcctgctaatccctgcaatcctgttctttctcacatccacgcgtgtacgtgtttgcgggaccgccggggtggaggagctttggtgttccagggatgtcgtcgtggttcatggtcgtgtagccgatttcattgtcggcggagacgccgacatcctcgacggcggtgaggacgaggagagccaccagggacaggccgacgacgacggtcaggttcaccctagctttcgccatggcgatccgagctaatatagctagcttcacagatgatcgacgggcacctcgatcgctcgatctccttctctttctcctggtttgtgtgaatctgtgatgagttaattgttggctaaggctaactgattttatagtgtagcatatgtctaagatatgagaggattaattaatggtccaggagtgttctagctaggggtttgtattaccgcatgcattgatgatttcatggtaaaaactaacaatagcatggatcatgcagggatggatggctcattttggccaccatctaatgtatggtgtggatatatatagcttttctaaagttaggtttctgatgtgcggtgcaactgactactgtaactgttcgcttttaatttattggccgtagttttgaactaacaatccctgacagtggctttcaacggttcataaccgcctgcgaatattgtgcttataaattctatgataaaaaaaaaggctatatgtgatgagttgtgttactgcccatatggtttcatggcaagatttgtctataccgattggaagatatatataaaagaaaaaggctatatgtaccaacttttttcgtactaacactgaaacataattgactaatgcaccagaagaaatactcattacgtttcaaattacttgtcaactttgtcctaattaagtcaagtattcctaactttaactattaaattcaagaaatttatgtgtgaactatatattataaaagcatatttctcatgttgaatcttaaagcataaagcactactaaaaaaacctagataggtgttggttgggaacccaacataggtgccggttttttccaactggcacctagaaagtgatacagatgagagaaatcaaaggtgccggttttgaaaccggcacctttgtggtcccaagaataaaaaaaatcggctcgatgccaaacatgcccaattatcgagccactcgccaaacatgcccaattaatatttatgttgacgccaaatcgtgttgtcatgttatgtgcaactcgcaacggcacccggagatgcgccgccgcagggaatggtagatatatgccaccgaacgaacacccgggagggacccatcagggttaacgcgtgctagtttgtcctaggttcaactggccagttaggacatcctgtaacgccgacgagagacgacgaacaattaagaaattggagtagaatatactttgcatggcataggtagcaaggaggaggaagatatggaatacagagggtttggacaataaattttaacgattgattggtggttgtttcaatcaggcttagtcctctatatttataggagaggtgaacttgtttcccagggtcttttccacatccaatagatgttgaaaccaattagaactcaaaaatctcagacccaagaaaaaaaaacctgagatccgacaagtcgaactgctggtacgaccgcccacatgtcgccagtgaggccgccccccgcagatgaattagaccggccctatggtggcggtccgaccggcctcacgtggtaagcccgggaccttctcaaatttgaccacattttcatattattactctaggtgtgatttcgatgttaaccatacatatgcttgtacaattattcatgccggtttattaaaaaaaagaagaagaagaagcaaccaacccaaaaagcctggcaaacatatatcgtctctgtcccctctataggatagaaataatatacaatggcgacggtttcttacagcaaaacaccatatataattttgtggtatacatccatcaacagatccacattcttacaatgctttctagcaaagatcatggcaaattttgccaaagctgcaactatatatatagagagagagaaatcattactaacccacataagaatttgctgttacaatacttatattatcgaaaagctcccctatatagcaccaaacgaagtttaattccaaacgaacgtgcatcgctatagcatcagtgatcaatcgatcgatcgatcatgtcatcttgctatccctgcacgcctgctctttctcacatccacgcgtgtatttgttagcgatgtcgccggggtggttgagctgcggtgttccaggaatatggtcgcgattcatggacgagtagtcgatgacctgcgcgacgacggcgacatcctcgacggcgatgatgaggacgaggagagccaccagggacgacaggccgaggacggtcaggttcaccctagctttcgccatgtcgatcgatcgagctagagctagctagcctcacacagatgacgacgggagtagtcttctggttggtgaatctgtgatgaattgttggctatggataactgattttatagtgtagcgtgtgtcaaagatatgagaggattaatatggctgggtagagtgtgcgttctaggggtgtgtattactgcacgcgttcatgatttcatggcaaaaactaacaataggatggatcatggatatatggatggatggcttctttttggccgcatgtaatgtatggtgtgcatatatatatatatatatatatatatatatatatatatatatatatatatatatatatatatatatatatatatatatatagcttttctaaagttaggttcctgatgagatgtgcggtaaaacatgaatatcgtaactgtttctcttttagtttagtcttgaatcgtctctgatagtggcagtgttcagaaccacctgtgattgtgcttataaagtctatgataaccctttttacggttgtgttattgtctatatggtttcaagatttctgtctatactgattgcaagatcggaattgctaaaaaaatatcgcaagttttttgggaaaaaaaactttcaaatgcaactatatatagtacagttgtaatgtaactagactgtaattacactataattacattgtaactgcactataatgacattgtaatctctatattaagttagatacaaagttgcatatattactttaatacttacactggtggagaagtgctttttagtcccggttcgtaaccccccttgtagtcccggttttcaaccgggactacgaacccgggaagtcccggttcaaataaccgggactaaaaatcgatctctagtcctggttggtgttaccaaaccaactgggactaaagatatttttttctttttttttctgtttttaatattgaatattgacttcacaccatcccctcctatatccaaatcatcacatatcacagaacatctccaaatcctcaaatcctcaaacaaattatctccaaatacatcacaaactcttaaaaaaatagatcatctccaaatacatcacaaactcttaaaaaaaattacatcacagggttctaaaaaattcatcacagattcacatctcatacaaaaatacatcacagattcacatctcaaaaaaaaaagaaaaaaaatccggtcggcggccactgccgccaccccgcctcccctttgcgccggccacccgccgccgccgcctacctcgcccgcgccggccgcctgcacgcttcgcaaacttgtggggtgaaggaaaaaaaaggaaggagaggagaggagttagagataaggaaagagataagaagttagagaggaaaaaaaatgagatagagggaggagtttgttgtgtggacgggaaaagaggatcggtactagggattatatagtgtgttttgatttttattcccagttagtaacatcaaccggaactaaaaataggtttttagtcccggttggtgttactaaccgggactaaagatcctagggccctggcaaggaatcaaccggaactaaaaatgaactttagtccctgttaccaaccgggactaaagatgatttttagtcccggttggtaacaacaaccgggactaaagatcttcctcttattaaccgggactaatttttagtcccggtttttaatggaatcgggactattatggatttgggtcgaccgaccaaaaatggtttctctaccagtgttatatacaaattatattatagttacaatataattaaagtggaattatattacaattatactacacttagattttgaaagttttccgttaaaaaacttgtggcagtcttttagatagcatcttggaatatataaaaagatgagcttaatttactaatgtacaagaacaaatactccatatgttttaaattacttattgttttaactttgccttaaatcaaacattactagctttgactattaaaatctatatattcatatatatagtttgaaaacattgaagtatatatgtaattataaaaagcatttgttttgatgttaaactatattttttttaaaaaaattgatattcaaagttagaaaggccaattggctcatgtctgatatgggctgctagagacaatacaaccatgtacatcgcatatatgtgtttacttaaaagccgtgggaatggctgaggattagtgcgccacgtcagcaattttttcaaaaaaacccctgtgtttttgttaattacataccagttcccatcaacatcgtccgtttgatctcgcggcagggtcgatctaaccgtccacgtgtccgctgcggcggcccttcctcagccgtgggatcgtcgaatcgggaacgaacggcgtaaatttagtccacccacacgaaaccctagccctccctccccggcctgtctcgcccgcagccacgccgccgcctcgccctttgcacgcgccatggccgccgcatcctcgccctcctccagccatcatcgtcgcgccgctgccaccaataagggaggccgtggcatcagctagtgatggccccgcgtctgtcgcccgcggcgagacgcgctctccgctccggtcagtgcggcgccaaatccacctcggggacatcggctgtctcgctgcggtagaagaaggtggtaggaccattgggggttgaacagtgattgctaggagatcgaggaggataaggaaggagaagagcacagctcagttacggctgccacgacgatagctgctggtcggcgacaactacggcaaggccatcgcccagtgccacacgtgccgctgtacatgtcaccacgccgtcctctcttgctccactagaatctcctcatctcctctccgtcctcttcaggtgagtttgggggccactttttgcaggcttgcaaccatgcttctctcctgcctgtgctaacgggtcatggctgttgttattgatggtactgcaattttactgttgttgtattccacagatatttgatttgggcatagttactattgattacaatctcacttatgcatatttaaagtaaatcatgtactcatccattccattgaaaaatagaacttgcgctgagttggtgatctttagatattaccaatcatttgttgcagtgtgtttttttgaataaagatcttttggacttgcttgaactaatatggcatcttgcctagagcaactgctgatttttgcctcattatgaacctatcaggaatggccaattcgtcactgattattttcttgacgttcatgattcctaacactatgaatggatgagtgacaagtttgacaatgaggtatgtacctgatcctgtcattttgtctttttcttaagaaaagcagggtctacccttatgtactttttcctgcagttttgcctacattatgcatgaatctaaaaagtccacctacataattcatcaagcctacaggtgctctcctacgatatctcacaaggatttaggtatactcatatttctgctagacccaaaatctcatgaacgagtatgtatctgtgttctctatttaacaatgagcgattcattgaagctagaatgctttagatatgataatttgaatcaaggtcgctaattgtggttcaataccaaatggcaatgctggtggccttgctgtagttgtcgaattaactatgaacctatctcagcagctgccaaattcatgaataatttcccccctttttcctgtgttcatatttctatcatttacattccttttgcaggaatttatacatcctacaaaagacagaacaacatagtaggatgatatgtttgggtacggacttcaagattcacttagatttgattaaaaaatgaaaaatatttatcacatcctaccttcacagctgtttattttttctgagttaggagtatgtagtactccagataatcaaagagtccaggattattaaatatgtgcatgttgtgtttacatggcgagaaaaggctacatgaccaaaatctttgcttaattcgtgcaccacacacatgaataagtccgaatctttccactggtcatttcttttgctcacggccaatttgaagagctatgaactattcgtatttctgtcctcaaacaaatcttaatcctaatacttgaaagaaaaagagagattcaatatgtatctttacttcatgcaaaaacacattgctcctttgtattttgcatttcagaattcagttttgccttatgaatagcttttcatcctagaattaactaatcgaacaacaaattgatgttgggaagatctaactaataatcaatatctgctgcaattgtttcttaccattcctgctctgtacttgcactgatgataccatgccttcatagcatataactaagcgtgcattataccttcttatctgtttgttgtgtggattggctaagcaaacataatggagtgctattctttgtatagacatgtaatttttttctgtttgtaggtaatttttacataaatgtgttgttctgaactaataatccagtgttctgttcaggctttccccattcatttctattaagtgaactattgtatcagctctaatttcccttttatgtgcatctactgaataatgttgcagggtctagtgaaatctattcatgtattgtgacctgaaaaattaatcaaggattgctctttaccgatgaagataacatacggaaatatgccaagcttgcaaagttgatttgattgataagaaatccatgtcccattatcaatgcgttcaagagtcaagaatctgtgctggtaatgggtactacatgaacttttctgcaactacaggtttcaagcatttgctccctttctgttctatgcactttccaaatttatcaaggcaagcacatggatcatggacgttatgtactaatgtacatatttgccaaactatcgcctttctaaatatggaacttttcatgtttcagaatttaggtaagatttagggttgccacttatatttagtgatcagtacaaattcaaagttttgtcatttttctttggtgcatcataggtcaattgagattcattcttgccaagctttcatcaaaattctgacagcttgtgttttacacctacctgttttttctatgtttacttacaagcatgaatattggtagagaagaatagtactatagtttgctcatataagtaaaccaggatatgagatgatttggtgtggcctgagacaaagctgaattaatcagcaagtttttaatcaattattcttgctaaaggcactttgagaagttgttttcagtttgacaaaaataataaagaaaacaacaagaagaaaagttgtttaaagttatttaagtaaagttgtgagctattatgtgatagtgcatcaaatatttgtaagatagatgtagccggttactctgaaaagtaaaattgaatgaatcaatgcccatctttcgttttttctgttctttaatttatattttttagcgcatataatcctttatgttgtcgattgcacaatataaaataatggaactttaccaatgccctgcaggtgaaaactttacattatagttcatcattctatctgacagctaataagacttttagagctccttcaattactactcaagcttccgtgtagccatgccaataggattagcaatgaagattcccacgcatgctcacacatatgcatgggaaaactcatgtggttccgaaactaatgttgcatcatatatctcaattaaatcaagttaactgtatactgagcttgatgttgcatatgcattgtcttgaacgatttgtctattgcggatttgcggtttgccatatatgaaatggttcttgaatgcatcagaagtctctgtcttttttttcctatgcattgttaggcatcgttcgtttaggggtgataggggagattggctctcgtttttcgcgcgcacgcttttcaaattactaaacggtgcgttttttgcaaaaaatttctatgggaaagttgttttaaaaaatcatattaatccatttttaaaatttaaaatagttaatactcaattaatcatgagctaatggctcacctcgttttgcgtatcttcccaatctcctcaatccccttagtctatggacagcgctacgctgcgcgcgtttattgctagtattattaaggggcgcggattggggcgatggcggcgcgggccacgtcacctctttttcctcccgccgtccgatcaggcgtgggcggctgggattgaggcgcgcggtgtaaattttgcgaaaatcctccggtttatgcgtaattcgatttaagtcccttcggaacagtagctatgaggtgctattttacgtataggcccttacaaaatcctcatattccacgataaggagagaaaaaatcgagaataaggactgtgctgtaaacagtgaaaaccgagggactttttcgcaaaatgtcgcccactaaccccaaaccctagccgccgcccgcatcctctcctccctcccgtctcaccctctccctctccctttccttctcccggcgccgccacctccgcctcacgccgtccccgtctcctcgcgccgccgcctcctcctccgccgccaccgtcgtcatgtcctcgtctccgtctccgcctccgcctcgcgccgccgcacgccgccaccgccgcgagaggagctatcggaagcgccgccccggaggaggaggaagagaggcgagagagcggaggacggagagggatccggcaagatgggagtcctggcgttctaccggtggctggcggaccggtacccgcagacggtgtcggacgcggtggaggaggagcccgtggagctcgagcctggcgccttcgtccccgtcgacctccgccgccccaaccccaacggcctcaagttcgacaacctctacctcgacatgaacggcatcatccacccctgcttccaccccgagggccacgcacgatcctattcccccatcccctctgtcttctcgtcttctaatcaacccattctgtgttcgatctcaccatggatttggactccctctcctgcagccggcaccgaccacttacgacgaggtgttcaagtcgattacttttgcatataagtaaatctttctttgtttttaattcactggtttgattctctggtttttttttttttgggatcatgtttaggttcttgttggatttggtactgatctcgttaggtttcttggcccgttttcaggtgcggctctgaaggggaatttcgtcgaacaagatgaatgcgttgccaggaacttcaagcaggcggccaaactgctgggcctggactccaagctggagaagaacttgctcatcccattcagggagatcaaggtgatgattctagcgcagttttcttgagatatggtagtctgttttctttggcttcacttgctcgaagtagttttctgatgaacatgagagagagtgttgaaagttcttgctgcgaccaggttcaatggagtaaaggattttctttttggtttggagtgccaacaagtctgtggttgattgcaggttgaatgcacagttccgaaagatgatgggactttagcatcttacatgttgggtttagggtttaacatgacaatgttaggggacctatgaagggtggaatcagataccgccatgaggtgagaatattgattgattagtgtgttcttcgtaatacaagctggtgcctagctatgattgagtgaaaatttatattagttgaactcagttttctgggttaataatttctctggtagtacaagcattaagattcaatgaaaacatcagatgctgatcagatttcacctttggatgcaatctatttctaattttctacttctgtgttagtaaaacttatataagttatattaccatttacttgcaacaatctatcaatatcagacctgaaattgttcaagcttgtctcttcagttccagctgcacattttttttgtatgggctttactgatgatgaactccggtcacacaattgtaggatggtgaaaaaaagcctatattctgctgttagacaattcataattaggtaagggaatttggtaaagagtacaatttactctgcaagaaacatagatttatgcttgctaatcccaatagatcatcgagccatcactttcttttacagtagtaacttcgctcaagaaaatgtttgccttttaaaggaaaagggataattttgctctaccaccttgccagggccagagttgtgtgcttgtataggttaaagtcagtttcttttgcaggaaaatgctatgcctttactctctttcctaaaaaatcggttttgggttatgctgttacagtttctttccatatttctttttagatgttggggcctgtgtcccaactgcatgaagatttcatgcagaacatttaaacaagtagcaaagcttctgtctggccatttttagacaagttgatacatcaatgatataattctttctcaatattttgtggttcaggaatttgatattttaggccaccgactgggtcttcgacaccacagaggaccgcgcctgccaaggtgattatcgccttgtttaacctctcagcaaggtggattatttttaatcaatccaaacatggcattgcggtgatttctcgtgggatccatgcgccatccagattatgttgcgcagtagtagagtttgcaagaattatttatttgttaacatatacgcgccaaacaattccacccaaaagccttaatctgtgaaaagaggttgggtaatctactcaatacttaacaactaatatgctgcactgtttatgttaatctgtagcttggatgaatctgatgtaacatattctgagtgcttgggtacagtaattatcactatgtactagacaatacattttgaccatgcgaaggtatgtggaaggtgttatcgctttttttttcttataaaagatatgctggttgttagtgttgccattttgattatgactctacgttgctatttgcatatcagttatcagtggaacttttactttttaaccgttgtactgtaagccacttcaatacaggccatcatatacaactagggagcacgttttcttgtgtgctactgacaaataaaatacaaagtacatttcaatgagatttgtttacagcttataagtgatgttctttgttttacaccatttttagtcatcgtacaaaattaggctgaaattgttcttaatgctattcttttcagcacaaaagtccctgttgctactgtgcatgaagatctttcctctgtggctcctcctcctgtccattgccctcggtgttataaagttaccatttgatatttctggtctgggtaatctcctaatgtaaggtgttagtttgttctattattctattctcgattatacaagctgtggctttaaagaaatagcagtagatatgatatggaccattgaggtcacttccataaacttggatctgggtgtgcaacatttgtcagtacaccattgccctcggtgttataaagttaccatttgatatttctttgatctgatcaaacaaatcttaatccttctttcatagcaccagcactgttgcatcttttgcctaaacatattatgttattacgctgtcacactgttgcttgtcctctatgtattgtccctaacaaattttgctgtaaacatgtcctgtcaatagtcatagccatcactaacaagtgagctacgtatctatttatttcagtacaccaaattatgtgctattatgatgttgcactacaacatcacaattgcacatcctctaactctgctttaatgctctaaatatactctgttaacaaggatatccatcgctattattagctgctaatgaatgaattgtatccaggcggcgcgccccaggctctagtactccgaatttttttcatataataattaataacctcaaagttaaataaatagtaaattcgaatcagtaattagaaaaataggaaggacgttgggagcaacaacgtctcaagtggacgctggagagacgacgtcctttaatggacgctgtaggctagcacgtacatctagctgatcccagcctagcccaagaactcatgctgcaaaggcccaagtaaagttcctccaaacaaaaacgggagaaaaaaatggcttgcctcacctgcgcgtgtgcgtcgtctggagagcgctcacccttctccacttctgtcctcattcgcgcggcaagccggcggcggcgcgacgcccctctcctctgcgcccctatccgtttctgtgcatggttccagcctggtccctaggtgaatcctagcttccgattccctctgctactgccgccgcacaggtataatcgaagaccccttcccctgctgctgccgccgccgccgccgccctccaatccctttctgcaaggccttgcatctccggtgcccttgactgctcctgcccctgttgctatttgattccatattgtaatgcagaaatactagattaatattatttataaattagaatgcaacccagtctattgtgtttatcaaatacagctagataagatggccaccaatgatcggttcagtgatttgttatggatgcctcattgtcagcataaagtttccaaaatatgggatagtgtgagttgctagattttttttctacgttattcgtccattgtgtgtaaaacttcaaacagactgtatggtttgactaattgatgaaatgtatttttacagcctactaattgcattaacatacggcttcatcgtgtcggcattccttaccactcattatgtcagacagctttagagaatcttgggttctttcagattgcacggatgaaggaaatcaataatgataaatatttgatatcagcactggtggagcgctggcgacctaaaaccaacacttttcacttaccagtgggtgagatgacaattacgctacaagatgtaagttgcttatggggtttacctatccatggtagaccaattactggccaagctgatggctcatgggttgatatgattgaacggttgcttggaattcctatggaagaacaacacatgaagcagaaaaaaaggaaaaaagaggatgatatgactatggtgagttactcgcggtactccatcagcttaagcaagttgcgtgaccgctttcgtgtaatgccaaagaacgcaacagaacgtgagattaactggtatactcgagcacttgttcttgatattattgggtccatggtttttactgatacatctggagatggtgtacctgcaatgtacctccaatttatgatgaacttaagtgaacaaacagagtacaattggggggctgctgcactttccatgttatatagacagttaagcatagcatctgagaaggagagagctgaaatatctagacctttattgttactgcagttgtggtcttggtcacgtttgccacttggtcgacctgttaaggcaatgaaaatcacgaaagaaagggaagaagaagatgaacaggaggaattggactattgccttgtatttggagcaaagtggtgtctctcacatgaatttcgtgccccacataatgcgggtactatttctattttgattatatcatatgtcccaattatggttttttttcttggtgtacttgtctacttatcctatagtaatgttatgcaggtactgaatattaccgaagtcaaattaatctgattcgagaaggagtaattgtttggcagtaaccttatggatgaaatgcccatccaaatttgtaatgatcgtgcttggtggtttgctagattgcccctaattcatttctggattgtagagttccactacttagatagggtgatgcgccaatttggtcgtcgatagaacattccacctcatcctccatatggcaaggttgagcaccgcaaactatgtaaaatcaaacatggaggaaaaatgcgcagttgggagatagtacatgctaaatatatacaccaatatgacaatttggaagcagtaatggtccaagaggaccaaccttttgatccagctagcttgccagagtatagacgttgattccaacaaaatggtatgtatagtgttttttcgatgctcagtgcttgggaggtcttgaaaacccaatcccatatccccgggacatatttgaatggacaggctacatgcccagtggtccaccactagcacgaattgtaagttattttgtacaatccatagtaaacttttgctgccattttggttcaaactacaatactcttttttttttctaaatgcagagcttacatgtgataaagaatgctgcttgggggatcaaatgtgcaattactaatagctgtaagaagttaggcaagtcaatactcaagacatgcttgggtaatttgagagatctaaacctagagcctaggttgcaaaatatgctcactgatgctgggttgccaatcaatattgaagatattccgtctgatgatgatctctcagctcatgttcaccacccaagtcctccgaaagactctaattctgatatatttgatgaatgggtgtactcaggaagaggttttgaaagatatctccatgcaggtgggatagctgcaacacaagacctaggccaagtgacacggatagatgagtagagctgtaggtttgagattctttcgatgtgtgagttgctaagatagtggtccatgggttgtaatagtgaaaactacagcttgttaacaacgtgcttgttttagataaattattatactactcctaggttgcagctctaaagttcagtttgtgtcgaattctatgtagtgcatgtgagctctaaatttatgttccatgtgggtgccactatatcaactttttttactcactcactcttactattgcaggcaaatatatgtaatatatatgtaagaacagagatctagatagcccatttggatcgataaacaccaaaaccaaacatcagtgtaatttttctccataagtcgtacaaatataacatatgtgatgctgactcagttccatcaacagttattacaatatctgggcacaagatgctataaagcaaataataacaaaaaggggcacatctgatcgacaatgttgcgtccataaggctggaagttcctggtagttcccaatcagttgtatgttcagcgaaatgatgcacctatgaaataagaaacaatcaattcctgtcggtgttgcatagagcctccatgtgcaactattgtccgtgcattcagccacaattttggatttgctactggtactgtacttcacttcagcattcttttctatgtgaaactcacctatggcaattttcaggtgctcttttgaatcaaaagtcttcccccttgctagtggactatcaaattgcttcttatgcccaaagaaactctcatctgcaattgtttcctttagtacataaatatcactaaaagcctttatgggatttttgcctgttgcatgcataaatggaaatgaattgatagaatgaacaacaggctgtggttcaggatgctcatcatctgtgctatggtctgtggatccgtcagtatcatgctcgctgtcgtcatcttgttcaattctgtcctctgcaaggtccgtctcctccccaacataatcatcttctgcaattttttgttgcatctgaaatatgtgctggcattatggattccatattaccttgagaggcaacttgtgctggatggattgttctgtgctgcaaataaacatttgtgtcattcctttcagtttgtctgcttgattctgtaatttgactcaaaactacttgggctggtttacagtccacatataactcaataatatgccaacttgcgcgtgtctgtgtcttttcaaatatcatcttccatcctctttcttcataaatcggaattagttggaaataatgtggcccaggagccccgatatcaaatcgagcttggatactaatgatatagtcatcctcagtgtatccgagtcctctgaaaatttcattcttgacgtcttcaaaagtgctacggttagatgttggaaaagttattttcggaggaatagtatattccggacctgtaattccattttggatactcccatccacatatgctagaacaatgatagtcattttctatcagttactcctgcgagggaaaataataaatcagcaattttagttttacgaaatctattacttagttcataataatttacatcaattagaagctacgttgcagaaaacacttttacatctaataagttagtctaatttaagattaggaacgataagaccaagataaaaacaataatacatgcagagagggtgtgtacaacaacaatagtatattatccagatcagttagggcatgcacctgttgcctcatggtgagctgccctacggctgccactcgcacttgtagacgaacaatgcaaacagagtgttcgtgatttgtcgtgagtagtatctacgacgccacactaagacggcgagaggcggcgtgacctgacgcgacgagagcggcgcagtcgcgcggctcccgactcccagggttcaggacgtcgtgctgattgccgacgattgctgcgtgtgatgctgggccgattcacgtggtggatgctgtcaacgacaacgtccatcagtggacgtagttcctcccagcgtccatttgtggacgttgttgtctgtagcgtccttcctatttttctaattactgattcgaatttactatttatttaactttgaggttattaattattatataaaaaaattcggtctagtactagttaaaagcctgtgtgatgcagcatattttcttagaaagaaaaatacaaatttgagttgtttcagtatatatagtaattttttcttcaaagggattcagtatagtaagttgattacactcataataataaacaaaatataacttttatgattttcacaatatacatgcatggattattcacatgacctctaaactttgcactgttcaaatcattcccactatttatgggtgagcggatggttagcagtagttattagcagttatcaaatgaatgattggccaataattaccagcgcagtaactgttttttcatttcaaacaaatcaatttttataaatcatttcaaacaaatcattccggagagggaataaaaaacaagagaggagatgttttcgtggcctccgcggctccacgcaccccacccggtcagctcagctcgacttgatccatcactgcccgtttcttagaaatctggtactgataatataagtgccagttattaaaaaacatactgatgaagatttgatatgtgcg

SEQ ID NO: 28527 - DNA, 11202 bp, Oryza sativa
agtaactgttttttcatttcaaacaaatcaatttttataaatcatttcaaacaaatcattccggagagggaataaaaaacaagagaggagatgttttcgtggcctccgcggctccacgcaccccacccggtcagctcagctcgacttgatccatcactgcccgtttcttagaaatctggtactgataatataagtgccagtttttaaaaaacatactgatgaagatttgatatgtgccgatttttttataagaaccggtaatatcggtttttgttacgaaccgataaaatatgtggttatagttatcggtttttaaattaatcctgtcaaaaggattggtttgcacggaaaacctctcatagatgccagtttaaacttaaccgacacctataagggcgttatggatgtgatgttctataccgtggacaaaagcatatggttatacacatatttatatttaggattttatatcagctctttgcatcgagatgtccttaagagaaatactaccgctacatgcatgatgctatagggtttggaacaatagccaaccagctcgcatggccagggattgaaatttcggtttgaaatttctaaaatcttagagcccccgcaagcaactatctcatccaaatattttgcacttatccaaatttgtgtgagtttggtcaaaatttattcaaattcagttaaaactataaataattttatgaaaaagtaccatgcgtgtaaatccccgctaataatcctaccgattgagggcacaattgttggtattggttacaatcacagataaatctgcaaacgtacgaataccgttgtagcacttcaccttagagtattttaaatatatcaaatcacaaaaaacgtgtatttgaaatctaggaaacaggttcatccaaggagctgaggatatatagaggggatttttatgggttaagattctgaaattagttaaggtaaaattttatctcttgcttcgggtaccggttttcccttggtctgccaagcgaatcaggtatacaactctatgatgtacccaaatgtggaggattacaaaagacagagaaatggttgtcaccacctaccgtctattctataactcgtggtgcacgcaacaaacaaaagtaaaatttaacttagacaccacgtctacattatcgattactactctagcctcgcacaaaaacatcattctttatttgtagccttagtattagtactagagaattaaatataaatattaagggatgaaccccaaatgataaaaatatatcttacttaaacaagaaaattaaatacccaaaaaatcttgaatactaaattttataaaagaaacatctgccgaggtagaagagtggagacactaccaacaactctggcacacctctagaagtccccgtctccccactctctctccttattttctaacactactagagagtagtcttgaatgaaattgagagttttccacttgttgagtgtcttcaaatgaaatgataaactccttttataagcatcctatgatggtagttaagttgttttaacacccctaaccgctattgggaagcaatgatgaagcgccacgtggaagctggtggcttggggacacatgggtggttcgcctgaatcactcccatcttctctggccaccgactttttctgtgaagctaacaggtgggattttatgatggtgcacggtggattggcatccataatgttggtttgctctgatttttggaccctccaattcgtggactcgcatttgattggccggagttgtatttcgttgcatggcgagtgtattttcatccaaaatctcttgcttacaaatatttcattatactcgtggaaaatggttagtaataaaccctaccactacgttcggtgtttcattttgtttagttttatgcagaagttgagggttagattcagcatttaaggatcgtcaacaacagtatttctttgttttttttgtctggattaatccactaattggtgccaaacaggcccaatacatatgcttgtaggagtattattcacgccagattattgaacaaaaacaagcctggcaaattcatcactccagatggatggaaaaacaacttgaatatatattatttagcttagcataacgtaattcaaatttcatcacagtgttttcattatcattgtgtaggaagctgactactgcaaaaaaaaaaagtccattggtgcccgttgggaaccggccttaggtgctagatttcccccgatggtggcatagatgtggagaatcaaaagtgtcgatttaggaaccggcatctttgaggtttcagaattgaaaaaggaggtcgcctcgaacgcatcgagccaatgctctcagaaacaacaattccataggtgaagaaatcaagaacatctacaatctagaacaaatcaagaacatctaccaggaaaaaatcaagagttcggtggtggaggcagggctagctgccagggtgggtggagcaactgttgccattgccactgccgccacgccgaggaaggggagtagccaccgtcgccaggggagcagcaggcgccacgttggggaggagggagcagcttccgatgccatcatgccgggaaggagggagctacccaccactagatgcgcgcgccagagcggccgccgccgccgtatccgcacgcgctagccaccgtcgccatatcgaggtggagagatgaagcgagaaagcgagagagaaacagagagcgagagcgagaaagacagagggggagggagtgcataaggtgggggtatggagcgacggaggtagtcggtaggattgactggctcaacttaatcggctcagtacataggtgccggtttttaattaaccaacctatagtataagggctagttttaatttagaaccaacacctatagactatagttgcttaaatgtattggttttttatttaaaacctatggaggtgagaaaaagactgtaggtgccggttttagcattttcagcacctatagtgccgatctctatgtgcctttttatagtagtggctatcgccagccacatcattatcatatatatctatctataaaataaaaaaaaaatatctctggccaaaatgttcagagttggaaataaactacatgaatggtaaaccaaattgtaactgcttgcagggtattagtttctggtaaaaccggtccttgtcgtttccgcaaacaaacttacggtcgcccttggggtgcaaaatgtcaaacccggccggacaaaatgcgcagcttctcttgtactggtcaagtggttcttctgcatgttaaagattaaaataattaataattttgaacgcacatatcagaatgaatattatgcatggatgaatggatgaagcatcaaataatagtcgagaccagtctagttaagaagaaatcaaagaaataaattaaagcaagttttcttttcaaacgaaaaggtgcagtgttactatcgatatagatggaaaaaatacaagatatattaaagctctataagactttaatcaggaaaaaagaaaagaaaaacacaaccacacactgacaaactaaagcaagttatatatctatgcttaccaatgatggtgcatgtttcaacaatggcaactggagcagggagtggatctggcagcagctgctcccagctgacaaatccgcttatagttatcaatggcttgtagtgcagttcagcgaagaagcgcttgatcttgttgctgctgcggctgcgagcccagaagttgatgtggaaccagtgctgccccttgaacaccacccttgcttgcatcaggggtttcactacatcgaactcaccaccctacaccggccgtgccaatcacgaatcatgcaacggcaaggaatcagtaattgggaaacataaggtgaattccatatttggccattaaggctgtgtttagttcgtgggctaaatttttttttaagtatacggacacacatttaaagtattaaacgtagactaataacaaaacaaattacagattccgcctgtaaactgcgagacgaatttattaagcctaattaatccgtcattagcaaatatttactgtagcaccacattgtcaaatcatggcgtaattatgctcaaaagattcgtctcgcgatttacatgcaaactgtgcaattgattttttttcgtccacatttactgctccatgcatatgtccaaacatttgacgtgacgaaaaagttaaaagtttgaagaaaaaagtttgaatttaaacaaggcctaactctgctcgaagtccgttttcaacgtaaactatatgcaaaaccggtgattttttgtcaactttggaaactggacatgacatcctaaaccaggttttatgatagttttgcttgatattatagtgatttttcagtagcatgacctttgattatgtaagtttcatggttgtgaacctaattgagtgatacatatttgcatcaacaacataggtatatataataattaataagagtatgagcaaggaaagccatcttcattttaggcaaaaccactaacaaatttgccctaaggtgttggttagctagtttaattttcaaagtttacatagaaaaataaccggtttgtagttcaaggtgaaaaatgaactttgagcaaaagtctaagaataaactttactcatttaattactactcaaattaaatgaatcgctcaaatgcacataccgggtgtctggcattgtaatggcggagagcattttggacgtgagggatcatccaagtgtcacgctctctgcatccaatacaattagagtagtttgattttgtaagttagttatatattcaacttgcgagatatacataatagccagaaaaatatacataatatacagatataattgttctgatctatcgaaaataaccattattttcagtaaatcatggtctccaaaatataatttgtaccacatctcattttatattgcaatagattagtaaaaaccttattaattatgatattataaaattattttgagacaaatctataagtgattttcatgtgtccaatattcataaaaatatattaatctctaacttttacactacaatatgttgaaaacattcgccaccaaaccaagaataatatgtccaaaatggcatgttttattttttacgagagcattattttggtgtgagtctcatcctcactaacagtaactacgtgtcgtaggaggcggtggcgtgcgaggcggacgatatggtctgagatagtacttttgaggatggagcgagtactatttatttcatattcaacttattactcttgtattttcaggcgtagagaaactaactgaatcgtaatgatggttaggaagaaacctatacgcgaatctaaccgccaaaataaaataaaataaccataaaaatgcacgaaattaatcctacacgcactgcaatcagcagcaaatctactggctagaatcactctcctttttttcaaaaaaaaaaatcctaatcgatcgggaggggaataggatttatacgtacttctcttggcggcgaatcttggtggaagacggcggaggagtgttgttgtatcgcattcgcctccacctccggtcgcggtcgtgcaggtgggtctccaggcggagctgctcgccgcggggcagctgcggcagaagctcctcgaacgccggcgacgtccatccactctcagatcccatcacccaatcctccatatatcactccaatttggtctcctctttctctctccctctccacgcacttcgattttcgtacgtggctttcccttttttatatagagaggagagcccaactgagccagacggttcggacccgtgtcaaaaacggagacgaataacgaccggcctcatgatccgaattatccgattcggatacatgctccgtatccgatggagcagttgctcatctgcagcggccgaataaaaaagacctatcgcggtccaccagatactcccgtaaacccaaaagctagatattactcaccctagttagggtcggagctataacgaaacagagaatggtgccacttgcttaatttactctactttagatcgagtttaagctgatacggttgcctaagtttgtattgaggggtgcatacatggtgaaaatagaagaggtatagctaaaaaaaatttcttgaccgggttactgggcacccccttaatatatactagctccgcccctgaccctagtaccggacaaattactctcttcaacccaattcaaagcggttttatccaatgtggcatacacgtggcaacccagtcagcattttcctttaaaataattggtgggacccatgtgacatacctcctcttcacctcttcctaatctctctcaggcgcaggtgtgtacggcggtgtgcggggtggggtgggtagtgcgcggcgacgcgagacgaggacggggaatcggtaagtgggctccgcgcagggaagggaaaggaggcggccgccgtagcaacagctagagagcgagctctgcaccggcgtgtccgatttcttcagcgccggcgtgtccaagatccgcgccgccgccaccaccagagctggccgagtgctacccggcatgtaatacaccgcgtcctcatcagacgacccttgcgtcagcgcaaacgcccctcaccgcagcggtgggagcggaccttgcggtacgggcagaccaccgttgagcagcctaccacgtcagtttgcatccctgctattgcgccagctctagcatgcgcgtggcctggcggcggcagggtggcgcgccagccggctcgtgaggaggaacgcgaccacaatggcgagtagcgcgaggaccgcggcgacggcaacggaggcgaccacgatggcagccttgggcatgccaccgcttcctccacacgacgcctgcgggtccggcctgctacgcgacgacaacacgtcagcggcgatcgtgttcggcagcggcgcggggagaagccttgggctgctgttgtccacgagggtggcggtggcgggtgttggggggtcggaggagaagtccgaggacggtgacggtgtccactcgatggggaagagcggctcatgaagcacctggcgcacgtcgtcagcgccgacggtagccactaccgagaggaagaggaggagagtgagtgagggcgacattgatgatgaggagagagagaatgtgtgtgatcttggattgtagagagagaaatataggtgtgtcccaccaatttttttaaaagaaatgctgacaggattgccatgcgtatgccacataggacaaaaccgctctagattaggagaggggggtaattcgtccagtattgaaagttcagggtgagtaatctctggttttcgggttcaagggggtaattcggtcgaccgcgatagttcggggggtaattcgtactttttccttttaaaaaagaaagtattatgcaacccctcctgctactgaggtagtccaaaagggattgcatagttctacaaaagtggagacacaagatatagggggaggcactcttttcattgattaagcacaagtgtacaaagtgagcagcctcctctttatatagccatattgcatatatggaatgtttaggtgtgggcccaattagtgtatatgggttgggccttcatggacccaaccccataggtttcctaacactcccccttggcactcaccgcgtgatgtctatgcctcatcaaaacttcagaaaaatccagtgggaaaaatttagagaaagagtacatagcatacgcttgcaatgtcacacgaatcgcctcgttaaaaaccttgataagaaactgctgggaaaacttatctaagagaaaagagtacaattcacctaattcttcgttcaatctttctagattgattttgggtacttgattttctatatcaagaatctagaatgagtcagcgaaattctcccccttaattttacatttttctaagtctcattatttcgattcctcggacacacctattcaaaagaagatgtcaataatgagttagtaaaaaaatatgcaagatttccacataacttagttggttgcttctatacaattcatgtatatagaaaagcttggagttcatgtgattaatgagctttgcttcgcaagttattcatttgcatatgcgcgacatatgctgctttaatttcatatatgatgggggttgagatagttttcaaaccactattgttgaagcaggacaaccatctctcaaaaccatgtcgaggctctgaatagttcaaccatacttagttcggtttagttcaattagcgaagtattcgtgtgctgctatgacactcttgtgtttgtgtttgggaattccgtcccattttggcgataattgacttcttcaaaaaccatgcaccttgaacattttctaagtgtggttggactgatgtactagacttccatctatcgcatgcctttagctgtaagcataagcatgatctggattcgtctgaatatttcaaatcaaactcaaattcaaaacaaacaagtttgtttcttcaattctttctacattaccctattcatcctatgttagttcaagacttagtacttcttcatgtactgttatgcaagtgttcgattcaagttcctaaaatgtattaattgattatatcttcaatgcttatcaacattcaggttgagttcttcttttcaacttctagttcattaattccattcaactcctggttgactgccaatgagttttgttgtctaaaaagacattgcccataataggtctcattgccaacttctattggttatatgagactctatgcgagtatccatggatatacaaggagatgcatttttcatatgcttcttctttctgcttaatgctttttgatgtgggcatgtactagcgttagtgtgcactccaactactggttttcttccttgatgggaagatgtggcacgcctgttctgaggtttcgtagcatttgccaggtgtcaacttgcctccacgatctacactccactactgcactaccacagcgagagcaatgaacgagtggaaggccactaggacctatagcaaaccgagcagttgcaccaacgaatgggattcaatgtcacgcccagaaattcccgaatagaattccaagcagaatgtgcatcaaaacccccgtccaggaccggccggggtacacaaacgacaaagttgacatacagatccacgtcttacaaacattataaaaggtcttacataaatgcagcggaaaattaaaagataaatggagctaagccttgacttgaactgcagcgggaacaacactccacaggcatcctcgacggctcggacgaagcctactcctcggagaagccaccatctgacacctactcaaactctgggttttggggaaaaatagagcaagactgagtacaaccaccgtactcagcaaatcatatcggaacaagaggtatgatgcaggatattaccaaaggatagctagagaggttcttttgcataaagcgagcatttataaacagtagttgaaagcagtaaaacagatgtaataattaatcaatattaaccatccactgtccaacgctacaccacgttgcaacaggcccaaccatccacctgaactaatcaattccataagactaagctagggtgagactaatcacggtgaatttggttgaccgcccataaccgcgggcacggctattcgaatagttttactctgatcagaggtgtacaactgtacccacaagacacagccccacgacacgttcccgtgtgccaacatgccaccatgacatatcagatagaggccgtgacagaacttttcgcataaccccctctaaccaagcacaccacacctcaggtttcacccccactcctcgcaaggcaacgggcagtcccctctcgtgcctaggtgaatccggaagccgcataggccgtcgcagggcccatccaaactccatcactcccacccttgcctggatgcgtcagctagaggaaagctacactacacgcccagccgttgcccacgctggcttgtggcaagtacgaggaattcttccagggtttcccgcgaaccggtccttaagtgccatgggcgcgaccatcaaaaccatgcacccacatcccatcatatggtatattttaattgactaacaccagaacagtagctttaatccaacaccaacactagaacctgatgtctaagcattaatgtgatttcccccattgtgtgctagttgaactaagcaaggctaagcaatccctagtccaatccctagtcatgttatatcccaagctaacaaaggagcatggtaccaaaaatagcatggctgtaacagtaggtaaacatcccatagtaacattataaaacaatgcagtatttaagggaaaacggtagagcatttgcaatataggatcaatatgttcaagtgacaagtatgacttgccttgctctgctgctggaggaacctcggcgactatttcaaagtacaccggagcgtcgggagagccggaatctaagcgacatacaaagcaaacaatacaaacatgctataagactactgaaacagagaacaaaaccatttttaatggattctatgcatttttcttgatttactgagacttgaatgggcttaaacggagctcggatgaattagatatgaattttagaagattcactgtgtttttactctaaacagaaaaatccttaattgatttattgcgcaataattaaaatcccgagagagagagggcggcgccgacatgcgggccccacatggcagtgactcgagggggcggtccatggtggaccaggtccacggaccggggaaggagcggcgaaccacgtggtgcacacgtggcgccgacgcggcgcacacgtggctgccacgtggcagccacgcgggtggtggggttggacgacggtgaaagtgcgtggcctgcgcgcacgggcggctcaagccggcccggcggccatggcgcacggcggcgtggctcgacgcagcggcagcacaagtcggtgaccggcggcgaccggccggcggcgaagggcggcggcatcgcggcgacgcggacggcgacagcgtcggctaagcggctcggcggacacgcggcaactaagcggctcgggagagagggaggaaggggaggaggggcctcaccgtcgacgattgacgacggcgagcgacggagggcgatggcgaca

SEQ ID NO: 28528 - DNA, 40573 bp, Oryza sativa
  unsure (1)..(40573): unsure at all n locations
cgtggggtggtgcaggagagagggcgtggccggcgggattcaaaattgaatcccggccgtttcagagtgggcgcgggcgggagagagagagggagtgggcgcggggtcgcggggaaagcgggcgcgggtggagacgtgggcaacgtggcccgtaaagcgtgggcgcgagggggcggaagaggttgcgggatgcgcggcgtcgtctggaggttgggggaggactcaacaggtgggccccacctgtcgacaaccccgggagagaggagggggctcgggcggccggctaggccgtggccttcggccggcccagcggggagggggaggaggaagagaatgggccggcggcccattcgaaaaagaaaaaaggggaaaaaggaaaagaaaaaggaggaaatgaattttcttgagattaaatattgcttgtgcttatttttaattggtttaaattatttctagagctctaaaaattccactaaaaatcttgttaggatatttcgacatgtagaactcaagaaaaattccacatgccaattccgattattatttgcattaatttattagggtttctctcttgcttttacaccgatattttctctaggtgatttataaattcaatttaggcttgagaaagaacttcagggtgtgacattcagccatgcgggtgggaggaggaaatgaaagggtgactacgacggcaacgacaacgcctccataactccagccacacgaatctacaatggtgcctaagcaaagcggcagcccttgtcaacgagaactacgacgcggcgaggatgaatggctacaccagctcgactttgttcaaccaaccgtatgggtattttggtcagatcagctatgaaaaaaaaggagaaaatcccattaaatggtaaatatggcatggtagcgggttgacaacgctacggagtctctttttaacaaaacgatttggtggagtagcattctagcgaaacccttttttaggagtggcgcaatatctaatttctcgttactgcatgtaattgtataggttccatgttttgtttattcaaggaattacaagaaatggagtatcagcttatgaatagctaaaaaatgtcaatgtgcatgcagcaccttagcgttttatatttatattggcaaaaatagtgcaccttagcgttttatatttatattggcaaaaatagataatagacaagaaagcttaaatacacaacatgcatggagagccaactgaaagtcaaaactaaaaacggagagccaactgaaagtcagaactaaaaatttaacaaatctaaaggttgttcggttggctgccgaaggtgcaacgctttattttgccacaagacatacacaagtgtggcaacatgtggctagaaactttagggcgaaaccaaaccaagttgaagtgtggcaaactttgtactactatttggtaaggtgaagtgtgacaaatttagtaggctccatagaggttcaaaaatcaactgaaacacaacttttttatcatacaaactacttatgtatccgcctaacaaccactaataggatacactggcaaaggacttttttatcatacaaactacttatttatctgcctaacaaccactaataggatacactggcaaaggattaagttgatccagatccagagggagaggatctaccctcagtacacacactttctccagctcctcaaatccgatccacctacttggcccagtctgcgcatggttatcccatataagaatctgtagctcccctccacgatgtctgtaaccataacagacaataacgtggttaccatttgtctcactgatcaaatcacagatatcattgtccgtggcccttcccgcaacaagagcgtcaatcagccagacgtctgcagcagttctcaactcagggggtacccacctatagactagttcatcattaactgaggcatcaataaagtggtataggagggacacccgaatgattccaatgtaagggccacccgtgcgcaggaggtgcacagcgcgctctcgtgtgagactacctttttggcggtacatccgccacgatttgagcgggaggagaaagggggctggtggtggagcattggttgtgcgaataccacccatgccctttatctttttcagtaaaagaaccattttctttgattcgactccctcctctgggtgcaaaatatcatcccgtatgcaggccctgcggagcttgcgaggagctgcagcccggcacaggaaggtaccaggaccgtgcagccgctcccactccaaacgatgtagcgcttcaatgcatacagcacatgctaaaatggtgcaggtatctgcaggtaaaacacaaacacaaggcatggttaattaatctcttggcctactttacgaagtgagaaatcaattctggttagtactcacttggtattgtttgtttcatgggattacccattatggaccaccaactgaagtccgcggagaagttacgaaccacagagctcactacagtataggtgctttcttgagcatcagcactaagatccttgtgtccctcacatcttgcaccaatctgacaaaaaaagagtgaaattagtgtatgcaactagaatccatagttaaacttactattttatagtatccataaaagagatttagtcgtacaagacctcgtgtatatcatgccttttttttactagggatgtaccagaaaaatgaacatatccactggttgcgttctgaaatacacatccaaatattcacaattttttaaatcatacactttcatttttataatgagtcaatcagtcaaacctggtagtgtacataaggttgcaactgaagaaatactaagaccaagcattccagaaaacaagaaaaaaaaatgtaacagaggctgaatctttcaacctaacagtgatctaagtgatttactagtggccaattaattccacattgccaaattccatgtacacatttatattaacttcatctgtaacaccatttaacaagactaaaagctcaatcatttgaatgtaaaatttcttatgttgtgatataaacaaataatctcccatgcttttacagttcaacgaaaatgcatcacagtaaacggcaaaccggcttagcgcaatcaagagcaactaaatctcaaatgtttcaacaaagcacaagatatagttgttgcatgtatcaaagtttcgtagcacgtgtttaatacagtcaaaacaaaaggccgatttccacccccaaacatttttcttaagtaatttcgactctactctggatacctaatcatttaaaccaagaaaatctctggattacagcaaatccacaggattgatagaaatgaatgacaccaaaggttccagttccaaattacaacaaaccacgttgacacaagaaccgcatgtaagcaacgtaataatcccaacatttcacccaaacgctaggatcccaaatgccacattcccaacaaaaaaattgacacaggaatgcccagcgtaaactagaaaattgagtaaacttcagcttactttttctggaaatattccaggtgtgcacgaaatctcaagaatagatggcttcaggacttcttgatttcttatcacaaaatatgacagcaataatagcatgaccatgagcatgtacatgtgtatccccaaattacacaggcagccgaattacactaaatgagatatggtttcacctcaacaaacagaaatcaagaaatccaatatcctaatttaacattgcagcaaacatgaaacgcacatgaatcaagaattaaacatatcatcattagacccccaccccacccaagaaaagcaagaagtgaaaaattacctctagaaggtgtgaattgctgagaagagcaaatcttggccactcgcggacttctctctcgtcctgatccaccaccgccgcagcagaggcggaggtcgatgcctcggtgccgcgccctcctgctcctggtcctagctcctcaccgctcagcctctcgaagggcggcgaggacgagctggcggcaccctcgcttgccgcgcacaccttcctctttcccttccggtcgaccaccgggaaggcagcagaggccaatccctcggcgccgcggcctccgcctccggggtggtcgcgggccagcttctcgccgaggcgccgcggcgacgaggaggcatggccgccgccctgagttgccgtggaggtcttctttccctcccggtcacccaccgccaccggggaggcagaggccgaaccctcggcaccgcggccgctgccccgacctccgggctgctcacgggcagactcttggcgacgcgcggtggcggcggcggtcgcgagggcgcgttggcggcggcggcggcgctgggcttatggtgggccgcctcgtagtccccgcgcccaagaacccgttcggtggtgtgcccgtcccggtcttttgctgaaccgggcgccattgaggcgggaagattgaaagaaacggaaagcgggggctaggtcaaaattcttgagaagttgagggagtgaaggagaaaatgcgttcagaggcaagggtatcgatgtgaattatgaatttataggatgtagtagtactaaagagactactaatcaggttattgagtaacgagtaaaataataataataataatagaaaaatctgatcatattaaaaaagtgaggaaaaattagttttgcacaagccacgttatgaaatatagtaccattttctaaaaacaattccatccatattaccccgaatatttttcagcgaaaccgttttgaaaccgttttaaggccacggtgcaccataatgatatgcattttcaccttgtcgtgctataccaatgccaaatgagagtatgagaatgttcgtttttgttccttttagaaaatggaattgtgactcaagcaaatctttttggcatataaggaccaaaattgcttgtttgtccatgtttttcatgtatgcaatttatatttgattaatcatcaagttgagtcatatttagactaaattatacttccaactttggtcatataactactgaatattttgcagtggatttcggtgatgacagaaatttcaaaaaagaaagaccgagaccaaattgatcagtctcaccaaatgcccacccctactcctacatatctgaactaaattagcgtgacaattgatcgggtcgagcagcagatatgtggaactgctttgtataacaatttgtactaaacgtgcatttaccagaaatgatatgaccagatattctgcaaccttgtacggagagtggcacgtatgtctcactacaggaatatatgctgttacacgacgaatcaagaaataaagaaacctatggaacccagtaataatggtcgaaagaattgcatgccctgccctttactcctataataactgaactgaaatggctacccagtagtctcctgatggacaacttctggaaaccgtaacatcagctccaccaatcttattgtgctacagcaaagttacttttttttaccagtgtaagtcacaactgaacacagaagtccgaataccagcaattgcaattttaacgtaaaggaggcacgaggataggtcacaagaaaggcaaaggataaaagttacaagcgttgtatgatactatgatcactattttatcttccatccgacaacataacactcacgatccacagcatgcagatttctgcaaagttgtggcctcagcatcaccctctggtttgttgatcttgatcgtgcgatcctgaaaatcgagcatgttaaataaccttcaagtatcatgttgctaattttgaagggaagagaagatggagatttatacctcagtcttggaatcagtctccgcaagtctttgcttaatatcccttgctattgaaaagaaaacctgctcgacattcaggtttgtctttgcactctgtagccaacaaacaaattatgcacgtgtaattatatgagaaaccgtgcattgcacaactggttacatattattaagacagaagcgcagatattaaaacagattaacaactaaccgtttcaaagaacttgatgccatattcatcagcaagtgcttgcccctttgaagttggtacggcctgtgttaatataatacaaccaattaaaaattaagccaaaaggtgtccaaaataataatttgaagactggagtaatccccaagataacgctatataccatagcaccagaaagatagctttcatacattgagaatggaacaacaaaataccaaacatttaattgcttttattttttgcattgagctttttcacgtcttgattttaattgctattctgcattttagttctataaattattgctactcatcatatatatcattgtgttaaaacagcattatatgcttgtatggaacacatactttgatagtctgtactttcttgcaaaggttatatgagaaatagttactgagcagaacatacccttttgctttcatccatgtcagctttgttgcctaccaaaatcttgttcacattatcggaagcatgttgctctatgttcctaatccagtttcttatatctgtcaataacaccaccaagatcagaagtggaaggtgaagtgccataacagaagattagcagaagtgaaagagtcggtactattaaatgatgactcgtcggtgacatcataaacaagcaaaatacccattgctcccctgtagtaggctgcattgcacaaagtattcagatgaacagcagtatatccatgtaattgttcaaaacaaacttgacttcaactgaaaataaacaaccataccagttgtaatagttcggaaacgttcttgaccagctgtatcccagatttgaagtttaatccgtttaccatccagttcgattgttcttattttgaaatcaatcctttttcaagaattaaaaataaaaaagtttttagatgcactgcaataacttgtacaacaataatccagtcaaaagcttcttttctaacttgtacagcacttacccgatggtggtaataaaactggtggtgaaggaaccatcagagaaccgtaggaggagacaacttttcccaacacctatacaaggatttttttttaaaaaaaaaagaaagtcaggtgcattatcagacatatgattagtcctacaggttatagtatgtttacaacaagcacgatagcgagtccatgaaaaacaacttgatgaagataaagtggaaatgtaaaacggataccaatatacgatcaagtcatacattcaacaaacatatatcatttcacattttccactagaacatctacacaacacttaagctagccagcttggcttcttctcaataattaaaatttagtaaccgtctaaatacaaagatagatctggttttaatgataatatggatatcatatcatatcataccctgtggtaagcaaactgttattttaggcaaagaagatcaaaagaagtgcaaatcaaaaaaaaaatattgcacttcttttttgttacaaacgaccatagaattgttactgactgaaaaagcagcacccaaaaagtacaaaataaattatcaaggacaatggaactagagagaagaagtaagcacttctgtgtttctttttattggcttcccagttcccagaaaactcaattaagtaacattcattgagaaaccagtatatgtatttttcccataattttaatgatggtgtagccacaacgtatggcatatgctactgaatgagatcagcattttacttcatacactaaatgcgcttgtagtttgactaattgttggtcaaaacctacaaattttgactttctggaattaaaatgtccccgataaaaatcacagaaggagtagctagatgatatatcagtgtgacattaactagctaagtcaagacagaagacatactactaagtagtttgagatccgtgttgcagaactgtattaaggaagagagttgaaaaatgcttatcagctcacaagtcgacatacaagggatcatgagtttctttactcactttgattcaactgagtagacgtgacagagctattaatgcattcagagtttgcttaatcaaggataaggaacgaaaggaagcttaaacattcacaatgttttcacatcgcaagttcgcaacaaacaataacagtcatagaaaggtttatacataaattttgagtagtcttactgcagtgatgtctattggtaagataaccgcatgtatattgtgcattttcatgagcaattgaacattgataataaaaaatttcaaagtaacaaacagaaaaggaaaaaaaaaaagctcttgtacagtcaacattcacaattcctgtgcttgaagcaactttgggtcttcagcatagctcctgagtggaacatatgcaacttgtcggtgcatgcacgaaatcactccaggctcatcttgcaccaaaacgtcgaaaatgtacggtaatccgattcaccgaatcgggtagctgttccacgcgagcttgagcgcaaagcaccatgtcggctgatcaaaccggcctcagcgatccaccccgacccagatccccccacccccaaactcacctcacaccaacaatcccaccgaatcggaactcaaattcgcaggtgaaacccaaccagatctcgcgcgcgctgcgcgggatcgatcgccgagcgcgcggcgaggggagagcgagcgggatggcgcagattcagctacgtaccgctgtcgccgatgaggagcagcttgatgaggtaatcgtagtcggcccgagccctcgccggcggcgccgccatcgattcccccaatccccacactagagcgtcccctccccctcaacggatcgaactgggctggcggactggcgcgcgggaggcgaaccggatcgagcgatctcgctacaggcgaaggcggcggcggcggcggcgggttccggcctctcctcctccggtcgccgagccctcgacgctggctgcggcggcgaggggacacggacgcggcgagatcggagggagggggagagagagagagagaaggggaaggaaggaaggaaggagggtggtggtggtggaaccggtccaccgtggacttttaaatcggatggattttcacttatacacgcggacgcgggtgagaaatgaaatctctctccagtttgttggtttgatggagcatggatttatttatacgaggtttgaaatttttgaatttttttagaaataatactatttaatagaaaattgtaaaaatatagatcgaccgactaaaaccatattgttcgataagtacctgtcaaactacggttgttcgtaggtgttacgtgctaaaaaataaaatttaaaagctcatggtgcagtgcacagtctgccattgcagttgggtgttgggtgggaggacctattgaacaaccttgcctcctgcatggatgttctcttttcatatatttttattttttaaaaaatacactaacaaccatatcgaacaaactgatgtggtacattcagtactaatcgtattaaaattgttcgatatgtactctgctgaactttggttgttcaacagggtaataaactcgtgattttagttgagagacctctattttcacgattctttattaaaataatattatttctaaaaaaatccaaaagttttgaactgctgaatcggggatttgcacacggtttgaaattccggactataccctatgaaatcatcaatatgattatatgaatatgaaaaatatatggagtggaaagatgttttcttcaagtgaaatttatatgaaaattcttataataccatatccgcgagtagttcaaatgcccaaacatgaagaagcactagaggtttaattcgtagtgctcgtaaatattatgcacggctcccattacccgtaaatattatgcacggatgaaatcaataggaattagttaggtcaaagattttcatctcttctagaatgcgctagaaggtgcgaaacccagtgggttagatgggttagatcccttgtgtaggtgatgtatccgtcaatagcaagacatccgtaactgttgtaggttcgttaatattaagatatactccctccattccttaatatagggcgcaactgcttcaaaccctaataccaaggaggcttaactgttttctcgaggtgacgacgtatgcaacgcttcgatctgcccgtgtgcagcatgcatgcagctcttcgcatctgcaagagataagcaacccaagaaacgaagcgctaactccacgcattgaaagcgcaccaagtttcatgcttttgttttaatgctgcttgctgcatgtgcatgcacgccctatattctggtgcacttcaaaaaccagttacgtcctatattatggaacggagggagtattgtttagtatgtgctcatgtatcgtgtatgtgcaggtaccgtgtttcaaaaagaaagaatgggctaggaggtatttttataaggtgcttccatggagcaaagtttctatttatttttataaggtatcttgtgatttttttttaaaaaaagggttttactattttagttatgacgaatatttgggctcctattttttttatttttctttgttaggatctttcatcgagattcgtgttcatgtagatctaacttgtagttacactcaatcatagcgcacttagggtatccacaatgtagtgtaaaagtagtccataagcaatagaatattccattcagccacctattaccattgtgcaactagtccatatagaaaaaatagcaaaagatacccatatggaataaattatattatctatctctactcctctctcttctcctaatgataccttgtatctagatattgccatagggataaactatttatgtggtcccatctatatggatcactgtcatatatattggtgatgcccttatacttggttatggagcacttatacttcataacagagcacctaaaaattagattttataactttgtttatctagatttacaatttttgacatgattattctttttttatttcattcaaaacgggatatatgtattggttgaaatttctacaatatctaaggcagtgtttggcaaatgggaaagggaaatgatttcccacccatctttaaatcctaaccatttattctccatgatccatttaatcctaactcttcattaatttcccaatcccaatcccaccccccatttcccattatccaaacacaccctaaaactccaaatctattgaaagataaatagattgtcctcaaactttgtgaattacgaccaacaaggcaacaattagatttcaaagtgttttcatatatttatacaaccatcacaaatatgttttaagagaaataatcggtcaaagcttacgaagaagacagttttaagttaaaataagtttgataaaaaatcagcagatagtgatttacacaaggaacagaaatgatatgcaggagtaatagggagaagtcatctggcacaacaatttagagaaaagaagggtcgttttggctaatggctgctgcaatacaaagaggcaaagcgagaagattaaaaaaacaatcgggcaggccacaaaaatttgaaaaaaattagcataaactttccatttgcctacaattggcaatcaaacaaaaaagaagtgctcaactagacatccggtaaattatccgcaaaactgttacatcggtagaatctcacagctaaccaagatcatagttcaacagttgtcgagaaatagaaacttcctatgaaacttctgaagagattacattttctgtatcatgtcagagatatacttcacaatccaagggtgatgcaagaaaaaactttgcaatctatcagtcgtctctctttggcttacgatatgtttcctcaatatgcttggctaggaacatgtacgtgttgaatagcttcttgacatttgggacgtcataattctgagctacatagacaccacatcccattccaaacattaatgtgaagctggtcctgaagaaacccattgcaacaaaacctggcaagtagcaacaagcatgaattggtactatcatccaagatacagatttaatgcacccaacaagcatgaattgattgtgagatcagaataaaaactgatagcattattatatttgttgccagaatatttttctccaaatcatattaatgcaagttgtgtaagctaaacaaactcatggcataataacatatttaagcataataaaattaagtaacaccagtttagcatcaagaagacctgaaacaattccaacaggcgataagtttcttagcatctacagaaacatatttatacaatctgtgaaagctaaaaacacaccacagtataccccatccaagcataagagtagcactgatttagcttttcaactagacttgaaacattccctacaggcactaaattcactagtattgtggactgtggagtaatgctgatattgtatcaattatgcttcatgggcaagccaagatcaggcatgcttcatgggcatcccagctgggcagatgcaatgggcacaatctgtcaggcacactgttaatcatacccagaaaaaattgagctcagtttctctaaataattcataacgacctgaatcccaacagggtttaggaaaccatttacaacatatagtacatacataccgaatggttatagtgtaattcaagtaaatcgtgacaagattctgggcgctggaatacaaataataaatcatgtttttggcatttgaacttgcaaatatgaaatggttctggaagttcttgtcaattaacataagattctgggctcagtcctacagaattttttatgaaggaaaaataaaatccttttcctagttaaggcttacagcacagggaagcacatttggattgttgggcctatagtagtatggaacacaaggaattcattatggtttcttttatcaggaaattcatacatatttcataggaaataacttattttatgcagaaataggtaaaaagaaaattaagtctccagggttcaccgaaataaccatatcagtcagtcccaggacataataaaaaaaatggaagcataggcctcaatgctataagaaaccagcacaccgccactccaccagcattgagaggcaaagttgggaatcccacagccaaatcgggcaacaacaacaaaaaaaggtgaagtgcagatcgataggttttgttaaagcatagaagaacgacagatcctttgccaagtattttcttgcctattggatttagaggcccttctgctcaggtattgtgatggacacttgggcatgaacttcatatgaaatagtgaatactttctctgtgcatggcattgaccagaaaaagcagagcatcacacacaaccaaaatatatagaaccaatctagaacatattgctgagaaccaattttagatcccctaaatatcatagccatccatgggtcaagaaaaagcaatcacccagagctgcggtgaaaacgcagccaaatcaatccactgataaggatggcaaaatctactcaatgatctacaatccggtgcttgaatcgtgcaaatcggattgcaatgcagtctgcgtggctcacagcacacacagcgattcacacccnccccccnnnnnnnnnnnnnnnttnnnccaatcccttnncttttaacccaacttttttttctttttagaaacttcacgacttgctactagtccactacaaggtgaaggttaaaccttcataaaaacagctcgataaactttgccttgattcaaccgctcgcaactatcctagggttttggttcaatcaaacaacgtggggagagagatcgttactcacttggaatccgccgccgccgacgccgccgctcctgctcaggctgctggttcacctcccctccctccgccgccgccgttgatatttcctctcgccgcgattccccaaccctagaatctggagacttctctctgctggtttttttctgggttctctcgttgaagcagatttttttttaatttatttttatttcgggtctcgcacacactcgcctcgctttcgccccgatccgttccgttcgaaccgaactcgtaaaacggaggtcagagggatcgggtgagaagtggaaaccggatcgtaaaacagtattcctccaacacgaataggtgtgcagaatcttttttacttttaaaactttatattagaaaaaaaaaatagtagagaacctctttttgatggtcaaatatttccgttgcaccgcggcactgcattgtcttgccatgctaccatggttgacgttgtaaacttatagaaacaaacttaaataaaataaaccgatatataacctttagtacaaacgcgagataagtattgggctaaaattccctttatatgaaggtttgcacttaaccgttaaggaacttaaaatatgaaataggaaaaacactagagggtgaggagagtggagaagaagagaagtatgtctagcctgatggctcttacctaatcctcttcaaattatcaattggaaactcaagcatgattggagtaaaggtttatcaaacttcgtgagttcattgagaagagtattatatttgagtaaaggtttatcgacttaggtctacatattttagtacctatcctattttatacaatgtgagtttatgaggtcaaacaatatctaactgggttaactttttgatagcttgaaaagaaattcatagacgatcatttttgccaagtttcgtgaagaacaaccaagaacccataagacctctttggcacatctccgaattcaaaatttgttggacctgcctatttaaaccacataatttaatatataaaatttaaatctatcgtggatttaagataagaagctgtattaaataggacctaagatagagtacatgaaattaatgttacaggtatattcttgaaaacaaacggttaatctctcgggatgattttttgaaactaatctctagagaggattactggcatgactaccttcctctgtcagatttctgaaatgaatgcctatttgtctgctctatattccgtaagcaccagaataacaatggttgcttttatgcctttatccaccttagcaaaatcttcaaaacaggctaaaattcctccctttctcctgtacacaggcctgatataaaacagacaaattttcgcacacaattccatcgagcagatagtacactgatctagacgttacatgaggaagaaagcagagttagatcagatatgccaacattctcagacggtaactgtagtctggagaggatcatcagatatgcctacattttcccaacaattgcctgtacctgtatgacccaatttagtatcttggcccagagatctaagcattctgcaccaagcaaaaaagaaaactcattgaacaaataatgcataccaaccatcatctttgcccataatctcattccaactgacgatatttctgatcatgcaactgccatctgaaaattactatttgggtggactactagatcatgagtagcagcaacacaggtatgtgcagatacagggtgcaaagccatatatatcggcgtagctggcattactacgattgttcttttcatgtctgaaataacagtccccatctcagcactaaatagagaaaaatcttcaaaaccttttctttcacttcatcagaaagattggtgcaactgtttacttcatcagaaagattggtgcaacagttgaaacagtttagttcatttccatcaatttgtgaagcagttgaatctgtaagtaacggatctaagcaagattatggatgaatgtattctcctagttgggttttgtattgtctgtcttcaacattcatccaaagacttatttattcgattcgctgtatctcgaacagaggtatgtcccgtttcctcctcttgcttttggttagtggctttctctttttagaagtatcatattcaaagtttgtttagaagaagcatgccaaggggtcaaacatttaggagagataaaaacgtgagaaagaatcacttaatgtggcaaaatttgtgcttgtcctgtatcagggcatctaacatgacatatagctgcttacctgcttgtaggaatggaaagagaacctaatgcacagaatttactaatttcaagtgaataatttttgtaaaaaaaatcctttcaatgtcagcattttggtaaaatcatatacatagacacatagtagaaaaacacaaagtagtcagaacagcatgtatggtttgtatttacatatatagatgcaagagttgtatgtcaaatacaattctactttcacataatcatttagtttagttgcacgggaaattcagctaattatctttaaaggcataaatctctactcaataatttttacacgcagaacctatgtttgaacaaataaaccttctgccatttagcaaacaaaaatggactatgccctatgttgaacaaaactagactatgccctatgttgaacaaaaatggactataccctagtggccatccttgcatcattgacaaatagcaatcccacaacattaataatgttatttactcttccatggtgccagggaagcttcttcatggccatgatggtgcaagtatgtgacaaaatccaaccacatgacaatatctgcacgagggttcataaaatgtaattggcatacactcccatcgatcccgactatcgttttgcagaaactaattataacatcatgctcttaccatgtaaggaacagcatagagctttaacatcttaagaggccccatcacaaaggtaaccagcgagaatcccaaccattgctagccagttgatgttaccacatccttcttctcatttggttggaacagcccactgcttgggttcaagtgtgaaccttccctggactccttgcaaactgcagacatgaccccaaacaaggaatttactatgacattacaaaataagaaccttcaatacacttgtcaatgaatgtcaagaagctcttgtcctaaccaagaaaaatgagaatgccagcatgggaaatggaatggtgaacctcaagcatagtctgtacagacgcccaggcagttgcagattgttacaactatagaaccatcaagcataattcgcctgtcccctatgcagaattcctcacaaaccacccaaatacaaaggtgggtgatcttctggcaaagctgagtcattacctgcttggacttcgattcagcttgcaggatcgctagtacctccttatcagggttgacccaacacctccctgcacgttaaccacagaacatgaatcaaagcttctgtgttcagagaaacagaaagtcagaaagcaatggtagatcagctacaaaacctgttaagctttctgcgtcagaatttgttgaacaagagaagcagcagtcagaatttgctgaacaagagaagcagcagaaaaattgcaatgcctctgcatgtgtgagccggtgctcttccagagctccttgtggctggcatctgctcctctgggaaggacatggatcaggatgatccagttgctggccttcaccaggttatccaccgcctgcctcaccacagccttgctaaatggcgagtagtccatgccgactgccgatgataatggttcgtaggtggaggtgaggatgtctggctcatcaaggtgaggtagcctgttaatgcgcttctccgcagatgaggaatatacttggcatcagatggctaataaggaattctccttaaatcaatatacatttgagccacaatctctagtacagccatgcacgtgcacgacgcagtacataacaatcttcagttactcagttagtcatcatgaatggtcaacaaaatttcaccagaaatcctcacaagaacaactagcatccttgaaatgatgaaaccgatacaagtcacgaacaactatttccctacctgtggccagacttatgtacttgatcgcttcatggcaatcctcacaaacacgcagattcttgaagatcctaagtggagtcccacttggagtgctgatgatcccaaatgcaatggccagcttctcactgtggaacttaagagctgtttccctttgttcatcctctacatcatgaacaacaagatcagttctacttgtgtacccaatctccttcagtctctccaccagcttctccaagtaagcataaatttcagctgattgtgggtgtgacgcatcccctgcaacaaatgtatgcacagtattcttcaggtggatccaagatcgaccaggctgcttcctgaccttcctttcctgcattgaaactctaagctcaaaagtgtcgtgccatttgttgttggttgcatatatgtttgacagcataacatatgatccagcatcgcattgctccagttgaaccaatttttcagaagccaattttgcatattcgttgtgctggtgaagtcgacaagctgacagtagcgtcttccaaacaatagcctcatggttgatgttgttttcctcaatgaagttctttgctttgtcaagcagtccagatcgcccgtaaagatcaacaatgcaattgtagtgctcaatgcttggaacaattccatactcctcttgcatctgcttaaagtaaagctctccttcactgaccaatccaacgtggctacaggcagatagaacaccgacaagggtaatctcgttaggagtcattttttctgctgtcattctttcgaagagctcaatagctatcctgccttggccatgagatgcataggagcacagcattgaagtccagacagcaatgtttttggtgcaagctctgtcgaatatgctacgagcatcttcaagggtgccacacttagcatacatgtccacaatggcagatgccaatggtgcatccaatttgtaccatagcttctccacgcagccatgcacttgccttccttgctcaaccatcccaacatttgcacaagctgcggctacactagtgagggtaaaccgatcagcagcaaccccttcgcgcagcatccttcgaaagagatcaagagcttcttcctccctgccattctggacatacccagcaaccattgtgctccaggcaaagttcatgtctctagtgagtggtgaccaatgatcaaagactgacgcagctgcctccaataagccgcatttgcagtacatgtccatgagagagctccgaacaaatgcatcaccctccagtgcagcaatcaaaacacggccatggagctgccggcctaggtctggcaagagaagcatgccggccaagacaaacgctgtggagtaagtgtagtgattgaacaccactccagcttgcgccattcgacgcaggtggctcagggcgtccgcagcatgcccactccgcatcaggccgctgatgattgtgttccagcttgtagtgtcacgcagcggcgattcatcaaaaagctgcatcgacccaaggatatcaccggactgtatgcatgcaccgatggcaatgttccaggagacggcgtctctctcggccattgctccgaacacccgcctggcacgctcgaactggccacacttggcgtacatgtcaagaacagcattgcacagcaccacgtccagatgcaccccgttcctcagcatccacccgtggacgcgcttgccggactccacatcgcccataccggcgcagcacctgacgacggcagcaaggacgaacgcgttcggcgtggcttcaccttcggccagcatctccgcgaacgcgcgcattccgtccgcataccggccgcgccgtgcgcagcccgagatcgtcaacgtccacacgggcgcggtcctcgtgggcctttcgtcgaacaccccgcgggcgtcgtggaatctgcggcgtctgacccagaaccgcaaaaccgaggcacgctcgtggggcaccgtagccaagcgtgcctcgagggatcccccgcgggcggctcgtccccgcaggaggagggccgcagagaagggatgcgtggaagcccgcggcgagagcagccgagccgcagctttcctcgccgcgcacatcacgagctcgctggccgccggtggagccgtggaggcgagggaacgatgcgatcaaggccgcgcgcatggaggcgatgatggcggcgctggagcgcgcgcgacgaggcggatgcgagcggccgccgccgcggcggctatcgcgaggaggaagaggagcgaagcgaagaagctggcgagaggggcgcgacgtgggccgggaaaaaaaagcaattcctaggatgaaaatgatttcgattcaaatctgattttgtttatatttgaataagatttcaaagttttataacaaggataggggctcatttggtcctaagaaatttcatataaatattagggctaatttgaaaagcaggattctcaaaacataagaacaagaaaaaaaaatgcaagattaaaatttcatcacaccttaaattctaagaaatggaaaacacataaaaagtatataagaaaccgtttagatgctacacagaaaaaaacaaaggatttgaaagagagatagacagtaccaagaggttagatcggacgcgttttgatgttgtgctaaatagtcggtcctacgtttccatcgtgcgggacgtatatattttcgcaattcttctaaaaacatctatataatcgcaaaaacttcaaaaacaagttatattttcaatttcttttttctaaaatgatggcagaaacaagttatattttcaatttcttttttctaaaaggaaaaagtaccttttaccctctgaactatttgggtcgttcgaattacccccttagactctaaaaccagttattttacatcctaaatttttcaaaccggccaaattacccccctaagtcaatccggggtggtttggtttgacgtggcgcacacgtggcactagtttgattgatgtggcagtccaacatagaaataacaataataaaaatggtgggccttacctgtcagtcacctattctgattatacgagagagtgagagagggcagaatgggtgtgggcagcggagctcaaggctaaaggccatggagagcggccactggcgtggatctcgtcgcaccggccgccgaatctctctcacctcctctctctcctcttcctctctctctaactcttcctctctctcttgcgcgcggcagcaggcgggcggcacggaggcaacggtctctccgcgccatcgncaccggcacccgcaccgggttacggtcggacaccacccgcgtgatggcgtactccagctcggcgcagaggaggtcgccacccatgatgaggcccatgccgagcgcacggagggcggctcgtcggtcgtcgtgcagctgctcccatgccatctccctcgctgcctccggctgtcgtccttgactcatcgcccgcggccgcagctgccttcaccccctccggccgcagctgcctctgcctccgcgccacagttgcctcatctgctcaccgagagagagagagaggcagagaagcgcttgctcttcgcgacgccgtagcccgctgcccgcagagccgtcgtcggctccagctccccctccgccgccgccaaccgcccggccccgcgcgctgccatcacccgcacgccacacacgcctgctcccgcatcggcgccaccgccgcgctctctaccacggcatcgtcggtcacccactctacctccgcctcagccacccgccgcccggggagctccacctccgccgcctgctgctcggggagctccgtctccgtcgccggtcgcccgctctgcctcagacaccggccgcccggggagctccacctccgccgccggtcgcccgctgccttgcccgagtgtgtgcgtgagagagattgaatggttgagagattgtcagattggtttgaggataggtatgacaggtgggccatgttttttttttgctggttagattgccactttggcgccacgtgtgcaaggtcaagtcaaaaccactcaaaacagtgttcaggggccttatttgtccggtttcaatagttgagggtatagaatgtctggtttttgagtttaagggtgtaattcggtcaactgcgatagttcacgggggtaaaacgtactttttcctttctaaaatgatggcagatagtgaagccagaggaggggccgcctaattatttttcacatgaaattaccccttcatatgggacaataattttttttctccaactaatgtaatttggaccaataaagtctcccttgatgaccgaggcagctagaagatttttccatgccatgtcgacgctaaattatgatcatacaacaaatatagacggtttccccctaccgtttgctatattgccatccgatggatagaaattaatccctcgcactcgtagttacagtgaataaggaagtctaatttgtaaacagatgctacactatgaaaaaagaacaatatcttccatattaaacaagagttgtttatgttggtgatattttaggaatcaccatggtaaagaggaattgaagacgaatctgacgagaaagagtcgtagatctagggataggttttagtgccacggtgtacatggtggggctacagtgtaataatcatgaaaactgccaaactattttcacatgaaattcccgctccaattagtagattttttgctccatctgatcaagaggtaatgatccacattcgacctcccaatccaacataatcaacctagtgcctctccacctcccaccgagacgctgccaccatctcacatgcagggtgtggcacacgtgccttctgtcttgacgctggaggctgccggcaacggctccccaccttgccgttagattgccatccgatgaacggatattctgtatatatgtttgcagtgtattgcaaacatatgctacgctcttacccaaaacaatccaatctatattcaatacattttctccatttgtatttaaatcaagagctgtttatgttggcaagattttagtagtcaccatggaaaaaagtgaatacaaatctagcgagaaaacgtgtacatctagggttagggttggtcctacgatgtagacggtgaggttatagatattaggcttgatgggatatgaagtggccgaagagggtataagggtcatgctacatgaatttcatctaaaagtgacagaatagcatctcagctatctaattttctatcttgatgagattttaggattcaaagtggaagatacattttttaaatttctaatagcattattttatgcatgaattggattacaaggagatttctaattcccaagaagtaaggatttcgagccactttcatcttgtcctttagtatgttgacttatattctgatgagattttagttaggactaaaagagggaaatacactttttttcaaataaaattcaagtaggaatttcgaggcactttcatgttgtccttttgttatgctgatgaacatctatgaataattaatgcgcttggtgttatgaaatatgaaaacggtatgaaactatccagctaatttgatatgggccacaaacagcattcatgaattgtcatgatcactactaagcgcctacgaagctgttgacaaccaaatttggtaggtcatgaaccgggttcgacattgggatcgaggcagattcgataaagagattgatttgaaaaatagagtatgtatcggctgcgaaggcatcggctggagtctgcatcgactgagatggatcggacagaggataactgatacaaccgataaaggtgatgcagccgattctgataatggtggtttcaaagatgtttctagaatcaatcaaggtgcttcacgaagattgccgcgatggagatagggctctcggataggcaattgcatctattaattaggatatttcatgtaacttccttacagatatgtttgggcaaaagtcagccgcaaagacttatggtattttagagtttgttagagataagtgtcgtgtccggcaaggacatattttgtatctcgagtataaatatgacccgaacccatgtaatcaattaacaatcgttcaatacaatctcggcgcatcgccactcttttactttcatttacttcgacgagttcttgctttcgggttgagctgcatcgattcgatcttcaactaaaggtaaagcttgttatggcggcttgcgttctcagggttaatgcttccatctttatgatactttaaccctgtttatgtaatccgtcgagttatcatatacatgttgcaatctacgttaatagcgctatatgacttgttatcgagtagttcttatcattaggaaacaaccggtagagttatgttttgttattaatctagattgtatcgtgtatctaccatctcttgtagattttcatcatcctgcttagatctcatacttatatttatgcttaatgctgcatcgattgagttcgatctattaagtagtatttataattgtgatatctggcttgttttatgattatcgatagagatagtatcgaggtttcagccgatcttacctgatttagctttatgttttatatgcttaattgatatgctaagtctgccctttatgttaagatcttgtcacaataaattatattaggcttctatttgatatattctatctgttttaatatcttaacgtagagtggtatcaaagtattagccgatacatgctagatctatctgatcggcaatgctataggcatttataatcttcatgttgatgtacatttcgacctaagtggtttatactgtctcggcatggcgaccgatctatcccaatcacttggtttaaatatacatcgacagaaggattatatagcgttaatatctacagccgatcgaatagatttagtcttattttgcttatttataactgccgatcgatttacatatgacatcggctcaagaataaatgatatgtcatcggcggctggccgatcggctatcgtttatggatttaaccacggtttcttttgtctttgtttcttgttgattataggatcaaatcaactggcatgctcacgaacctaaaggcaagattttggacctgcactgaagttaagcagatcttccaggccagtgtatgttttttgcatcaacatatccactaaattgaaacgtctgctttctatagttccgattggtgaacaattgcgtgtagaagtacaaattgacatgtacttctttaatactagcaatatataaaaaccagcaataaatacttagtccattctgtgatgcacacgttaaaataaatcaaactacaaacagagtcatacgcaagactttcagaatttgcacctccaccatgctagaatccacaagcacatatgcgcaacagtacgaaccacctcaaatcggaattaaatcaatatattttagtactaactcatgctagaaagctccagatctgaaagagttggacaaggggaggcgaggtggtggcgtcggctgtggacagtgccacttggcaccactgtgctcgccctccaccttcgaccgcctccatcagctgttgtgtgccgcctttggacctgccctcaaccaccgtgcatggagatgggaaggagacatggaggagggacacacaaggaggtgaatcctgcgtgttgccgcctgtttctcggcggtgcaccaccaccgctgcttgctttctcctcctccacctgctcttctacctcccccgcttgcgttgctctgttatgtgagagatgatgttggaggaggcatgacgaaacggtacgaaagggagggatggagggatatggcagtgttattttgcaggtaattttggctaaaagctatgtaatgcggtcggacctggagccatggagtgcccaaaatgctactctacctcgcttgctctgatctatttttttggtagatctggaccccgtttggttggactactccagctccactcaagctgaatctaggagctagagcaccgccaaacaagccctcgacctccgattccaacataatcaacccttgcttcttccaactcctacacaaccaccaccgccatcttagacacgtacggtacgtggcacacgtcctcctccctagcttgatgacggaggctgctagaagatttttccatgccatgttgatgccaaattatgatcatacaacaaatatagacggtttccccactactgttagctacattgccatccgatggacagaaattaatccctcgcgctcatagttgccgtaaatgaggaagcctaatttgtaaacagatgctacacactaagaaaaaaaaaacaatatcttctatatcaagcaagagttgtttatgttggtgatattttaggaatcaccgtggtaaagaggaattgaagacgaatctggcaagaatgggtatcccatctatatgtatgcagtgtatttcaaacatatgctacactcttacccaaaacaatcatgtctatattaaatacattttcgccatttgtatttaaatcaagagttgtttatgttggcaagattttaggattcaccatggaaaaaaagttgaatacaaatctagcgagaaaacgtgtacatcaaaggctagggttggtcctacgatgtagagggtgaggttataggtattaggcttgatgggataaagtggcagaagagggtataagggtcacactacatgaatttcatctagaagtgacagaatagtatctcagctttctaagtttttttcttgatgagattttaggattcaaagtggaaaatacatttttttaatttctgacaacattattttatgcatgaattggattacaagggcatttctaattcccaagaagtaaggatttcgagccactgtcatcttgtcctttactatgttgatttctattctgatgagattttaggattcaaagtgggaaatacacttttttcaaaaaaaaaaatcaagtagggatttcgaggcactttcatgttgtcccttgttatgctgatgaacatctatatatgaagaattaacatgcttagtgttatgaaatacgaaaacggtatgaaaccctgccgctaatgtgctatgggccacaaacatcattcatgaataatcattatcactactaagcgcctgcgaagtgatgcaccattgaaactaagcagctgctttctatagtgcgactggtgaacaattgcgtgtagatcagtacaaattgacatggtgcttctttaatttaatactagcaatatataaaaaccaccaataaatacttagtccagtctgtgatgcacacatctctactattataaaaattgaagatgtttttgccggtactttggtacgtcatccgtgtatgagtcggtttttaagtttgtttacttttagaaatacatatccatatttgagtgggttttaagttcgtttgcttttagaaatctctttaaaaaaatcacattctaacttacacggtcgggctccttactgcaactcatgattttttttaaaaaaatatatccaagcgaatttctacagtgaaattcacattaactaaaccatataacaataataaaattaaaatagcattcacccgttgcaacgcacaggcattttctctggttagaaaaaaatcaaactacaaacagagtctttctgatcattcgcaaggctttgcagaatttgcacctccaccatgcacataaaaagatgattttgtcctctaacacaccctccccccaaaaaaatattactgataacagcagaaacactaaaattcatctttaaaaagaaacactaaaattgtggaattgttttgtttagcccaaaataactttgctgcatcagcctgtcaaaaaagttcacttaatccccaaaggtattcatctattagactcttaagtattgaattccttgtaaacaaactcttaagaatatagatatactctctccattaacaaataactagcaataatcacgcgctacgctgcgtgctcgataacaaaagcaagacaaaacatatatagttgtcaatattccgtgaaaacaaactggcatacacatcaggttttccataaagattcaaatatgaattgttcctattgatctgtctatgcactatttgtacaatcatatgcatttcagcaaaattagcaaccatacaatgaacaaaatgctgtaaccatacaatggagtggatgggagaactgaaacggtgctataaccacaatcataaaaaggtggttctttatttgcaacatcatcgcatacttctcttcatcaaccgttgcaatcttttaacatagcagttgctttgcaatcaataatatgtaagttctacatggcatatatatatctccctcttccaaaaagggttccataaaacatttcatggtcagaagatgatatcttaatgaaattatactggcaagtgaatctataatgaatacttaataattatcactttataaacatgtccatgaaagcaaaatctcaattcaaaaggatagatcagtagcaaattctaaaagcaggaaaacattagagcaggaaaaccacatcacatcagcaatgttgcctgtaagaaaaaaaaaagccatgtgcaccctattggaatatataatagaatgccctattgtaactcaattgaaatgaggcagatattttagaaagttgcccaacacgttcgaaagtaatactcaagtagaatcacattaattatactgaatcaaatgccagcatataatcaaggcattgatcttttgtgtggtacatatactctttccatgacgagaagttcaacaatactttctagggctgcaataattgtgggttaatctatgcattgatcctttgtggttagctggatgtgaaacacctagagatgaatgtaaactacagagtcaatcacactataataggatcacatagtagatcagaaaatgttatattgttgcatataacttgaactgatttagtgaaagaagacattaaacaatattaatgtagttatgttgacctagtaaaattttgaccaatttccaaatctttgatcgatccaaacaaccagagatggaaaatttgccgagagaaatatttaatttggttgttcatttgcattccctgactataaggtgaattgtacaatctatatgtttggtttgacaaagatattagccataatacagagcatgtgaattattttgagctaatgatcttgtctgtttttttttcagatcatacagccattttagagtttatttttaaaataattaaagaaaacttgggagaaaaaaggtacagagacctctccttgctcaaagaagaaaactccccgttgtagatcacctagcttgcacggaatataagtaactttctcacttatggaaacaagttcaaattgatctatgcaaacaaaaaatgaagaaaaagggtgtattactccacattggaattcagaccactacctcatgtaggaagttattacaccatatttgcatcagaagagcagcaagagtactgcgtttgtttcttgcattgcactgagctgtacatgtcaactattagcaatgcataaagtaatcatacgatgagataaagaaatagaaaaatgaaacgttggagaaaattttaatatcagtatgtgtactattatagtcagcatcatctaaaatgcatgaatcatataaaagtatatgactatatggtaagggagatcacattaatattgtagcttttgtcataaagaaatagctgaacatatcaagttaatatcttcaaaaatcaatcttaagccaaggctagagcgaatcccatcttctatgaacctagaataactaaggttgctatctctgaatgcgtatagaaatcaagaatttaagtaaacaaaaaggagatgcaaactaacagtacctatactcctatagggtggtcagattcaaaggtatgatgttataatatattgagattgccacattttcagagtcctctatgccatatgtatcaacatcaccaatgtaagattgtccataatgaacatcatcgatgcaaatgctttctgtcaatctgccaacgacaatagcggcaagggattaagaaaatggaaggcagcagaggacattcaatagatccaacactaaacaaaagctaattaatctgatgaacagcagatgctagcatggaactgaacttaaataatcttgatgagcaatcacacaaccatacagtacatcagctggtagaaaacaacaaaagcgcatcgacaactccaaatagatccctatatatttaggcactgaagccagtacatgctgaaaaataaatcaatataagccgaagctaattaagaaaaaactattaatgtataatacatagacctggaataagcttgctactacatagagattaaggaattaagttaataaaaacggtaaatacttgctattatatacagatcaagaaattaagtcaaaaaatggagaataaaaaaatggtacctccagagtggccaaattgaaaggttggatgtgatagtatgccaagattgtcaggtatacatagaatctttcgtgagaaccattgccattgtaagatcatccgcaaagaataccatcgatgcatatgtattatcatcctgtgtacaaaaatagcgggcaacaaattaacaaataaaaactgctcatagcaaaaacaactaaacctaaataggaccacataaatcattcatgttgaactaataatgagcagcaaacaaagaacatggatcagtggcttagatcaaataggtacatgtgcatataatagatggaaatcgtagtacaacacaaagggaaaaaatgttcattgctttaagtagaactgcataccaaattgggtttagccaagtcatcgccatacgttggtacagtcgtggccgagccaccgctcccaatctcccttctcgtccccggcgtcctaaccatcgctcggacctggcactgaacgaagcagagagcgattggaatagggcgagggagagggaggcgatggtggagtggagattgaagatgagaagatggtggcgacgactcgtgtccctcgcttccctgtggacagatccatcggtgactgatgcgacagcctctctcagagagagtggcggtagcggtagcggcagcggaggcgtggtgaagatggctaggggggagtgaggaggcacgcgggtgaggatgggtggtggtggcaaaggcgcgcataggggaggaggaggtcgaggcggtgcgtgagaggtagggtggcgttgctacttgtgacgacgcgggtgagaagaggaggaggagggcagctagggttttggtgcggcgtggcgacatctgcgccgttcattcccgagccaacgatcgcatgagtgcacgactaaggaagggcagccacaattggacatgtggacggtcagatcgacattaggcgagatccaccgaacgaaggcaatggagcttgacatgtaattaacaaaattgcaggggctttttttttggcaaaattgacatatgacgtggcaccccttactctccagcgatcccatggtgtttaaagaaacaaatatatatgtttttgtttttccccaaaattaccattatacacttctcgtggggaattcacaaacaatggacaattaaaatagatataagtggctcaacaattatgtgcagaaacaagtactaccattgtcccattgtctagatattgccagaaatgtgttctttttagacggatagtaataattttctatttgctaatatattttcataaacatttggtgcataatattatttgctaagaaaaaaataccacacattgcgtctttgtgatttcagttacatactcattctttgcaatctcagctaatgttagggttttcttttttaacgtagaaaagcctacccttctcatacacaactctttgcagaatttgaacgtccactttgcaaacaaatgatgaatccgcacattactccaaacacaccagaattagacattatatatattttagccaaaaataactttacttaatttgttctttccaatatggttattcacttagtccaataatgtattctgctatacactcttttgaataactattggattccttctgagtatagtctacaatgaatgtctgttacatatgttctcttctctatcttttgtttttttttattttcaaatgctaactccattcgctaccaaagacattgtcttataaattacctatgagcaggaaccattttgaacatgttgatgtaaatatgtaatgttacgagggtctacttgtaaaatgttttaagaatagaaggaggatgaaggggtgtgcagtgaggaaccccctgagaaattccccaaaaccaaacaacaatatggtatcagagccaaaccctagctcaccggcgatctgcggtgcagggtgaggcagctgggttgcgtcgggcctagagcaggaggttgcgagtatgcgaggaagatggctgggcccggagcggtggtgtcgctctcaggcgcgcgcgcagaggggcgcacgtgaggcggcgatggggcgcgtgtgcgtgggccgcgctgggcccggagcggcagtgtccacagcgcgcgtgaggcggcggtgtccacagcgtgcgtgcgtgcaggaagaagaggagaggaagaaggcaagggaagaagagggagaagggtgagaagaagaaggaagagaagaagaagaagaggagaaggagaaaggagtattatcactggtagatttgggattttgctgttgtgtgtggtttattttgctgttgtgtgtggttgctgcttgctgctggtagatttgggatcttgctgtagtgtgtggttgctacttgctgctggtaaatttgatgttacttgctgaagagaggagagaaggagaagaaagaaatgttttcagcggttggaaaggaggttgtagatgcttcctcacttatctgatgtgaccatggctactacggatacaaccattgcttacatcatggatgaacaagaagacatcaaggtcaaggcctccaagtgctagaatccaattcggccacctgctgcactgctgatttcaaacagccgccaaatctccatacgagctccgtttttggcccgtaagtacttgatggaaagctctcggagtcctctttccaacggatctagcctcatcaccaaattccatcccagtcaaccgcagatgaagaaacaaggtgcagcgtcacctgtcatgggcctttgggcttataacttcgtttgggaccccggcccaagtggggcccatgtggggtgcgccccaaccaggtggagcacgaccctaggaccctcttggtcgttctcccacccttataagtagctaggtaccccttcagggtttctcgggttttgatagattaaagtttagatattgctccttgcttgcagcgcacgtgtcggctagaccgtccgtctacttgttctttggaaccccaacttatcatttgtattcaattcctatttgcaatatcagattgcttttatcctgttcttgcttgtttcttcgatttgcttgcaggaatagggttgatttgcaccggcaagatcaacaactcacggagaggtgtatcgatcgctaaggcgcaacacaacatctcgtacggttgtagtcggattgtcaacgtttctcccaaatcgtagttatcatcaactcaccgaaagatcaggccaaacaactgccttgagtgtcgagaggaacttagggttcatcaggtggtatcagagctttcgttgctcggtgaatttttatctacctataaccataaaaaattgccatacaaaaaaaattgtatcctgtaccaagccatatattgtgccattgcattgttcttttcagtttttgctttgctgagtttgcgtttcatcgtcgagtcgtgttgctggtctagtgtttagttcgtttagagtttcgagttctggtcacattttgtaccactgtcatcgtcatcgtcgtgtgcttgttgtcgtcgggatcttcgaaaacggaaccgcctcgctgccagtgttctatttttttagttttcagaagtttttgtcggtcagttttggagttgcattttgggtttcttttgtgtggtcgccgtgcgcatgtggtgattcggtcgttttgttgcgcgtgaggaagctgcgcgtggagattagattagattgactagtttggtttctatttagtgccgagtctgtttctatttatcacctggtacctttccaaaccgaggccgagtgagattccttcccttgcgtcatctcgtggccgagagttgtgagtccgacgcacactccctcatgattgtttctgtccgggttggtcaaacactttggtgaaattttattatggtgtcggattcaagatccatttgcaaaaaaggaaccgacataacttgagcattccatttttgtatagttctgatttttgtttggaattttacagttgagtccctgtaatttttatatctgcaattgagtccttgtgatcttacattgaggtctttgagcctgtttttggtaaaagaaaatcaaaaaaaagaaagaaaaaaaggcagaaaggtgcataaaaaaagaaaagaaaagccgcaccaaaaaaagaaaagaaaaagaaaagaaaatagaaaagaaagaaagaaagaaagaaagaagcgaaaaagaaaaattagttgtatctttgagtttgccatacatcagagtgtgcttgagttgtttctggtgctattttgtggtaccgtttgtgtctaggctcgcgtctctagtactatctagcctaggaccagcacggtacttgagtttgaacaattattcaactttgcattatctgagttgagcatttgctattcctttgctacatatttaagcctacccagagctccacagatttaattggagccatacagcaagtgtttgccaaggcatcgatacatccaaactccgttggggtgcttggttgagtcggtgtatatcaccattccgcttgcattggtaagatcttgtaagagcttggttaaaagcttgagtgtgtgtgtaatatttgaggtaccactacctagtagttgataggagcgtgcatatatttgtgtatgcttcttgttttctactaacaatggcagggatatgcaagaccattggagatgacctagctcaacatcgacatcttcgtcgagacatgcaagaaaaatcctaataacatgccacaaacttgggatgcgttgaaacgggtcatgcggactagatttgttccttcttactatgcacgtgacttgctaaataggttgtaacaattgagacagggtgcaaaaagtgtagaggaatattatcaggagttaaaaatgggcttgcttcgttgtaatttagaggaaactgaggatgctgtcatggctagatttttgggtggtttaaatcgcgagatttatgacatcgtagactataaagattacattaatatgacccgattgtttcgtcttgcttgcaatgctgaaaataaaatagaggaggacatgaaaaagaaacatgctatgtctttgcctccaattactaaccatttgcaggaagtgcgtaatcacaaaaaggaggagagagacatgaaagagccgccaattccattgttcacactcaagttcgaggcacctccatcatctgaagaggacatcaaaggtaaagtaaatggtgctgaaattaatctaggtgagtgtgttgttaatgaagtaaatttgtccacttttcatgctaaagtagagcaaccgttagtggaatcaaatgctgaaattcctttgtcacaagtggatttacttgctgttccttgtgataaagaagagttgtgtgataatgctttacttatatcaatgccacaacaagttaatgaatttgctattcctaatgttaattctgctaattttaagcatgttgttcacattgctcatgaagttcaggaacgtcaattgatatcttctttaaatactttaggctatgttcagtttgatgatttttggggagctcgataatttgaaggagaaattatttgttatgtctgatttgccatgtccaaccgatgttacttttcatatctttggcgaaaataatgatgttggagtatatttggtgcatagagtttacatatattcggatttagaacctcctgtacatgtggataaaacatgcaagctagagagaaatgttattgctaaccaaattatctcgagtttggcttgttttgattggaagaaacaggttgttgtaaatggactacataaagagcaccatatggaaaaactgaggacggttttccgtgaagaaggggaggatgatgtgaccatggctactatggatacaaccattgctcacatcatggatgaacaagaagacatcaaggtcaaggcctccaagtgctggaatccgattcggccacctgctgcactgttgatttcaaacggctgccaaatctccatacgagctccatttttggcccgtgagtacttgatggaaagctctcggagtcctctttccaacggatccagcctcatcgccaaattccatcccagtcaaccgcagatgaagaaacaaggtgcagcatcacctgtgatgggcctttgggcttgtaacttcgtttgggaccccggcccaagtggggccatgtggggtgcgccccaaccaggtggagcatgaccctaggaccctcttagtcattcttccacccctataagtagctaggtaccccttcagggtttctcgggttttgatagattgaagtttagccattgctacttgcttgcagcgcacgtgtcggctagaccgtccgtctgcttgttcttcggaaccccaacttatcatttgtattcagttcctatttgcaatatcagattgcttttatcttgtttttgcttgtttcttcgatttgcttgcaggaatagggttgatttgcaccggcaagatcaacaactcacagagaggtgtatcgatcactaaggcacaacgcaacgtctcatacggttttagtcggatcgtcaacgtttctcccaaattgtagttatcatcaacacactgaaagatcgggccaaacaactgccttgagtgtcgagaggaactcagggttcatcattatcactaaggatgatatgaaagatttgctagaggatttgttgaagatggacatgataggtcagaggaatgtagcatgagggtttgaactaaaactagaagtgatgccaagtaagttgaggttggaagggagcaaaaattatttgagttggtgtaggagatctcaactaatgttgagagcaaaaggggtggatcattttttgcaagagggttgtgaagagccctctgataaggagagccaagcatggagaacatggaatacaacaaattcaacagtggtatcttggttgatgaccttggtggctccttctattggtaggatgatagaaactattcagaatgtagcaattgtatggaagacattgagcaacatgtattctggagagggaaatgtaatgatgatggttgaggcttagaacaaagtagagaatttgaagcaagaagggagaccagtctaagggtatgctagtgagttgcaatagttatgggtagatcttgatcagtatgatcctctacaattgaagcatgaggaggacactttgattggaaataaatggatgcagaggcgaagactcattcatttcttgaaggggctgaacaaggaatttgaggatagaagagcggctatgttccaccgggctacattggcccactatggaagaggctatttttgctatggtgcaggaggagatgagattgaaactgatgagaggcacaaatcctataagatcaacatacactgttgctgataatagggaatgctacaactgtggacaagtgggtcatgtgagctacaattgtcccactccttggaacattggcggcaaggggttaattcgaggatggcatggtggatttggtggaacctgtggtggatttgaaggagaccgtggtagctttgggtgacaccgcagtggtagaagaggtgaccgagggggtcgtggtggaggtcgtggtgggggcaaaggtgctccttaggccaatgcaaccattgaggagggtaaagctattaccctaacaggtgaataggtgacacagtgggaagaatggcagaataacaagaccaataagagctccaacaccaccactcactttggtaactttgccaactacgcccaagtgggcgaaggtactcaggcataggcacttcatctacatatagacatcctatagattggatcatagactcaggagtattaaagcatgtcacaggattgcataatactttcacatcatacaccccttatatccactctgaaactatccaaatcgctatggtacatccaaacctattcatggtatagggttggtagagtgcacatcatcaatgaacttatcttctgttctgcatgtttcttcctttccagttaaccttctctcagttagttcggctattgatcaactcaagtgcattgttgtatttgatgataactcttgtctgttccaagagaagggaactgagaggaggattgggactgcagtcaggcatgatgagttgtggtacatcaatcatgaggaactgggactagctgcggtggttggagatgttgagaaggagatcagtttgcttcattgtcagttaggacatccatcttttggggttttgagtaagttgtatccagacctctttagtagagtggatatgcatagactggtgtgtgatgattgtgagcttggtaagcatactcgctttacatatgttgggcttggccttcgtagctatgaaccattcatattaatacattctgatgtttggggaccatgccccgttacttctgtgagtggtttcaagtggtttgtcacctttattgattgtcatactcgtatgacttggatttatatgcttaagcacaaggatgaggtccttcgatgcttctaggactttcataaattagtgacaacccaatttgatgcaaaagttaagattattcggactaataatggcatatagtatatcaataatgaatttgtgtcatatgtctcagatgaagggatcattcaccagactacttgtcctggtacccctcctcaaagtggtgtagctgagaggaaaaatcgacatttgctagaagtggcaagatttctaatgttccagatgaacgtgccaaaatatttatggagtgaggctgtgatgacaactgcatatcttatcaatcagatgctgtctaggatacttggtatgaagtcacctgttgaactttttttgggtaagcgagagtacaaggttcctctaaaagtgtttggttatgtatgttttgtgcgagatcatcgaccctttgttggcaagctggatcctcatgcagtaaaatgtgtgtttgttggctatgcttcgagtcagaaagggtataaatgttgggattccattgggaggagactgtttgtgagtatggatgtgacattccgtgagtttgagccctattataagagttaaggagatctcgaccaatttcttgaggaattctcgactgtcatggaggatgacagccgagagggggagacagagggaggtgatacacatgaaaaaaatgttggttacaagaatggagaggcagtggtagttggatcaataccatgctcgattgatggtgtgagtaaagaggtggaaaaatttgttgaagctacacaagacaaagatggagaattggttcttcatgagagggatggagaagtggtgcttcatgagggagatggagaagtggttgtagggacaattccatgtcctatggagcaaaccgaaaaggtgaaacaaaaggatatgctagtttaccaaaggaggaggtttgataatcatggggagaaaagaaagaaatcagtgcaagatcaagttgaaagttgccacacccagaatacccagtcccagagtcctctcagagcctctctcctccagcctccttggctcctcttgagacaattggtaacacttctccatctcttgaacaagtagaattccctcttgcacatcgtagagagactagatcaaatgctggtaaccctcctatacgtcttggttttgagcattttagttgtatgcatgacatgccaacttatatctcatattctcatgtttcaacgccatacaaacatttcattgcatcattacagacagtgtccataccaaacgaacggaagtgggcaaaacaagatccaagatggaaagatgcaaagaaagatgagctgaatgctcttgtgaagaacaaaacttgggaacttgtgagacttccaccaggtaaaagagcagtgggatgtaagtgggtctttacagtgaaacaaattcctgaaggaaaggtggataggtataaatcaagattagttgcaaaaggctataatcaaacatatggaatccactatgatgagacatttgcaccagtggcaaaaatgggcatagtgaagactttggtatcttgtgcagtaaactttgggtggcctcttcatcaacttgatgtgaaaaatgcatttcttcatggtgatttacatgagaggtctatatggagatccctctaggatttgggaatagccaggc

SEQ ID NO: 28529 - DNA, 10838 bp, Oryza sativa
agtaagtgttatgagtagatatatgtatgatcccagaactggtcacttagatgttgttcataggattcttagatatctgaaagggaccccagaaaaggggttatggttcagaaagaatggacacctaaacgtggaaggatattgtgatgctgattgggcaagtagtatggatgatagaaggtctgcatcggggtattgtgtgtttgttggtggtaatcttatttcttggcggagcaagaagcaagcagtggtggctcggtctactgcaaaagtagaatacagagctatggctctgggcttgagtgagatggtatggatgaggggtttgttgtctgagcttcgagtgttaagaagtgatactgtgatgcttcattgtgacaataaatcagccatcaacattgcaaacaacctagttcaacatgatcgcactaaacatgtggagattgataggttcttcatcaaggagaagattgatagtggggtgcttgggctagaatatattaagtcatgtgaacaactagttgattgtctaactaaggggctaggtcctagtgaagttcaatcaatatgtaacaagatgggtatgattgatatcttttgcccatcttgagagggagtgttggtgtaaatatgtaatgttacgatggtctacttgtaaaatattttaagaatagaaggaagatgaaggggtgtgcagtgaggaacaccctgagaaattccccaaaaccaaacaacaatagaacacatctaatttcatgaaatttcgctataattaaggtcagttcctatgaaaatcctgtaaaattcctccaagatgcatctttctattttgtcggttgatatatcgagggtattttaggaattactggctcattctaaatgcgggattttgcagttcaattgctctgaaattcccacgaaaaatatgagtgctaaggacctaaggtataccctttatttccttcaaaatattcaattctaaatgaaacggacgggttatataaagctaaaataccaatacgcacacatgtagaactagggcatttaatgttgctggggcctgggtttttttttttactaatggaatgaaacactggggggttaacgacgatgaacaagaacgctgccgtctcttcccttctcgtactgtcgccgttgtacgccactgcacatggcagtgtcgtgaacgtcacgtagctcctcttggacgcgggccacttcggcatgttcgcattgccgtggcagcgctctagcaggagctcaaggtgcgccatcgccaccgtgaccatcgcagcgcgcttgcgtgtacgggagcgggatcagcaccttcacgccgtccgacatctccttcgcccaagcgagcccgcgcgcggtggcgcgactgctggcattcgagctagcgcatgttgctgccagagctgatggctgtggagcggccagtgcagcccacgctcgtgacggagcacgacaccatgaggttcacgcaggtggacgtcacacttaaggctggcagtggcgtgtgtgggtaggggtgtaagtgggtcagctgcgaactcacttataggtcaaaataagtgggtttgcggcttattttagcctataagtgggtttcgcgggttagccacttacatccctatgcgtgggctgatgcagccgctgggcaagcccgcaccacttacccacttacccacttaggccaaatggttgatgcggcaagcccaccgcgtccggcggcgccaccacagcccacatcgagggagcatcagaaagaggaggaacgaggagtcaaagaggatgaggggaacaagttcgtcactgttgtggcttgaaacctagtcgctgtcgccatggattcgatgccgcctcctcctccgccccctttgccaccgccaccgccgctgttcctggtgatcttgtagacctccgccagcactgccgcctccaatgcgccctccaagggaccttcgtactgaagttcctgagaagttcctgaagaaagtctgaacattgaggttttgtgctgaatgcagcccccaaattgtctgaatgttgatttattttatattctttgccatgaattgcccacattttttttaccaagttttggttataccattctaaacttcctatgcagaactcaattctcaaaaattgcaggttgttttctctctttggtacctacaaaaaggaactctttggtacctgcagattcttctgattctttatggttagcaggctgcttgctaatatcctgggatcctgttttttttgctggcagtaccatatttttgtctgaactagtgcaagcaacatacatcctttgttctttcaaatattcacgaagtggtgctttctgatgaaaaactcatatataatcattatttgtcaatatgcagaatctgaggatttgcaagcttcaacaccattaggcattgaagtagagcagctgcaatgtacagtcttgtgttattgatacaatcgttactttgatcttcattaggatattcataatgtcctattattccactcacattaatattgtaaattcagtgagcaatgcaacggttctgtgacttctttcattctgtttgccatcttcaaaatcttggatgaaatttcgttgtttgggattgagtgcttattctgaattcttcttagcaagctgattatctgatcacgcatgttcttttaatctgggcaaagtagaaccagcgggcaggcgggcaggtaaacggatcctgcagcaaggccgccagaagtttgtgggcttgcgtgcggactactcggcgccactaacttgttgcggacatagcggtcgcggggcgggcacgccgcagccgtgacactgctcgaccacgaccgcagcggctgcagtggcggctctccgtcgtggccgtgctgttccctaaggagttcttctcgccggccgtgatcaaaagtgctacggctaagagggtgtttgggaaagagggagtaaactttagtacttattttttgagagagggatctctcccaaacaccccctaattcgtgcctgggtttgagtggagaagctcattaagcgtcattaattaattctctgatattatactccctccgttcacatttgatggccatattacaagcgtgcagcgagaccaatgctaagaaaaactcttccattaatcagttaatgttgtcttgtcccttcagtttcatatcagatattaatactagtcgtttttcatatcaaattcccctccaatcagtagattttttttcctctatccgatcaagatctaacgatccacattcaacctcccattccaacataatcaaccctttgagctgccatgtcttttgatgcaagaagtatggtttccccctaccgttagattgtcatacgatgaatggagattcatccctcgcagttacaatggattgcaaacatgtcctacactcttaccaaaaaaacaattttgtctatattaatgacattttggccatttttatttcaatcaaaagttttaagttggcaagattttaggagtcgccatggaaaaaagaagtgaagatgaatataggaagaagacgtgtacatctaggggtaaggttggtcttacgatgtagaggggaggttgtagatgttaggcctgatggaatgaagtggcaaaagagggtataagggtcacgctacccacgaatttcatctgaaagtgacatatgagcatcccagctatctaagtttctatcttgatgagattttaggattcaaagtggaaaatacactttttaattttctaatataggggcatttctaattcccaagaagtacagatttcgagccactttaatgttgtcctttattatgttattagattttaggattcaaagtgggaaatatacttttttaaaattttcaagaagcagggatttctatgcacttccctgttgtcctttgttatgcttatgaacatatatgaataatgtgcttagtgtcatgaaatacggaaacggtacgaaaccgtcctgtacgttaatgtaacttaaaaaaaaggtgcctgtgcatcgttcaacatgacaaactaaaattaggatgaatattagatttgtaccttgaacttctccaaaaatttgctcaaactcaattcagaaatttgagagcgaatccaatttttccgttcgaattactttctttttttattagtatttccttgttcaaaatttgttcaaattctcatatatcaaaatccacccaaacatgcaaaaatccttatcacgcgatgccaccgatgatggatgataaaagaaacacttcaatatttttctataataagtaggtagtgaagatattcctcaattaccctagaaaaggatattcctcaatctgtttttataatttggataactctaaccattattaatatttatttttttcatttaaaattttgattatacaatcaatcctactttatccccttactcaaacgcaaacatatatataacgttcttcttctagcttcctggcttctgggtatgagtcacgggatggacacagggtgggccgggtagcagttcttactccttctgaccatgaatgatctttctagttttgaaatcagttaattgttcaacacacaaatttatttccattacatgaagttcaaaacatttattaaattaatctatgagaaaaatcatttacaaaattaaatacaaaaataaaaacctaccaaacattatggaacccacgacatgaaaaataaaaagcgtaaccttaagcaatatatgcaacactttaaatgttgtagaaacatacctaagcaataaatacaacactttaaatgttgtagaggaataccttaggccctgtttggctaatgggatagggaaatcatttcccacccactaaaagacatctttaaatcttaaccattcattatccctcttccatttaatcctaacccccacatttctcattatccaaacacacccttaatgtttacactttaaacttcaagcttcaaagattgaccttaacattaaggtgtgccataagagaataacataggatccttttattgattcacagttcacaccagttcattgggtgatgaacccgaggggtacctaaattcgatttcacaacctttaactgttgtagagttggtactaacttatgtcacttgcattaggccccacccttacggtcatcgttgcacatacattgagcttgcccttatagaataaactatgtggccatccaccaaaatggtttggcaagttactactacccgttctaaaataagcttatttttcatctaacccacacattctagtataaaagtggaaaaataatactcttcgctttatcaattcccctcactttaaccaattccaatgcatttgtcccatacttttcacaaaccccaatgtaatgatttctaaaaaatgaacttattttgagataaataagagggagcaaagataatcttattttaagacggaggaagtacatcatgaagtgtggcgacaaacacacaacaatgttttacatacttgggtgcgggagtgttgtcctgccacaccaataaaaatagcatatcttgaagattcatagagagtggattctaatccctcgagggaatgtcatttgtgtactttttttcctttaaatttgatacaaatagttgtagaaaaattctaaacttttttccactgtagaacatagtgatatctatggtaccccaaaaatcaagttcaaattcgagctacacatcgagaaaaaaaacaaatttagatgtggacaatacactactattcatacgttaaatttatctcttttatatcttgatttgtgagttgagtttagacctaagattctatggagatatgttgtacgagtgctgcaaaaaaaattcatatccgtttggatggtttttaagtaaacaagtagacatcccctcaagggatgaaaatagtttcccagattcatatatgtacataaattttttggaaggcttatttagaaattgagatgaaaagggtttaaaaaaatccaatgcaacatctcctagcaacaaaatttcaattgcaatgagttttttttcaaacaaattgattttaggcacactgattctttacttcaaaggacattttttgttaacgactcgcacaagacggtgcgaagttctactgatagagcagaaaaaaaaacaagattacaaccctagaaggtcttaatcaggaaaaaggaaaaaatataccaccacatacacatcgacagcgccaacacacaggtccgagagaagactagcactggaccggccgcggctaagcgtgaccgaccgccgctaggccaacaaaggaacatagacgagaatgctcaaaagcccttacaacctacacaaagccaactctatctagagtgtgcttgcaccaatcgttcgagtggttttgacaaggggatgcctaaacgacgtctccaaggagataagcgacggaaaaccgccgtcgctgtccgtcggggactcaaaagagccaagattgggcttttgcccgacaaacacccttgagggatgagacggcacgacaacgcccttaggagggggaaaccattgttgtcggtccgggcaaggccgggctaggttttcactcgccgctcacctccaagtccacggctgatgcaccgatgctccaccactgctcaacctctgccgacatgtgggaccactgcaccggcgcctcccgctggccaaccttcgtgcgccgaagaccgcgtcacaccccccgcagctcctcctcacatcgtggtcgcctcctttaccgccggccgtgcctcatcgcgccgcgccgtcctcctccaccaccggatgagcctctcgcgccagtccggtttcctgccatcggctgtgcctctcacgccatgccggcctccttgccaccggccatgcctctcgcgccttgccgacctccactgccaacagccgtgcctctctacgccaagccggcctccgacccctccaatcactgccgcaccggccaggtgcggccgtctgccacgcccccggctagccttccgagaccgccatgcctcaccaccattgcagccactactgccgatggccacctcgccgctaccgcgaccgtcgccacgagctccgcgccgttgtcgccgccgtgagtgcgccccgttgccacagcagccggcagtgccgtctaccaaccactgtgctgtcgccatcgtccagccgctaccaccaccttcgccacgagctccacgccgttgccactgtcgttgtcgcgacgtgctcgacgccatcgccgccgacgccgtcgccgcgagtcccgtagccccaccaccgccgtgagcttgccccgcactggatcggccctcgggggggggggtgtccgccttcggagcgaccgagccctgcccgccgttaccatcctcgccgccgccttccatccccgccgccaccaccgccaatcgccaccgcctcaccacgctgacccatcgccggcggtctccctgccagatccggtcatgatggcctcgaactgggcggccttcgccgtcccgtgcggcccccacccctggcgggagggagagacgagacgaagcccctccatcaccatccttgcggccgtgcggctttgccggcggccgctcgggcggcggcgaggcggagaagaaaggagggggggagcgggcgacggtggtggtttccacctcctgtgtcttccgtgagggaggacgacgcgggggcgaagaactgataatggacatttcttaattcgaacaataatgatatcaacggcatttcggtgccttgtgtttaataccctgatagataaacttctattaaaagcaatcccttccttccagcaatcaatgccagggtgaatacgtgttgtttattggctagctaataatctagtgctataattagcgcaccaataaaagccagaagctctcgtcaccacctgttcgaccggagtcagattgcgcgcgccgtcctcccccaccgccatggcgccgccgtcacggcatgtggacgcggtcgccgccgttctccctgtcctcctcacgatccttctgccttccgccgccgcaatcggcgtcaactacggcaccaagggagacaacctgccgccgccggccaccgtggcgaagttcctcgcgaaccgcacccgcatcgaccgggtgaagctgttcgacaccaacccggacatcgtcaaggccttcgccggcacgggcatcacggtcatggtcaccgccggaaacggcgacatcccgacgctgggcaccaaggacggcgccgccgcctgggtggcggcgaacatcgcgccgtactacccggcgacggacatctccctcgtggccgtcggcaacgagatcatcaacacggcggacaacgccctcatcggcggcctcgtcccggccatgcgcaccctcagggcggcgctcgtcgccgccggcttccggcgcatccgggtcgcgtcgacgccgcactccctcggcatcctgtccgtctcctcgccaccgtcggcgagccggttcctcgacgtcctcgaccgcaccttcttcgcgccgatgctggagttcctccgcaagaccaagtctccgttcgtcgtcaacccgtacccctacttcggctacaacggcgacacgatcccgtacgcgctggcgcggcgccccaaccccggcgtgctcgacccgggcacgggcatcacctacaccagcatgctcgaggcgcagctggactcggtgttctcggcgatgaagaagctggggttcgaggacgtggacatcacggtgggggagaccgggtggccgaccaaggcggagcccggacaagccggcgtgagcgtcgccgaggcggcggagtacaaccgctacctcatcggagaggccagctcggggtcggggacgccgctcatgccgaagcggacgttcgagacctacatcttcgcgctcttcaacgagaacctcaagccgggtcccatcgccgagcgcaacttcggcctcttcaagcccgacctcacgcccatgtacgacgtcggcctcatgaaagacacggtacgtacgtccgtccgtccgtccgtacgccgcgccgccggcgagtgcaatgaacgttgttgcgtaatgcaggggaagtcatcagcgtcggcgccggcgccggcgaagggcggcaatgccagcggcgccgccgtgacgaagcgtgactcggagtcggaggccgccgcgccggctgatgaggcgagtgcgcccgcgccgtcgtcggtggggaagaaggtctccacgaaggccaccgcgccggcaccgtcggacgacggctcggcctcgccggagccatcggagggcgaatcggccgacgagaagaatccggtgcgtgccgcgcgtccgtgctcgacacgatcgacgctcattgtcgccatcaccatgcatggtttttgtggctgccgacactgactgacatatcgttgtgaaactcctttgtggcgcatcttgcaggaggaggaggaggaggaagagggggatgatgccgccgcgacgacgacgccggggggcgacggcgactcgccggagacggaagccgcggtacgtacacgcattattcattcatgatccatgtgtccatgctcgtggactgcatcgaaacgagaccattgagaaaatgagagagatgcacgcttgataatttctctttgccacctatttcgacatccttttgaattttcatagacatatatattcaatttctatagtaatggaaatttttcatggatatcttcaagaaacccttagttcattaactatttttcttttgttgatcttgggcagggtgatgatgctaaagagagcgagggaaaaaacaacccccatggccatggagattcttcagaagctatcagtgttatgttctctgtaccttccatgcttacaattgctctgtctgcaatacttcttcatctctaacttctcctcaactcatggtgtaacaatagtgcaaatactaacattggtttttgccaaacactgaaaaactgcttctgttattctcctctgtgacttctcctctgttctaaattatagggtgtccttatttttagaaaactcaaacttaaaaaaaattcactaataattacattagcttatttatactaagtattatgcatgttatataactagatttatattttaaaataattttatgtgatactaatttcgtaggtgtttgataacataacatgaaataaatttaggtcaaagcatgtcattgaagccagtgtaaacttataatttgggacgagaggagtagtatagtgtcctttatatatactcctatgaaagacacaaatgatggtggtggttctactgccatcaccctctgcccagtgtgacagtgaggcccatatacggtaaatgttagttagacattttacatgccattttatcaattatataaaaaagaaccaggctataaaagtaaaaagaaatctgtaagaaaatttaatatcaactttaaattatgatgatgattagcaatcattttatagctaaccaataaaatttgattgatgaaagtatagtttcatgaatagacaatgagaaatgattttataaagatgaatatctcttttacaactctattgtaacgcatgtgcatttagctagtgatataaaataattgtagcacttattgttaatctattatattttgcaaaaacgataaggtcaatacaaacacacatggtactaagtttgtacatatataatttaattattatcgaagctttcatggagcaattttaaatgcaagccttcctaattaactaaaccatcacaagtttag

SEQ ID NO: 28530 - DNA, 21374 bp, Oryza sativa
  unsure (1)..(21374): unsure at all n locations
cgacgtgtttgaacccncattgagaatgacatacgacttacacnaggcgaattcnacccttgtactcccctatgcctattaccaggagggtgatgaggacgatggcgctcagtaggtcttagttacggtcgttgcctgtggcaatggcgtgccgctgccttaactccgctgccttacctacttctgtttttggaatgtattccggaccgctcggtccgatgatttaagactgtgcctgtgggcttatgatgtaataattcgtactagactctcgtgtatgtgcacttgatatttcagctatgagttcgtgtataccagactacttgatccagggaaatggtacggtttacacgattgattcctgttataaaaacgggggtctacagagctggtatcagagccatacgactgtaggaaaagaccaaaaggcaccccacccctttttaagttggccaagggagaaattcccatttagtaatactttcaaaaataaaaatgctatgtttacaaaactcggtacgattttcatcttactcttaactattttctttacaaaaacaagttttactctcaactgactttgggtttttcttaaaattagatggcaagatccggattcacccgccacctgggagatgggcgtaccccgctcagagggatacgtcattgagctacaccggctgataaggcgtctgcgataccccagattttccgatctaccgagtgagacatggtggatctgtttgggaggctcgggtcgaggtccacaccagagttccttcagagttagactacagcttcccgacacgccaccgtcgcgacttgccggagatcgcgatgcaggatgctgcccgggaggccttcctccgacttagctctatccaccgagctgagttggcgagtactgagtttgctcaccacccgtttcgagaggagggcaacttcgtctgcacagttcaagacacaccttgctgctacaggccgataatgacccgactgtcacgatgggctgaggctgtggacgacttctacgaggaggccctgttggagattgacgatcagcagagacgtgtgggtatggctctagtagctcttctcttctctttcgtaagctttgtacttttattagaatactcttctttatacatttatggtattgaaatactttctaagtatataaatgccaactttacattatgttcgtgttatactgattatactgctagcttatttgggagatgcattggtacggatatagtgtttgcttatgcaattactctatgtcatgacaatgatattagagtagtatctagtagtttaggcgtagtgtctagattacgggcaaatagcgaaagaatgtttcagttcactgcaacatttgatccatacatagtgaaacattgcgggtatactaaacgaaacatttttcgatggaacaaaaaataaaactaattctgagggtttccaaaatatgtgggttttttgttgcaatagagtatctcaaatcactgcaacattagatatataaatagtgaaacattgtgagtacattaggtgaaactttttggtggaacaaaaaaataaaacaaattcccttaataggggtttccaaaatacgtgggttttttttgtaacagcgtgttctataatatcaaaattcactgcaacatttgatccgtacatagtgaaacattatgagtacactagctgaaacattgtaaaactactggttgaaacatcaaaagagaccatatgcaacatttaaaaaaatcaataaaaaattaaaatatttttttattaaaatataatcatgtgtggtcttgttgtaaagatttaattgtaacaatttagtgatgcaatcagatcgtacattagataaatagtttatgagaaaaaatcttttgaagaaatgagagatggaagcatgtagggaaagattctttgcatacaaatggcagaccatgcagcgtctgatttttctcccctctcatcggaggcctgacaactagcattctccgttgaaaattacaagtgtacaggttaaaatttaagagtgtacgtacagtggttgcatgctgcaattgtacagtcactttaatgcacgtggctgccgaatatgatgggaactattatggagaggacatcttctctttatttacatgtatttaaatgattatgaaaaaaaaatcaaattactatgtgataggtcattccaccaatacgtatggtcaaatttaacttctaaaatgttacaacgaaaaaaacaaatttaattgtaaatatacgtcgactagctatagtttagttttatttttttttaacttattcttgacggtcgttagcgatcagtttcgaccgtcaatattaccaaaatagagaactaattatgcttgcaatgcatatccatgttagaataataatatttcactagtatttggttcactaactttttgcagagaataatcataaagtggaggagcatcgacatcaaatcagacgatagatcaatcggacgatgtcgagaatcaaaattatacatgaatgggccaagaactcataattgacatgatgaactgggccaaaattcataagtctacgtataagagcaaaggaggaggccacatgccaagtttaggccaggttgggccggcccctggtttggccgaacccccgtggcgccaatggatgcagggtcttgatggacggctgggattgatccccaatgacgattggaggatattactgacatttccaaccatcataaccgtcattacctgcatataaaaggagctctcatcctcacttcactcacacacctcaagcaagagctctctcatattctctcaagttagtttagtagtcttaagctagtggagtaggaatagagtagaaatcggagtccggaagccttcggaagagttcgggtatggctctagtagctcttctcttctctttcgtaagctttgtacttttattagaatactcttctttatacatttatggtattgaaatactttctaaatatataaatgccaactttacattatgttcgtgttatactgattatactgctagcttatctgggagatgcattggtacgggtatagtgtttgcttatgcaattactctatgtcatgacaatgatattagagtagtatctggtagtttaggcgtagtgtctagattacggtgtatcattatttggggttatatgctgcggatgagaggtcggccgctgatggtgacagctcagtacgggtattcctccgtgagtgtatatagttctaagttaatttcctagggaggctactcctccgtatttagccccggttgtatggtcatgacgggctgtcgtaaggaactcggcagtcagggatggcttcttgaagtaccaggagagcatcggatagagggtattagctagtatgtcagataactagaatgtatgtatactatatatactagaagtataggaatagattatctttctattttctttcaacttagcttaggtaatttagtatgagaatgagtagttccatgcttgtgtgtcattctacccttgaattatgttaactcctgcttaaactatgattattacaagtaacatctaaattactagtcaggttctctctactatgatcttcccacgggattaaataaatacgatacccttggaatactctcgggtgaaatgctaaaatggtatatccgtgcgctcgcggatgaactctgtagccataatataccatgagtatttctgcgccattgctgtgaattatatttctagtaatgtcgttaagaaataccaacacttatagaagttgaatttcaacttgtatggttgtgggaatgatatatcacatattaataatcttctcaattttttttcataactatttagatgacatgcaaataacgaggggatgtgatccggtgaccctaacctccagacgaccagatccagtggcctgcccactagagaggggctaccactgcaacccctaatctccaggtgattgtgaagcggtggggaggagcattggcaccatcgaggagagagggagaggagacagggagagcgacggagggagactgagaggggagagagtgatggacgggcggaaatgttgttcggcgatcgatcgccctggggatggggcagcgatcgatccccttccccctccctccctccacccctccacccggtttccttttttggcaccgcattactttcctattttagtaaatttataaacctaaagtttatacacctcaagtttacacatctaaagtttagagaccaaaagtttataagtcaaaagtttatatatccgattcaaatttgaatttgaattcaaataattttttatatatagtatttctatacatctaaagtttatacacctaaagtttatagacctaaagtttatatacccgtttcaaatttgaatttgaattatatctgaatcaaatttgaatttgaattcaaatattttctatatatagtatttctatacatctaaagtttatacacctaaagtttatacacctaaagtttatagatccaaagtttataagacaaaagtttacgtacccgattcaaatttgaatttgaattcaaatattttctatatatagtacttctatacatctaaagtttatacacctaaaaactatagacccaaagtttataagtcaaaagtttacatacccgattcaaatttgaatttaaattcaaattttttatatatagtatctctcccttatccaagaaacaaaaggggacctctctctctcccttatccacactcacagaaacaaaaggggaccgggcggccctcgggagaggcggcggcggaggacccgacggccctcgggagaggcggcagtggtggttcggcggtaccccatcctcctcccccttctttcttccctcctcccccttctcttattttctcgatctggtgcgtggctcagtgcgcggtgcatggcggcggtgaggagggcttgacggcgtgcagatgcggtcgcctcctagaggtcggggttgaccggatccggcggcggcctccaactccacgcgcgagcaccggccgtcgtcctcaccgtttcaagcaccgaccgccaccgccaccactgaggtcgggggacgctggatccagcctcctagaggtcgggggacgccagatccggcactggacagccttctcctcttccgtccccaagcgccctcctccgagagctagtcacctcctcctgcatcctcgcgcggccaccgccatagcttcctccaccattcccaagtactgattaatgtgtttatgtgcttacgatttggtttcagatcttgcaagtcatcgattccaagtttttgattcgggtgtggtcttgttgaagccccatgatgtgttgccgctggagattaattgatgttagaagaagacctgtgaacttttgtcttgtttttcttgaagatactagagattttttcgttgtgatgtagctagaaaattagaatcttaacaatttccctgaaatgcagtttcccagtagtttttagttttgtagtttgtttttcggttcctattgtaaaacttgtaagttctccggcttcttgccatcttttgaaaggaattagtttgaaatgtttggggttaattattagttcttcggcttctattaccaattttctatggttgcaactgggcaccatttttttaagatgactttccattccagtgatgggttctgtcgaggagcaaccctctctagcgggtggtcgtgagacccccccccccctttgtgagttcgaccgggggatacagcgcgatgatcaagggcctacttcggcttggcgtttaactactaaatcgctctcggggctgtgtggaagacaaaggattatacaggttcgggccgctatcgagcgtaataccctactcctgtgcatgggattatgatcaacttttacaggatgtcttgagctctggaggggaccctagccgttcttcctctcgaactcaaaactatctgagagtcgtcacttttttcggtgggcgaggtcctccttttatagttcaaggggataccacatgcaccgtccatacctactcctccaggggagaggaacccaccctgcctcgattagaccgccattcgtgccttcaaccggaagcaaggtggctgtgcgtccttgggtggggcccagcgccgtcccccgcctgacacgggggacatccctgtcattccccctttaaatgcatggagactttggtggctcaccacgtccggagggcacccctggcagcatactgacgggacggggcgtacctgcccccattccgcctgacacagggcgggacgtgggggcgctgccgcccgcccaatcacctgtgaccggtcacagaccagtcactcccgattgacatgggtcaatcgggcggcgccgtacatccacccacaccgcgttaaaatgcggtgagggacggttggggcgccacgcattaaagatcctaagaggcgtccttcgcaccgcccgctctcctcgccacgtggtggccgtgcgagggcctcggggtagcacgccccgaaagcccgaggggtatgacgtggcaccccgaggcccccatggccaccttagcgctatccaaggggcaggaggacgcgaggccgcgtggccgcgcgactagacgggaaggacacttccctctactgtgcgtacccccaggcccatttcaccgacaggttcatatcttgaactcgttggaggtgagtctcaggtgtctacctttgatgggttgcaactacacattggcttgtggagatcctcacctttgacaggccggaaaatacggacccgtcagaggtgagtgtgcctctgacgggccggtcacccatcaaaggtgattggacttgccagtgaccactgatcactgaccaagcccaaacccgtcaaaggtgagggtttgggcccgtcacaggtgacattatccagtgtagtggatgaaagagttaaagggagtaaaattgacttttcttttttaaatataagtgtaatctttaattaacgggtatgattgatatctgctttttaaaatataatgataaattgtacctgtggcgagttagagtacagcccatgaagatttggttgttacaatacacacatctagtcatatttgtgcataaccaacctaactcacattaaaaaaatgattcaactcctacagtttggtggattaggatatatacaacagcaattagtgggacactataagtaagttaatacttttttttgacgtcgatgagagtggagagcgagagagaaaaatgagttatcgtttctttagacagcttgggataacttagttacgagaaaaaggagagatagatgatattggatatcatataattatctttcatatgtatacatgtcatattgttttctaaattatctctatttaatgtagatactaattaacacagacaattaatagcagtaccaaagttgtagtgtattacaaaagcaaaatagcaataatagttttatcacaaagtacgtattcataacgtagacactcatgtaagtacacacccatataaactcgcccctcctgatatattggatcaatatctactctttctatatagttacaaagcatattaagcatttaaaactcaacatgcatgcaaacatagttatcgatagtacatcctaaagcataacattcaagcatgacatatcaacccaccaagtatctataaaactcaatatgtaagcatagccattacatatacaatttattatattctaaagctaaacatataagcatgtgttgtaatatattccttacatcattttttttacaatatttcagcccaaattggtcaattatttctacaacatttaacttatattcactcttgtattccaccgcgaagcgcggtgcatcatctactatctttagattaacatagtcaccaaagtccacaagtccctagttggtacgccacataccactaaaaaaataattagcgttaaatacgaacaccaataccaagagtaggaccggaatccaagcaggtaggatctaccacaagaaactaaatcaattgaggtatgctcagtttgcatgaaataaataattatttttttgagaaaatatgaataacccctacaaattagtgatctttctaatctcccacctgcaagttagtttcatgcaaaacattgctcacaagtccattttctcttccaacttctcacctatatctatcttttattgatttctcatcgcgcttagcgattcctcgcatactgtggatctctagcatggtgtgcatggaattaatttgtagggaggacattgaaaaaactagtgacttgtagggggtatttggatttttttttcctctttaatttttatgtgatacttaaaccaagttgtggagggtttagacccttttttgtccaacttatgtactagctagtagattgctgaaacaaattatttgctccacacttcaaaaaatatacttttctaaaacaaattcttctattgcattacttagatcattgttttaacatattcgttaagtttatttctgaaaatatttaatttatgcatgtgatcacctagattgtccaatgcaataatccgctgaatagtctaaaatcaaacaggatattaatgttgctacagaacatttttacaaggcttcaaaatgcattaccccggttattactcgatctgcatttagaaaacactagccactccattgtttcgcttatgcgtatatttataagccaaaatttaaatttcaacacttaatttagatttgattttatggtttttcttatcatagtttatttcacaccatttgcttttgaatctctaaggacacgtatatggaagttttacccaaaaattattttggagaaaatttactatgtaccactaaatttgtcctagttcaataatttactattgacattaattgtcccttctataataaaccagcgagtttactaattattctataatatgccactatgcttgtttcttttttaaaaatacctagaacacccttataaacatacaagttaacaattgatttattctatcaaaaactttcagaaaaatatgaaatttttagcctctttacacaatatataagtttcagtatttttgcttttctatttttttcataatacaatttatctgctatatgctgtatgtgttgttgttttcaatgcaaatctttaaaaacctagacaacacattttttctattatataccaaacaaaaaataactttcttaaaaaaataaaataccaaaaattatcttgaaagttatatacaaactactttccatgttgtataaggaggctatataaaaatcatatttttttttgaaatttttattgtaataaatagattgttaaccttatatgtctttgagatattttgggtaattttgaaagaaaaagttagaacaatcgataaactcgctggtatattatattaagagacaatattaatgtcaaattgttaaaatgagatgacattggatagattatctcattttggttgtttataagtcgaacgataagtataagtgaaacgatggggctgcagataaactagctgagtttcaaaattttggtaagcacaagatgaactgaattcaaatttttggtaaattttatatgaatttcactggttttattaatgactgctcggttatttgtcgacaaaaccgttggcagcggttggtggacaaatggtccaggaaattaaagtcattctctgctatcatatcttcagatcgtcggtctctttgctattaattgcgttgtggaaaactcagctttgcttcctcgactggtcacttgatccccctcatttttactgacagtactgtttcaataagttttctagtatttacatgttaaaatataagggattttattcatataattatatagataaaatcctgatatttttggaacgaatgaggtagtacgtacctgtactatctgcatagtttccttctcttttagtggcaggttataacatactagggcgtgaagcttgtgagtattgtaggtaggatttattcggatactctaggagtctaggtgactaggtgcatgtttcttttttccctactagatatatgcctatatattaatgagaatatatgtacctttcaaatatattagagcatggatgatataaaatatgctgatgttaccatcacgacggagatctgccatgttgaaattaattaaatgacaaggacatcaggaggaggaaaatagtggagaaggatgatgccgtttgttaatgttaattagcaaatatataccactatggattctcaattgaaatttaagccaccttttgtttcaaaagttttattttagatcaccttaattaactaatattttcactcgagaccagttaaatttacatttttttactttaaccaccataattctcttctattgccatatttaaccacatccctccaacaaaagatatggcttgcgcacaagagaggggtcatggtgtgttggagataatgtactcaaggtcgttcatgtggttaagaaatggtttgggatggtccaaattactatataatgataaaattaactagtccaaagtaaaaaaggatggaacaaagggtgggctaaagttaaacttggtaataaagtgatccaaactgcaatttaacaatagttaattatataaatccactaagtgaaaaaaaaacttatggtacgagttatgtctatattattcaaatgtctctatactattttaaaagtgacagaacttactcccctaagtttaagtcccaaaattgacacgtgctcatttttacggctaattattttgttggtgctaggcaacgtacctatcgatatcgatatcgagatgtgcatggatacttcatcaatatttgccaatcttaaaatatgacacatcctaattctactctttcaaagatactcatagagatatgtgtgtgtatttacgtttatagagataattgtgtgcgtgttgtgtacatttatatttatactgtgtttctaaaaatattaaatatttagtcatgtggctgttactgtataaccgccgctgtagcttgatcgaggtctggttccatcttccagctctttcatctttcatctttgcacccaacccaaccaaacaagtcgctgctaacatgacagaaaagcccacctaaccgcgaacgtgcaggcaggtcgagggctgagctggccgctaacacacactcattagagcaggtacaatagcatactattagccagctataaacatattttaatgagataaacgataagagaaaaacagcgggctacagatctgtagccagcttcaacacgaactataagacgcaatgtgtatgataggtgggaccatatattaatagtatagtaagcggctattaaattggctataaataaattaaagccggtagtaggctatactattaaacttgctcagcagtaggtaatacgtctctttttcagtacagtccacatctttaagggacaagtcatgtgtgcctcgaacaataactggttggtccggagcacaagtcgcacaatctttttcagtgctgaataatatgcactgttcattccagtgggcctcaatttactgactcgttcgttatcactttcttgctgcccctccatattcggtaacctttgatattgtctattttctcgcacctccgtctcaccgatttcttgcagtaggcagctggcttgttcctaggctgagtcgtcttggcgtgcgggggcggtgatggcaatgtaggccctgtttggatctaagggatattttttagccctccctcaaatagcctaaataactcaaaaagatctaaaagggtgagctatttggaaatagcccacccaaaaaactatcccacccaaggggtgctaattggggctattttaggtggggcccactgaaaaagtggcttttctctctatctctctccatgagaaggtacattaaaagccagatagctctcaaaatagcccttcgatccaaacaacttagagctattttattggagagttattttcttgtgctaaaaaatagctctcaaaataactcttggctagttctccaaacagggccgtagttgaggagaggccaaacttgccgcacattaattgagataaaagccttccatttgttgaagtttgggtgcttaagctttatggtgtgattaggacatgtgacttttctttttcctggttaattacgataattacgacccttcagggttgtaatcttataatttttttctgctctatcaatagaacttcgcaccttctcgtacgagtcgttccaaaaaaaaaaggacgtgtgacttgacaacgacggtagcataggggttgacgaagacagctctgatggatctgccggtggtggaaggagggatcagttggccatcttagccgacatggacgatgcaatcgcgaaggactggggtggactcgatcaacatggcgtgatgctacggcacggcgagaatgcggcgctggaggatgagcgtggcggaggtgcggcgttagggcagcggtcctcgaaataggacgtcacggataggatgggcgtggcacgatggagtttgcatgacaaggaagagagtgaaaactctatttggtgcagacatgcgtgggtaggctacctcacacgacacggttttctaccgagccatcgcataaagcccaagatggcataggatgaagccgatgatcatgatggcacagggatgaaacccatgatggcttggatcaaccatatatagtaagtgtttagtgattttatgcttttgaattattttttaatttattttcaaagtatgtcaaaattgtgtaaacttttgatagagatttaaaacttttaacctgaactttaaactttctgcccaaaatttaaaaccttcatctagattttgaaactattaacttaaattttaaatattctactgaattttttaaaaaaaaataaattttaactcaaaatttaaaactttcaaatcaaattttaaaactttcatatcaaatttcaaaactttaaactcaatgttcaaaactttaaaccccaatttcaaaaactttcgactagatttttaaaatctttctaccacaaatttaaaaacttcaaactattccttaaaaacttttaactaaattatttatgtagtggttttttaaaaataataatactaactattgtcattagtgttaatatgctcatcggcgtaaggcgcgcgtggctgtgcaacttgcgtagctaggatatgcgcgcaaactagccaagcctgaaagagagggtgcatgaccagtatggcgctgctagggcatggaaagacatgagaaatgcagactccgatatcatgtgctccctccgttaaaagaaaaccacttctggatttaaatctagatagagaattacgagatgtcacgtactcaatgtgagagagggggaactgatatatatatagccaatatacaccagttataacatatgcccaaatagaggagatatatatggcaagaagagaaaaggtggctatataaatgtgcaaatatctataatttctttatagtagcggccatcaatccacctcccgctcgatccttgttggttcttcaccgtggtgagggctccattcctcttccttgtctgtatttcaaattttttccatgagatttgtctaccatggaagcaggataaagatgttaggatcggttagggttttcactataccttgcaccgccaccatccatcttcctcgaaaccgtctagtaggccactgtcgcctccctcggccatagacgctgaagcgtcccgaggaaatgtgttagaactcaaggtcgaagttgtcctgctagcttaggtccccaactccccatcgttaaaggcccaaggtggaaagggagaaagggcatggcatgggctttaggggcggtctgtcttcttgggcttgccaactggaggtaggaaggtcaggccagcctggtttggttggcctggtgggagagaaaatgaaaggaattgagaagaataagaagccaaattagactttaaataggtctcgaaggatttcaattctacaggaaaattttcctatgaaagtgtttgaaacaaaagattgaatcatatgctattctttgaaatttctattaaatggacaatcctatcgagattttaaaggaaatttaacaagtgctctaacctcttggaaatttttctttgagtctatctctctcatataattcttttgtttttcctgcggtctaatcaaaagattatttctgtgttttttttgtgtgttttgcaatcctctattttgaacttgcattcctatcaaaattctgcatttttcctattcctttttttttttcaatcctgctattcaaaatagcccttatgaattttagggtttggattaggtgagttgggttaggctaatagacttttaattctaagtttgaaaattagtttcttaaatattttagttcatgttaaggttttagaaaataaataatatttatttcctttttttaatataatttattgatttaaattaattcgtaatcatgtttttaataaatgttgtatgaatttcatattttaatttagaatttaaatatgttttttaattatcctctggatttatttattttatttttttgcactggcacagaaagggaaaatccaataaataccagcgtgatgcaatttgaaaaaggttttattattctaaatgtttgtctccaaattttcagatttaactattcaaacttgacaaataacgatccccccacttaatctgaagtggttttggttctacgtggcattcgcgtcacaatctggtcattatttttttattaaaaaaatcaatgagccacacctattagattctctcccttttcttatatattttcccttcttcagtgattaaattgaattaaactccaacatgctcgaccagtttcagactttcagtaccagttcactttaaaaaccaaaagtgataccaatattatttttagtgatggttttaaataactaggaatgctgtggtggtcgggattgatggttgtgtggtaatgtaaatttcataataatataatactccctccgtcccaaaatataacaacttttagcccttaggatttatcccaaaatataacaacttcttcaccaatattctcttcccaaccaatcacaattctccactattcacttctacctactttcttaataaccgtgttcaactctaaaacttcttatattatggaacggactccactattcacttctacttattttcttaataaccgtgttcaactttaaaacttcttatattatggaacggactccactattcacttctacttattttcttaataaccgtgttcaactctaaaacttcttatattgtggaacggagggagtagtttgctttgtttctacttcccgagttaacttatatctgttttatgcttatttagaatataggtttttttagtctttttggaaggacccacaccaaagtaatatatatatatatatatatatatatatatatatatatatatatatatatatatatatatatatattccaagctagaacattaatctttgtttcatctggatgtgtgtgttgttggatgtcgacactatttggtttcagccggaaaaaaaacggcattacaaatccgagaatttccacactggtgcttgccgtgcataaacttacgatatagatgcaatctatctattatattactagcaaaatgcccatgcgttgtactgggggaagaaaaaaatagtaattagtgtgtgggagcataaacaccaggttcattgaggtctttatagtcgaatcgaatctttctagtgcaaataagacgctaacatgatataattatttgttgctctaaatccactgacatggatactaaactttgaaaccacaaaaaaatatttacttttttgtcatgtattattatgagtcaattgcagtactttgttattttttttactcgatattgataagcactttttttcatattgtaaagagtaaccataatataagatatattttttgctagctatcagattaacctcactgcactccaattgcataaccactcacttaaataatcagaaggaaagaaaaaaatgtggtatatcgcagaataactttcactctaaataatagaagaaattatacgatgaatgaaaaaaagtgatgtgattaggtgtcctgtggcgaatgagcaattgatgagggaaaaaaaatccaaatgtaaacacgattcaatttgttggtgattactttttttttaaaaaaaagaaagacacatgtgattatttttatttttaaaaaagaatttattttgtcggtaaataattcattttattggtgactacatgttttaagtaataagatctcttctttactttattcgtgttcggttgctacagtgttgcgcagtactgtgctgggctggtgggctgcttctcctccgctctgtgggctcgctggtgggctgcggctgctatctgggccggtctgcagctgctttggatgggctgcctcgtcactaatccaatccgggctgctttggatggactgctccacaaacaaggttttctctttttatttttcttctctcctttatttgcaggcgtaagagatcgtggccacgctttcggatcgtggattagcgacgaattatcgtgtgggcccactcttaatgacggacgaaaagattaaccggaagccttacttattttttaattagttatatagatatagatagatatagattaaaggaatagaaaaaggagcctccacgttcgctcttatagcctagaaattctcacattaatcggagaaaaataaaaaaagtagagtccatataaaaatacaatttagaaatagctgaaattcggaattaaaaaataaaaaatattagaagaggagactagagtccatatagaaatacaatttagaaatagttgaaattcggaattaaaaaataaagaatattagaagaggagactagagtctatataaaaatacaattaggaaataactgaaattcggaattaaaaataaggaatattaaaagtagagtatagagtccatatagaaatacaattaggaaataatagaaattcagaattaaaaataaggaatattagaagtagagcatagagttcatgcagaaatacaattaagaaaaaaaatagaaattcggaattaaaaaataaggaatattagaagtagagtatagagtccatataggaatttaaaactaactaaagttcggaataaaaagagcctccacgttcgctcttatgaccgagaaattctcacattaatcggagaaaaagaaaaaaagcagagtccatacagaaatacaatttagaaatagctgaaattcagaattaaaaaataaggaatattagaagtagagtatagggtccatataagaatttaaaactaactaaaattcggaataaaaaggagcctccacgttcgctctcatgacctaaaattctcacattaattggagaaaagaaaaagatttataaatagctgaaattcggaattaaaaaataaagaatattagaagagcagactagagtccatatagaaatacaattaggaaataactgaaattcggaattaaaaataaggaatattagaagtagaatatagagttcatatagaaatacaattaggaaataatggaaattcgatattaaaaataaggaatattagaagtagagtatagagtccatatagaaatacaattaagaaaaaaaatagaaattcggaattaaaaaataagaaatattagaagtagagtatagagtccatataggaatttaaaactaactaaaattcagaataaacataataaaatgaaaagtagtgtttagagtccgtataaaaatataatttacaaataactaaaattcgaaattaaaaaaaacatgggaagaagagtttaaagttaagataggaatacaatttagaagtaactgaaattaaaattaaaaattaaagaatattgaaagatgagtttagagtccacgtagaaatacaattagaaataataaaaattcaaaattaaaaaaaaatattaaaagacaagtctaaagtccataaaggaatatatatgatttacaaataactaaaatttgatattaaaaataattaataactaacacgtatataaaatacaatataaatattacacatcagtagtttcgtaaagttattgcaaaatttaaaattatgttgtcattgtaatatattttaataatataatgacaaaacgtatatgctattatatgagagaaaatataatgatactatccgcgcaatttacgcgggacaccttgctagtttacaatatataaacatataagatgtttaaaccgttacaataatagttcacagcccacactggtgcaattgggctaatcagagcgattcggcatcaacatgtcttatatatacgtcggacgtccgaaaatttgcgaaatatcagacgatgctccgcatgcccctctacccctgctgttgccgtttttttgacaaattggtccttatagaaaacttatttcgaaactagtccataccaaaaactatatctagaggttgttcatatcagcgccaatgggactggcgctgacatcgcgccagcgtggcgggcgagacgcgacgtggcagggcctcagcgccaatgtatttggcgctgaccccttgtacaggctaattaaaaggatgcgcggccattaataagcaatgcacttgtggtgcaatggtatgaccatttgcttgtgtaccctagcaccatggttcgactccctatcacggcagccttgttcgttcttttttttttcttcaaatcttcaatctacgtgcgtacattagtacatataaatgattaatgatgctctctgttttttaaatatatatatatatatatatatatatatatatatatatatatcagaatatatgttctacagcggcgctggcctttatactggctaaataaaagcaaaagcaaaagcaacaattaggtttggcttagctcagtggtaggtatttgaaaggtggcgttacagtgaccagggttcgaaccctctcctttatgtttttactaaactttttttttacttagttctcaacttgcggttttaactttttcaaagctcaggtatttttaagtccattcttttatttttaaatatgtactaaatgtgttattccttttaaatattttttaaaaaagtgatatttcttttacaagctcaagtgttgttttaattttaaaaaaacacgtgacattttagaataaaacttacccttagttctcaacttgttgtttattttttaaaaaaaaactcaagtttttttaaatccattcttctaatttcttttttataaaaaagtgatatttcttttaaaagttgtctctaaactttttttaatccattcttctactttttaaatttgtactaaatgtgatatttctttttaataaaaattaatttaaacaaaaaaaagtacattgaagatttgaagacaaaaacgaaaatggagatcatcattaatatatacgcacgtagattgatgattttaaaaaaaaacaaaaatggctgacctgggattcgaaccctagtcctcagatatagcaagaaagaaacttaccgttgcaccacgagcgacaccgttaattcattgccgcacatcggtctatttagggtgtgcaaggtgtcagcgccaagtgcattggcgctgaggccctgccacatcgcgcctcgcccgccacgctggcgcgatgtcagcgccagtcccgttggcgcagataagaacaacctcagcaccaaccgctttggcgctgatccgacggcctatttctggatatagtttttggtagggactagtttcgaaataagttttctgcaaggaccaatttgtcaaaaaaacgccctgctgttgtgttgcatgcgctgctagctggcaagtagccactgccacatagcaactagcatgcctcttgctcacatgcagtgttgtttgaccatcattgctatttttttttctctccccattttcttatatatacgtacttattcattacatatctttacacaatattttcttttaaaaatacatatatgatgcacgatcaaattagaatattatatttgtcttaattaaatcgttagaataatatatcacattgatgaaattatatatatagtcaaccattgtttcactatttatataaaattgtttcatcgcatgaaaaaaaatgtttcaactcacttaataaatattttatagagatgcaacatttaaaagaattgtttcattatttatataaaattgtttcatcgcatgcaaaaaaaaatgtttcaactcatttaataaatattttatagaatgcaacatttaaaagatattgtctgcaaccatgataacaattagacgaaacattaagttctatgttatagcatgcatcaatcatcaagttgtagttgttgaaaaataaaaaatattgctgaaacattcaaaacgccaacatgtgcaacatttacaaattacatagtgaacaccacgaaatatttattgcaacatctaattaacactacgtgcaacatttaagactgcaacaaactaaaaacccatcaaaatattatcaagtgagatcttattataaagatataatcgtaataaatccaaccgtgtaattagattatagatcggatgaatagttgaatagacaaaatcatttgaattttgggatttaaatgagtggccgactgcttcttcagactgtatggtcatggtccatgacgtcatgccgcacaactaacgctgatgatgtggttaaactttcatcagacggctaattataagcatttctggaatcagcatcttgcaagtttgtccgatgttttggttccgcccggacgaccgatcctcttctgctctgccctggcttgactttcgttagatcttcttctacacaaacatttatacggaactagaaatagtttaccgggattgctatatggcattcgaatgaaatttagggatgaaatcttacagattttagaccattggatctatgccaagattcgtgcatcggcttctctcctccaactccggcgggctcctcttcttctccggcgccggcgacaccccaacttcggcgggttagggtttgaggttggggtgagggtaggaggagggttgggggag

SEQ ID NO: 28531 - DNA, 14433 bp, Oryza sativa
atataataatgttcaacttcttcggcgggtaattatgttctcaattttatgagagagagagttgggtggcttcacagccatacgtcttaagattaataataaagaacttaaaaggtcttaatatggaaacgattgagaccgtcaaggcattaattggagcttcaaaaagaaactttaatgccctaatttcggaatattaacacctataatataaaggatgtttttcggtcaagtttgtcgtagaaaattgagggttttaatacccaagagagtgggattatctaaagaagcaccttgaaagggaactggtttaccagggaggcctcaccggcgccgttgaccttttccggccagccagcgaggcggccggcggcgcggtggggcggtgacggtggtgccggcagcggatcgcgcgtgggacgggaggagggtggcggcatgatctagaaaccggggggagaggaggaagttagggttaaggggctgcacgaatcttaaagcacatccaatggtccaaaattcgaatgataggaggtgggattttctgtcacatgatatatagacagcccctaaaaaaaataaataatttaccttcttgtccgagtcctatgctgttgcatttgactcccaagtttgatgctcatagaagatgttctatatataagaaatattgctccaaacaaaattattaacaagggattatataccaattgtaacactcgagaaaagaaacgaatggtcaccagttgatacaagatttttctcttcatacaggagtactacacagaatcacaataatattcaattcggtcagttactaacaccaatcatttgttacaatctctcaccaggaagtgaaacaaagttattctgtctatgctttgaattgttcgtgtgatccatcacattgctgcacagtcaacaaattcaaacttctccagaaagttaagcgagcagaagtaaaatctcgagccttttgagatctgtacagaagaacagtataagattcaagctagaagacggcttccactgggttcttggcatcgccctcgcaccgtaggagctggaaacgcatctgacagagtcctgattattctctccacctggagcattttctgcatcggcaatctatctgatgatagctgacgcaaccgctcgatgaaatcctccatgttcttcaccgcattcatcttacccacatccctttcaacaatctcgtagatcaaggaaattgctgagaggatgcccttacgtgtcaccggcccacttgcatcttcagccatgacgatattcaccaattgcaaagcctgatcacagatttttctgaaaacacgtggggattttggcagacggtcaagaagaagcaggatcccatcagtgaacatgtggcattccagcagcatctgaggcacctcatgaaatctggctggttgctcgccttcaccatctgcgtagagtgcaaggatcgcagtggcagcctccgttatcacttcagtatcctttatcttgagcatacctcgaagcattttcattccaccagcatccagcattcttttctgaacatgtcaaactctgacaggacagcaactatagaagctaccttcgccaaggatgatgttcgcttaccacgattgccagccttcttaacaattttttttatagcacctgctaattcattctgtccagctaggatctccctgttttgcctgtgcatggtcagattgaggattattgtgagcctctcttcctcaagatcttgtgtccaactcgatttatatttcctcctaagatttatcagcactgggataatgtccgcatacttggcaaggcaaggttgcacccctttggtggttttagtgagtagctggatcagtttcaaagcctctcgttgcgatgcagaattccctgagaatagttttaggatgcgttgaatttgttcctcctctgaaggttccaagggagtggaaggtgtatcagaagtggtagatggggaaaggtccgagtgatcgaggcaccatgcagaaatcatgtcacggagaaggtggtttggaacagagagagagtagggcaaggagtgatcagtaaatgtgctggtatttgtccatggattctgccgtttttggttgttttggtatgtttgatcaacagactgcaaccaaacaagcaaaatatggttactgggataatccaaatcatggtggatttgcagaacataaccaccatagctaacttcagaaaaacagcacacagtaacttattgtggcaaaaaaaaaaagttttactaatcaatatatcaagcaatagaatgctaaatcgccaaaatgttcataagttatggtacaggatattatagaaaaaggggcaaaagactatgcatgaatggaaatgaaagaaactagggtaaaattattattttgtcccgtgttctatccttcaggatcactatacattctagtcattatatcataagatgaacttatgaaccatcataacgtgcatgaataaagtatcaaacctaagcagcatttgacaattcaaactactacagaaagcaggaagcgggtgttaattttaacagaaccaagagaaggttagcatttgatttgaaagattaaaaaataggaatctaagatttaagatgatgcaaactcaagagtaaatctaatccaagaggatttgcattttagtgttcggcaagtgaagcctaaaaactagaagtgcattgtaaataacaatatttaaacaaggacactaattactaccatccagtgtaacaagtgtataagtacaacgaatcaatgttttgtcaattggtgatagataatttgcctggtttctgacaatcttagctttttggcagaacattagctacaacaaacaaaactgaaaacacccagcagataattatacagaattccaactggataaaaacctccattatctaaaacaaaattggataaaatcctagcaaaggggcaatcttgtcacttacatatccagaaggcaagataacaggatcacgcattacttccgcttgaagcgtaccatcctgtgaacacacataattgtaggattagtgtaggtgggtaagaaatggatcaaacttttgattcgatgcaactatcatacgtatgaagaagcagagatgggtcaatcgatttgactgaatgcaactgtcaggcaagatgccatgggacttgcacaaatgatcgaattcgagcgcgtgtaaggaaattcaaccagatgctaattaataatgcccaactaaaggaaagggaattcttcattgatcataaatagcacaagatgtttcccattggtgatcactgatcacgatgcagggaaagaatcaaacagcaggcagttcttgcacaacaacaaacaaaatagatgcagaaagaaatgcaattgatctccttaggaaattcctcgtcctaaaacaaacaggaacaaagaaattcctactacccaccagcagcaaaaacaaacaagaaacagaacaaggaggcgggtttgcaaagaggcaaagatgacaagaacatgaacagagctggaagcctcgacaagaaatgccaagaattcagagtcaagagaccaaggagcaggcacttacatgagcaataggaataggccatcttgtggcgaactcgtaaggcagctctggaggcttcgctttgcggtaggtgaggtccatgaggccggtcatcgcctgctccatcaccgcggacgccgcctcctcgtcgtcggcagcagcatcgtcgtcttggaacttggccaatgccatccgcatcatcgcggcgtagtcagacctcgtggggccatcatcggcgcccgcagctcttgctgggtcctcgttcttgggcgcagacccagccgtggcttcatcagcgccggcatttcttgctgggccatcgtcctcgggcgccgccgagcccgacgtgccggcaacatcagccgcccacgccggcgggaactggagcgggggcgggctcgatggtgtcctcaggggcgaggttggggcggaccgccaccctggcggcaatggcagcggatacaagccggcgtggtccaagccgaggctgctggagcgttgcaacccagacatgtccgccttggccttctttgccaactccatctcgaggcgaagctgcgcttcctccgcctccggatccatggccggcggtgtcctccttcccgaggaagaatcgctgcttcccgccggcggtgggtgggtgcccgtggcctcgagccggcggtcgaggagttcttggtttcttgcgttgcggggtggagtggagcgggtcggtttcttggagggaaaaatgtgaagaggtgtttggatacaaagaagcctggggcctttctatttataagccttgagttgaggacttgatgaccaggagatttctggttttgctgcccctgtgcagatgtaggacgtgaagcttctgacgagatttctggtttgccttgagtgaaacatgtaactctgcatcatggtgtcacttgatcatcaactgatgaacactgatctgaggtcttgacaggaagacgcatagaatggatcgatggttcttgctatctgggaaattgatcttgctgccatcagatattgctactagaacaaccactctgatcaagatcaattcgtatgtcagcaagtatgagccgtgtagctgagcctgagcgcaaccccgcataggcgacatcgatcacacatctagatctcttcaatctccactgcccggttgtcatcgtgtcaagacatctgccccagtgacacatgaaagcagaaggtgcccaattgggagccatcatgtccatggcaacagtgctctgcctccgccacgccatcgcggcaacccggtcaaaccgagcatcctggcccagatcccactgtacgttcacggcggttgaccctgccgcgcgctcatccccgaaggccgcagctggaacagcgccttcccctcgtgcggcatttcgtcgagcacctgagctgcatgccttgcccgcaagccccctctcttcgcggtcagcaccgaggcaccgagcgcccgcaccagcctcactcgccaagcgccaccgccggagacaacgcctcccaccacctcgccggctgcctcctccgtttgcatcctcctcgcgcccacgcgacggagaccgtggcgaaagcgcagacacgagtggtggtagcattcctgtggagtgtggagtggtgggagcccggccgccgatctagattctagagacatctagccctctaggccatataagcccaataaatctggccggaatttcccgctaactgcacttagagaatgttaaataaaggaataagttcacctgccatccctctttgacatcccttatcctctgtaccaaaaatcttcacccataaactatataaaactgtgcagtttagtcccataaacgtggcagcatagagcgaaacaaaaagtatgtagggcccatgtgtaagtgagagaataatgtgggccccacatctcttttttcttttctttattctcctctctccttacttctcttctcgggcgctcggcctctcgtcctcctcgctagcagtagatgggggggaggtggccgccaagcccgcccgagctccgccacctcgagaggctccgccgccgccacccccaacgacgacgacctttcttctacttaccgtcgcatggatcccgccgcggcctaggaaaggcgtcgtgccagcgcgggcgggtcccctatcggcggttcttactcttcagccgccgccgcatggatcccgtcactggcctaggaaggcgtcgtgccagtgcagatggatcccctttcggcctctcctcgtcctcgccgccgcggtatggatccccccgctcacctagggaggcatcatgccagtgatcttgccacacctcacccacctaccacccccacctccccatcaaacactaccaatatccatatccacccattcacgcgagcgactaatcaattcggtgagagtcaacggcggcggaggaggaggtggagaaagaggaggagagtagatctggcgggcggcagcgatgatgaagttgttgttgccgcaaagccagctgtggcaatcggcggcaactttggcagtgcagtcttcgggaagaggcatggcgtccggcggcgtcaatggggctggctccaacagtggcgcatggatgatggtcaacaacaaaacatcgttggtggcgagatgataccagtcgctggcggtgagaaaggcggggtgcttggtcaggcggtggagcacacgcacatgtcgtcgtcgtcgggtgcagcggcggcgaacatgggcgccgccctggcgcgtgtgcgtcgtcatcgtcatcgttaggtgcggtagcggcagtggtgacgacaaagcctcttgagatggcggagctcgcccaggcttgccggtcacctcttccccatctgccgccggcaaggaggatgagaggtcgagcccccaagaagagaaggagagaagagaataaagaaaagaaagaagagatgtggggcccacattattttgtctcacttacacatgggccccacataccttttgttttctctatgatgccacgtcggcaaaaccaggcatctatgctgctatgggacctaaattgcacagttttgtataatttatggggtgaagatttatgatattatggataagggatgtcaaacaaactcggtgtaaagttgaggaatgacaggtgaacttattccttcaataaacgtgcaaccaacgacatctaagagatagctaaactaccatacatacaacaacagactattaacttgctttcaccaattcaaggtttcaatgttttaaacttttaatcgtaacagtcccttgttccaaggagttgggcattgctgcatgttctatttttctattgtgcgccgtgacatgtagagagcccacgtatgtgcagatttgcataagcgcgtctaattagtcacgggcttttctctatacagtttactccctccgtcaaaaaaaaagtcaacctacctagtataatgaatctggacatccctttgtttatattcgcatcccttcctaggttggcttttttggaacggagggagtatttctctgctaatatgctaaaatcctactatataataattagattagattattaattcgctattgtactcgctcttacattactgcaacaaaaacttgccaagctggcaaacgagaaaaaagttttgagtgcacaacagaggcgacaacggcaaaacagtatcgatgcatggagatagagccgacttagatgatactaaacaaacttgtaataacataaacatatcctattcacataagcttttaatatatgttttgcatatcaattagcaaatataaccgaaaattttagaaaaaaaaattatacataaatttctaattacacttgtatgtaaattttatcttcaaattcattatattttaactgtaagaaaaaaaagataattctgataaattttaactgtaagtttcgactcatcaactctccaactgcccaaaaaataagtccgccatttttacatgcatcatcaatccatctaaacatacaccttacagttttcagtttgcgacacaacatacaacctgtgaaagtcctgctgataggggcaggcaggcactaggcagcgagggatgctgcggtttggtatatgggccatggcaaagccaacgttgggaaaattcttttcctcaatggcaaggtgtacaacatattatacctttctaggtgaaagaatccaaaaataaatcaatataaatggctccagaatgcctcatcaaatgttgcatttgtcgtacccataaaaccatgagctgggatcactgcttttggagacctcgaccgactggaagggcttgaactcctctcgccattgctcatcgccgaagctcccacctgtgtcgtatctagcggggccggtctcactaggctcaggtgactgtacaacattgctgggcagtttggattcagcgagccgctggtttagcacaagaacttcttggtcatgatcccttttcaagttgtcgatttctgcaaaggccttgttcatctcctgctctgctaactcagcccgcttctgcagcaaaggaaaatattgttcttagttttgatgaaatagtgacatcaactcaattatcattgttctaatttttcaggttacttaaattttagttgatactgcacaggtttaagataagtaacgagaaccagataaaaaaacaatgcaaatcatgaaaggcaaaataattggtagtacattatttccgaatgggaaattaagatgcatcaatggatattagcctgagacaagggtgcaattggctcacaagagttgatttgaacagaatttcatttggacgcagaagtgaaggcatggaaccataaaaaaacagaacaagggaagaattaggtgttcggttttaactgggagtatcgatgcaaacatcatcagattggctttgtactggagtctaaagcagagcatataaaaaagatgcttacactcaggatcacttactcgaggaatttagcatgtgataaatagctttataaattatagaatcaaacttaatgtacagtactccctccgtactcgtaaaggaagtcgtttacgacaatgtttaagtcaaatcttgggaatataaatcataaataactctcaagttgttgagtttgaaaatttaaaaattatatgaatagatttgtcttgaaaaatattttcataaaagtatacatatatcacttttcaataaatatttttatagaaacaagaagttaaagttgtgttttggagaccgtgtcgctgtccaaaacgacttcctttacgaatacagagggagtatgcgataactacgtaccaaggttccaagcatatctatgtatgcaaagcagaaaatgttacctgcgcaagtgatgcagcttcctcagcatcatttaaccgtacaagaagctcaccagcagcttgcacagcttcagcagtatcacttagctgttgctgaaggcctttattttcatccatccaaaaccgacgctccttctctcgctcagctcttaaaattgatacttgcctagcaagagcattaatgaacttagattcagcccctcgcacaccagcttttgcagcttcctttttcacatcttcaatcccatcattgatggtgcgacacattgagagcaaggatgcatgtttttcctgtaattcacaatactgttctaaaattctagcatgcccctgcattgccatttccaatgccccctttaattcctctgagcattgcttttctgattccacttcaagctgcaaacgttcagatagagatttactcttctcaagctcaactctaagctcttctgtaagagtaatccatctactctcagcagcatcgacaatgctgtggccgtcatcaccagcttcttccaaagccgaaatggttggacgatctgagacagtactaattgcctggacaagttcaactggaggcctacacaatgccattgatgatgacagcatgtaatgcaactgatttttcaggtgttggatttcctccagtaaaacttccttctcatccttgaagtttctgtacctctccaattcttcttggattctttcaagctcgattttagcactcaaaacttcaggatggttctcatacttctgatggagaatctgtttttgttgatacagagacatgtttaagaatatagctttgctcagttcaaaagaaccaagtagatatttggcaacatagaaaataaatggaaaagcagaagaccttgttttcgtcttggagagagagattctctgcatgcataagttcttcagttggtaaaatcccatccacaagtgtttcaagccttgcaattttttcttctcgtatttgtgcaattgcagcattgcattcacgttcatgcttatattgttgcacctgcaaaaggaaaacacttcagatcgacgaataaaagatcctaaaatctgatagcatgggcaaggcaccaaccaaacgttttagctgttgaatttcagcagcttgctttgcacactgttcatcacgtaacatctctcgtctgatggctccagcaaggaccttctccacagcctataggaataaaacaaacccttgcataagttgtcatgctgatattgcagataaatggtgcacacatctgcatagtaagttagtaacctactttaaagacttgttcctgttgctttagatcattagagggtattgatccatcaactgttactaactgtagatttatgcaatcagagatttctctgtttccatctgtagttgcttcaggctgattgctaggaattagagccatagtgttttgtcttggttcagattcttcggggtcggtttgaatagccacatcaactttgcaaactggaactgaaagatgagcgtccataagtctagtgttaagacctaatgatgatctcctccaagtaacactattccgatggctttcaatgacttgaaggcccttctgaatgcttgctgccaagtttgacttgcatctacttgtttcaacatccccgtgaggaaatgaagacttgttttctaaattacaaggcttttcaacatcattgtcatcaatctccatctcctcatcactatcatctttgatggtggggaatgcagttggacgactcaagctcattttcaaaagaaagctattttgagaattccacccagtggaagggctgccattgcttcctggcaagctcccatttgatctcacgtgttgaagctcctcctgcaataacgatagagccaattaattgaaaatcatgattaccaaaaagaaattaaaataataccttcagctgcctgatttgctcacggagaacattgacatcatcctctctttgttcattgacaacagcattgttttttatatcttttgcacggtgagcaaatcttagagtgcttagtgtttcactcttacagctgcagaagaaaaaacaaattataagcacatgaagaagcaagaatggcaaaagaaaatagcatgtcagtctcaaacagtacttctgtgatggtgaaaccgcacaaatcattgcgagcttagcattaccaccaagtgattcttgcaaaagaaaggttaatttcgaatctcgataaggaatatgatgcctttgttttccagactgggatacctccgccagtatattaatcaggtttctgcagcaacaataagtagaaaaataattagtgaatctttacttccctccgaccatattttttttatgattaggacaagatttggtcaaccttttgaaatttgatcatcaatgacttttcaactgcttattttataataaaaattggtgtatgcagatttgccttgaaaaatactatcataatattatgaacttattagaatttataaagttatataatataaaacgaatggtcaaattttcaaaagtttaatgaaatcctatcctaagcttcaaatatttctgaattctgaccagcgtaattaattttaaaatgcaaatgactgaatgtctatggtttgttagttctaaagaactttttttttgtgtggggggggggggggggaaggaacataatgtaactgtatctaggaaattttgcaatcatatagcagtataatgcaagacataaaggatcagttaaggagcccacatctagtccatgtcaaatcagtatgaaaaggccataaagaaatccctgggtatttgtctcaagtttagtaatttttcctgtcttcaatacatatttgtttccaaatgcattgtataccaggatgtatgaaaacattctcaaaatcatattaaaaaatgaaaatgacagtagtttcaaattcatgtaatactctccatttgttttatgaaatactgttcaaatatgaatttcaaatataaagggcacaacaatgcttcatatacatttagagactcacatctggccaattctatgatgactgatactttattaggtacactgaaactaatggtgcaacgtaaagaagctatgctaaatttatgatggcaacagggaatacttgtacaaaccaaccataaatccttcagatgcaacagaaagggcaatagtaattaggctttcaacacattcttcattcattgaacaaatcataccccaattgtgaaagtgaacggtttatgttccctgcttcttttaagcgatcaccagctgcgtttgttaatttctgccgttctgatccagcaagatcaaccaagttgatcctacttgttcttgtaaagtttgatccgtcctccatattctgtcaatagtaacaaagttgaagaactataagatcatgctgaacaataagttattggaagcatatgaattgaaattagcatcagagtaatttacaggtacttcatatatacatgataatccctccatcccaaattatgagccctatatttttttttacacggtctgcaatgacatactttgatcattaattcattacatgttatgtttctagtgaatatgaaattagcatcacatgaaagtactttaaaatatgaatctagtgatataacatgcataatatttagcatagatatggttagtatgattattagtcaaaagttaccaagtatgattttccttaaaaagggggtgacctataatttgggatggagggaatagctcgttgaatttacagagacagcataacatgcaaatacatgagcaaaagatgaatcaaaaggtaatgccaccattttttcccagggaatgcccaccatatgcgagaaagctaagtgtgaatatatgctcagcatgccagcaaaacacatgaagatgtaacagattacttaagactctctaaggatgtcctcaaagagccatcaatgcaactttgcactatcaggcatcaaggaaataccctaatggtaatgcgtccaaaaaattacaactacaagtagctatcctacaattcagttaaagtttgcgttctgtagggaaaaggaaaagattgaggcaagggtaataagagctactccaaagagaaaatgtcagttcagaaaaagaaagcaacctattgttaaaaaccaacaatgctcctataaaatacactttgctttctaatgtaataaaaagatgcaatcatgtgctcaaaaggttggttgaagggcagggatgagggataaaatttagagtttcactcgagtatgaataaggtaatactttggattctgacttaatgaaacaagtaaaaacacagtgtgatcgtgagctttctgcatttgcagtagtagcctcagttcttcggtttgccaaaccctgcaccatcattaataaataaaatgaaattatccatgaaagagatgcacattgccaggccatagggcagaaccattattaaagacacttgcatggaaaattatcaaaacatgcaaaaacagaaaatatgcatcatttcttatcttttttcttatctaaaattatcttaggatcaatttttcttagctactagtggaacaaataatcttaaaacgacataagctatgaagtagcatattattattatatggttagaacatctacatcaataaagcacttctgagcagtaaatacaacttttgttaaaaattggagtaagcatttatcattacaactacatggaagagcaaaacaagcactggtgataaggttttagatgataagacaaacagttttaccttttctagcaactgtgtaacatcatttatcgtgaacacggattcctttgtcaatgactcaacataaacagaagaagtaccaacatcttctctaatctgaaaatgtacgagacgtatcagaacagaagcagcctacataaacagaagaagtaccaacatcttctctaatctgaaaatgtacgagacgtatcagaacagaagcagcctaggaagtattttaattaaattctgaaactccatttcacctgaaggtttctttgcacggggtccaacaaatcagtaatttgttcattgtagatctgcatatcttaaaaagtaattctgaatttctatcacaagagagaatcataattattgtgattttagaggcttaaatagcacttgcctcaaggaaagagcagcagcaatggtatactagttgtttattggagtgtttagcttgctcctgcaaattaacagtacatatggacctttaatttgcaatcaggaaaaaagggagctatatagcaaatcatgacgtacctctttgatgcgtgaaaacagtagttcaaaaacacgaggagtcagccccctctctttgctgaccgtatcgtcggacaaggcagacagtggcccccacatcgtgtaagtcttccccctaccagtcttacaaagtagaaatttgattgtattagtcaatttgctttacag

SEQ ID NO: 28532 - DNA, 718 bp, Oryza sativa
  unsure (1)..(718): unsure at all n locations
ctgtcccttgatgaccactgttgtagcncncacncnattgcgttgccctgcatgataagcagcaaaattgcggccttgttgtggattgtgaagattttctcgaatgaattgttacattaggggatattcgccgtatgggatttgaattacatggggacagtttcacaagtggagaccagctcaagcccgctgtacgtttgaatggtgaaaatatgtatttccattagaatagttctacgtaaataagtaatgaattggtgtgcatcatttcacttggtctggtctaggctggacactgattttgtttaaaccattgccatttaatgcgatagcttaaaatgaattctaaattgaatgtacatgctttctatctctgaaaggtaaaaacaaaacaatttacacaggctggcaaggaatgtgtactaattaatggagatgttgcaggaaaattcttcaaccatatcattgtgtcttactcgaggattccagtacgaggggaatgaacgtggattgctaacctgctttcctgatactgatttgaccactgcaaaaaaccttatggaagccagaggaataaagcagctgcctgtcgtgaaacgtggtgtcggccatagaactgaaggaaaacgcaagcttattggtcttctacattatgattctattggtcactgcttacggntagtcataagcttatatgtgttctttcaaactttatatt

SEQ ID NO: 28533 - DNA, 6118 bp, Oryza sativa
aattagatctatcattgagcatgtgatatcaatataaataagagtatgaaattcctatagagtttttattggacaattatatttcatttgaagaaaaaaaatcatgtaatatattttctacagaaaaattttaggcttcgaataacataagattgtgaacaggtgatgatagccaatcatctagcaaaaccggtatgtgtaataagtccaaatactccctccgttctcgaataattgacattggcactattcaaatttcaactttgatcagttgtattttttgtgttaaatttatataacacttgaaaacatattatattatcgaagtgtgtagcatcataaatataaccatacatttctatttttatcataatataatcacctaaaagtaatccatggtcaaagtgagacggatgtaatcagcagtctcaattatttgaggacggaaggagaacagagggggtatttaaacagacttagcacagcagattagcaatccaaacagtactgatcagattcttgggcacttttgcttgtcttgtttaggcaaatcacccatacagatcaagagccgagacacagcaccatattagtaactcaacggctcggtgctcacccatctccagaaccagaaaagactcacaaccaatccatttcctaacaggtgtaagtctgacacagaacaccatcgagaatagcaggtttaccgagtgggtgaaacttgaaaaaggtgtaccatttctaacctagaataaaccatcagaaataagatggtcaataaaatagcctagaaccttttttgtcctcttgtttcaaggcggaaattagatagtctccaagttgcagttgttaaatctaagtaaaccaaagctacatatgcttccacaaattacgagagcacggaagtaacgaatcccccaactcctccgggatctctttttttctccccaaaaaaggagtagacccctctcccgaatctaatcaaatataggtactattcgcagtccacctccacccacaggaataaaagaaaagggaaagatcttagtagaaaacatccaagagcataacaataataagctactaataaaaggaatagtaacaaatttcaaaaacaaaaacccccttacccccgagctgcttgggcttgggctcgggctgggcctgggccctggcgtcgaccggcggcgcgggcggcagcaggaacgaggctggcgacgaggccacggactcgtcgagctcggcggcggcgcggccgaaccctagccagtccgcgcccccgagcagcgccggcgccgccgccggctgctgcggccgcgggtcgccgccgccctgctgctgcaacgagagcatctccgcgggggcgggggtgcctcctccctaaggtgaggccgccgctcggccggccagatcgcccgggcagccgcaggcagcggcagatcgggcggagggggaaagcgggagggggttgcttcgagcgccttcgagaaggtgggggaagagagaggagagagagagcagtaaatgccgccgtgttgggaatcgggaatggaaaacggaagagaagctgcagctgctggctgctgcgggacggagagggcaggtgtgcgatatatacggcatcgaggtggaggagacctgcccctgtgcagacggagtggggaaaaaaaggaatttatttttgctcttttcttttttttatctactaaaagattgtccagattcgttgtattagactatattagcttttttttatgccaacatatataaacttttttagattggtacggatattatgaaaatatgtgtgaatgttttaagaaaatgagtgattggttaaaaaaaataagtagataaaagagtatagttacgattggttgagagggtaaggtaggtggagaaataactttattttgggacaagataatatactagaaatagctatattttaaaatagaggtagtagggctacgcggcaccaggaaaatattctttttattttgtgttcttgcagctctgattatcttcttaaacctcatttacttaaatgcaatataatatatactccctatgtttcgaatgtttcgaaatgtttgacaccgttgattttttagcacatgtttgaccgttcgtcttattaaaaacgtttgtgagatatgtaaaattatatgcctacataaaaatatatttaacaatgaatcaaatgatagaaaaataattaataattacttaaattttttgaataagacgaacggtcaaacatgtgataaaaagtcaacagcgtcaaacatttcgaaacggagcgagtataaaagatccgaagcaatttacggcaaaataatttagttaccgttagacaaaaacttcgttgagttgtaaacacgactttttaggctcagtcttgtaggagtataaccgttaggtttaatttactattaaactaaggtttttcttgcggaaaatattaaactaatgtttgataatatatatctccatcctaatataagtgcatcctaatataagtgcacctagtaccaatatgatatttcatggtacaacgaacctacacctacacatacagctatccaaattcattgtactataaaatatcacatccagtttcatgtgtatttatattgggaaggaggagccccatcggttggcctaataaaccaaagcaaaagctaaaatttgatttttgaactgaattttaacaagattttaaaatattttcaatgtaattttgctacaaataaaagtgtaaaagttttacctataaattaattttattccctaataagccaaaccgatggggctagtagtatcctcgcatgattctttcagtacattccaatattacaataacatggttgtaacacatgaaaacagtctagatccaaataatgcaatactttcttctatcataaatatttgatatctttgtataaaatttagaaaaaaaaacttcactcattaattttacattatgacaagatgataaaatttattaagtttatgttgctaggatagtactccaaaacattttgtgtgtatgagaattgggaccatatattaacgatgtagtatataattataagtaactattgtataaatgaactattaaattggttatagatgatttggagctagtagttggctatctctaagcactttcaacaaaatggcattatcataatccactatccaccataataccaagcaaaacatcagcacacagaaccaatattttgtgaccaagcttaaagcataagggagagaaaagtccctcgtttttcatgcgcacgcttcctaaattgtaaaaggtatgttttttaatatatatatatatacatacatatataatgttttttaaaatcgtattaatctaccttttaagtttgaaataattaatactcaattaatcatgcgctaatcactcacttaaatttatgtatctttttaatcttcctattttccctcctctcaaacacacccttagtagttaaggcatactctgtagcaaatcatcacaagaacattgctcgacgtaggaggacaacagtaatgtgacataataatataactaaaatataatatattcatttgttgcgtagagatgttattgttattgacccatatacgtgtaacccgccctcttgccctacctgaacctgccaactactcatccacctcagtttcatactactcgcatgctagtactaaggttggtattcaaggaaaagcgtgaatagtaggtcttcaaacgtaagaatgaggtcgtattagagaatatgtaagccagaagtcattggatgatggtaacccatggtggagacgatgggaggtgagcaggggcttggcctccctcataatttgaggtttgcaatgttaatcactattgcttaagtggttttgcgtaaaattactatctctctttgtcctctttagcagaaaaatgaaaatagaatttaggattcttgttgtgtcattggagccgatgaaggacccgatgaagagaactagggatgagcatagatggtgctttcaaaatggtgctgcaataaatgttcataattgaagtcaacagttgggaaatcaagcttctccaaatttccaaatttgtagtacattttttattttgaattccatcctaaaatataagacacgatccattttttcccgtgtctcataatataaggcgtgcatgtatgcatacattaactatcaccttttaggccgcgttcgttacctcccgttcccaacttcgctccctcgtttttcgcacgcacactttttaaactgctaaacgatgcgttttttgtaaaaaaaaattctatacgaaagttgcttaaaaaatcatattaatccatttttcaaaaaattagcaaatacttaattaatcacccgctaatcattgctccgttttccgtgccagggagtgagggttcccaacccttactcccgaacgcagccttagatctataaatttggtttattttaaatcatgtaccatcaagtattccaatcatattgcttgcatatatggatgtgattcaatcgaggaggtgattaatcttttcttggtttttgtgttagaagtggttgagccttatattttgggatgaagggtgtagtacacttcatattgaaaattcataattggttattccatgttccaccaaaactcagctaaccgctggttgaaaatactactccatccattccattttgatcaccttaaaatttttgaggtcttccgaaaacagtcattatctaacaagggtctctttatttatttgtgcagagagtacatgtgcataattgaatgtattgcatgcatccaaccaaaattaatttctattgatgcaatggcatacagtatttaaaacatgagaaatccgcaggacacaaagcgatgaagcaccttaaccgaggaggattaatttaagaatgataaatatttttgggatccatagtcttggtgtcatttgcttatgggatgatcaaactggtatggagggagtattactaaacactagacacttagggtccgtttgatgcataggagttatcaaaaacatattcacatgaacttcgtaggagtcaattcatattatctagatttcaagtgcctgaaatttcccaaaaaaaaatcatatgccttttctaatccatacttatcaactatcactccccagtagtttgaaatctaacatagaaaatgtcgacgtttgatgtcgtgattccggtatttgcataatatggggatcgttggtactaggatatatgcgagactgaggtaaaagagatggggacgaggatttttatataggttcgggcccctgaattgtcaggtaataaccctactcctgttggccgaaaccagtcgttgctcttattcatcataatcacaccagtacaatatttggggtagcctatctatctgttgtcgacttggcggccataaaaccatcccgtagccgacaacagagtagtcttcctcctcgaatctgtatccggcgagatcaaagacagcgctatgtctctcctgatagtatccgtagacaccgtaggggactagccatgcttatctctgaagtcgatatccggcgtcttgtcttggtgtatgttgacttgtatgttgatcttgtgtattgatctattgttccgtctcccctctcctcctagggggccttgtatttatacccataggtgtccccttgtccaagtagaactaaggaaactaatatggatacaatccgagtagttcttgttgtttccatgtagaactctagtcatcctcccttatgcggaactcctcctatatccgaaggttgtttccatataagacaaggtatgtggtgggtcctgccgagatttagtcaactactattaggtatgtgctatccataaccctgacagaaaaaaattacaaaattagatgaaaacaaacttaattataactcacaaacaatacaaagtcacataaaaatcaaacttagacaaaaaaaagaagtaaaactatctataacaacatatttgcttttgaaatgaataaaagttgcacattgcaacttagggttagtagtgtacaattttaggtgactagaaatttata
